(19) United States
(12) Patent Application Publication
(10) Pub. No.: US 2010/0120628 A1
(43) Pub. Date: May 13, 2010

(54) GENEMAP OF THE HUMAN GENES ASSOCIATED WITH ADHD

(75) Inventors: Abdelmajid Belouchi, Beaconsfield (CA); Vanessa Bruat, Montreal (CA); Pascal Croteau, Laval (CA); Daniel Dubois, Laval (CA); Randall David Little, Dorothee (CA); Bruno Paquin, Chateauguay (CA); John Verner Raelson, Hudson Heights (CA); Jonathan Segal, Efrat (IL); Paul Van Eerdewegh, Carlisle, MA (US); Sandie Briand, Montreal (CA); Sem Kebache, Mont-Royal (CA); Tim Keith, Bedford, MA (US)

Correspondence Address: DOWELL & DOWELL P.C., 103 Oronoco St., Suite 220, Alexandria, VA, 22314, US

(73) Assignee: GENIZON BIOSCIENCES INC., Ville St. Laurent, QC (CA)

(21) Appl. No.: 12/449,396

(22) PCT Filed: Feb. 6, 2008
(86) PCT No.: PCT/US08/01528

§ 371 Date: Nov. 12, 2009

Related U.S. Application Data
(60) Provisional application No. 60/899,619, filed on Feb. 6, 2007.

(51) Int. Cl. C40B 30/04; C12Q 1/68

(52) U.S. Cl. 506/9; 435/6

(57) ABSTRACT

The present invention relates to the selection of a set of polymorphism markers for use in genome wide association studies based on linkage disequilibrium mapping. In particular, the invention relates to the fields of pharmacogenomics, diagnostics, patient therapy and the use of genetic haplotype information to predict an individual's susceptibility to ADHD disease and/or their response to a particular drug or drugs.

### PRIORITY

[0001] This application is entitled to priority to U.S. Provisional Application No. 60/899,619, filed Feb. 6, 2007, which is hereby incorporated by reference in its entirety.

### FIELD OF THE INVENTION

[0002] The invention relates to the field of genomics and genetics, including genome analysis and the study of DNA variations. In particular, the invention relates to the fields of pharmacogenomics, diagnostics, patient therapy and the use of genetic haplotype information to predict an individual's susceptibility to ADHD disease and/or their response to a particular drug or drugs, so that drugs tailored to genetic differences of population groups may be developed and/or administered to the appropriate population.

[0003] The invention also relates to a GeneMap for ADHD disease, which links variations in DNA (including both genic and non-genic regions) to an individual's susceptibility to ADHD disease and/or response to a particular drug or drugs. The invention further relates to the genes disclosed in the GeneMap (see Tables 2-4), which is related to methods and reagents for detection of an individual's increased or decreased risk for ADHD disease and related sub-phenotypes, by identifying at least one polymorphism in one or a combination of the genes from the GeneMap. Also related are the candidate regions identified in Table 1, which are associated with ADHD disease. In addition, the invention further relates to nucleotide sequences of those genes including genomic DNA sequences, DNA sequences, single nucleotide polymorphisms (SNPs), other types of polymorphisms (insertions, deletions, microsatellites), alleles and haplotypes (see Sequence Listing and Tables 5-37).

[0004] The invention further relates to isolated nucleic acids comprising these nucleotide sequences and isolated polypeptides or peptides encoded thereby. Also related are expression vectors and host cells comprising the disclosed nucleic acids or fragments thereof, as well as antibodies that bind to the encoded polypeptides or peptides.

[0005] The present invention further relates to ligands that modulate the activity of the disclosed genes or gene products. In addition, the invention relates to diagnostics and therapeutics for ADHD disease, utilizing the disclosed nucleic acids, polymorphisms, chromosomal regions, gene maps, polypeptides or peptides, antibodies and/or ligands and small molecules that activate or repress relevant signaling events.

### BACKGROUND OF THE INVENTION

[0006] Attention-deficit/hyperactivity disorder (ADHD) is the most common heritable and familial neuropsychiatric disorder that affects 3-5% worldwide and 2-12% in Canada of school-aged children, with a higher incidence in boys with a ratio between 3:1 to 9:1. Its name reflects the range of possible clinical presentations, which include hyperactivity, forgetfulness, mood shifts, poor impulse control, and distractibility. ADHD is divided into three subtypes; the predominantly inattentive subtype, the predominantly hyperactive-impulsive subtype and the combined subtype. Eight percent of diagnosed children display a mix of all three symptoms. However, the inattentive subtype is the most prevalent. Subjects with ADHD have higher frequency of school failures due to learning disorders, unsociability, greater risk of substance abuse and oppositional defiant behavior. It is believed that between 30 to 70% of children diagnosed with ADHD retain the disorder as adults.

[0007] In neurological pathology, ADHD is currently believed to be a chronic syndrome for which no medical cure is available. Moreover, it is also considered a genetically complex disorder since it does not follow classical Mendelian segregation. Although the precise neural and pathophysiological mechanisms remain unknown, neuro-imaging, animal models and pharmacological studies suggest the involvement of the dopaminergic neurotransmitter pathways. The genes encoding the dopamine receptors and transporters such as the dopamine transporter gene (DAT1), the dopamine receptor 4 and 5 gene (DRD4, DRD5), have been the most attractive candidate genes for ADHD, as determined by the candidate gene approach. Recent studies have also implicated brain catecholamine systems in ADHD pathophysiological and pharmacological interventions, especially their relevance in the prefrontal cortex (PFC), the brain area that guides executive functions mainly behavior, thought, and working memory. Lesions to the PFC or inadequate catecholamine transmission produce symptoms similar to ADHD. Methylphenidate, amphetamine and atomoxetine, drugs used for treating ADHD, attenuate catecholamine transporter function, thereby enhancing dopamine and norepinephrine transmission in PFC. These drugs are considered powerful stimulants with a potential for diversion and abuse, therefore, there is controversy surrounding prescribing these drugs for children and adolescents.

[0008] To date, three independent genome scans of ADHD have been performed, which examined allele sharing in affected sibling pairs with an average marker spacing of 10 cm, while a fourth genome scan was recently published which examined allele sharing in extended multigenerational pedigrees. Two of the studies showed the linkage of three chromosomal regions (i.e., 5q13, 11q22-25 and 17p11), which contain several candidate genes including DRD4 and DAT1.

[0009] Current treatments for ADHD disease are primarily aimed at reducing symptoms and do not address the root cause of the disease. Despite a preponderance of evidence showing inheritance of a risk for ADHD disease through epidemiological studies and genome wide linkage analyses, the genes affecting ADHD disease have yet to be discovered (Hugot J P, and Thomas G., 1998). There is a need in the art for identifying specific genes related to ADHD disease to enable the development of therapeutics that address the causes of the disease rather than relieving its symptoms. The failure in past studies to identify causative genes in complex diseases, such as ADHD disease, has been due to the lack of appropriate methods to detect a sufficient number of variations in genomic DNA samples (markers), the insufficient quantity of necessary markers available, and the number of needed individuals to enable such a study. The present invention addresses these issues.

[0010] The present invention relates specifically to a set of ADHD disease-causing genes (GeneMap) and targets which present attractive points of therapeutic intervention.

[0011] In view of the foregoing, identifying susceptibility genes associated with ADHD disease and their respective biochemical pathways will facilitate the identification of diagnostic markers as well as novel targets for improved therapeutics. It will also improve the quality of life for those afflicted by this disease and will reduce the economic costs of these afflictions at the individual and societal level. The identification of those genetic markers would provide the basis for novel genetic tests and eliminate or reduce the therapeutic methods currently used. The identification of those genetic markers will also provide the development of effective therapeutic intervention for the battery of laboratory, psychological and clinical evaluations typically required to diagnose ADHD disease. The present invention satisfies this need.

LENGTHY TABLES
The patent application contains a lengthy table section. A copy of the table is available in electronic form from the USPTO web site (http://seqdata.uspto.gov/?pageRequest=docDetail&DocID=US20100120628A1). An electronic copy of the table will also be available from the USPTO upon request and payment of the fee set forth in 37 CFR 1.19(b)(3).

### DESCRIPTION OF THE FILES CONTAINED ON THE CD-R

[0012] The contents of the submission on compact discs submitted herewith are incorporated herein by reference in their entirety: A compact disc copy of the Sequence Listing (COPY 1) (filename: GENI 023 01WO SeqList.txt, date recorded: Feb. 6, 2008, file size: 41,523 kilobytes); a duplicate compact disc copy of the Sequence Listing (COPY 2) (filename: GENI 023 01WO SeqList.txt, date recorded: Feb. 6, 2008, file size: 41,523 kilobytes); a duplicate compact disc copy of the Sequence Listing (COPY 3) (filename: GENI 023 01WO SeqList.txt, date recorded: Feb. 6, 2008, file size: 41,523 kilobytes); a computer readable format copy of the Sequence Listing (CRF COPY) (filename: GENI 023 01WO SeqList.txt, date recorded: Feb. 6, 2008; file size: 41,523 kilobytes).

[0013] Three compact disc copies (COPY 1, COPY 2 and COPY3) of Tables 1-38 are herewith submitted and are incorporated herein by reference in their entirety. Each compact disc contains a copy of the following files:

[0014] filename: Table1.txt, date recorded: Feb. 6, 2008, file size: 27 kilobytes;

[0015] filename: Table2.txt, date recorded: Feb. 6, 2008, file size: 118 kilobytes;

[0016] filename: Table3.txt, date recorded: Feb. 6, 2008, file size: 278 kilobytes;

[0017] filename: Table4.txt, date recorded: Feb. 6, 2008, file size: 2 kilobytes;

[0018] filename: Table5.1.txt, date recorded: Feb. 6, 2008, file size: 318 kilobytes;

[0019] filename: Table5.2.txt, date recorded: Feb. 6, 2008, file size: 673 kilobytes;

[0020] filename: Table6.1.txt, date recorded: Feb. 6, 2008, file size: 11 kilobytes;

[0021] filename: Table6.2.txt, date recorded: Feb. 6, 2008, file size: 30 kilobytes;

[0022] filename: Table7.1.txt, date recorded: Feb. 6, 2008, file size: 15 kilobytes;

[0023] filename: Table7.2.txt, date recorded: Feb. 6, 2008, file size: 11 kilobytes;

[0024] filename: Table8.1.txt, date recorded: Feb. 6, 2008, file size: 7 kilobytes;

[0025] filename: Table8.2.txt, date recorded: Feb. 6, 2008, file size: 5 kilobytes;

[0026] filename: Table9.1, date recorded: Feb. 6, 2008, file size: 4 kilobytes;

[0027] filename: Table9.2, date recorded: Feb. 6, 2008, file size: 19 kilobytes;

[0028] filename: Table10.1, date recorded: Feb. 6, 2008, file size: 7 kilobytes;

[0029] filename: Table10.2, date recorded: Feb. 6, 2008, file size: 5 kilobytes;

[0030] filename: Table11.1, date recorded: Feb. 6, 2008, file size: 4 kilobytes;

[0031] filename: Table11.2, date recorded: Feb. 6, 2008, file size: 7 kilobytes;

[0032] filename: Table12.1, date recorded: Feb. 6, 2008, file size: 17 kilobytes;

[0033] filename: Table12.2, date recorded: Feb. 6, 2008, file size: 43 kilobytes;

[0034] filename: Table13.1, date recorded: Feb. 6, 2008, file size: 9 kilobytes;

[0035] filename: Table13.2, date recorded: Feb. 6, 2008, file size: 22 kilobytes;

[0036] filename: Table14.1, date recorded: Feb. 6, 2008, file size: 12 kilobytes;

[0037] filename: Table14.2, date recorded: Feb. 6, 2008, file size: 4 kilobytes;

[0038] filename: Table15.1, date recorded: Feb. 6, 2008, file size: 45 kilobytes;

[0039] filename: Table15.2, date recorded: Feb. 6, 2008, file size: 80 kilobytes;

[0040] filename: Table16.1, date recorded: Feb. 6, 2008, file size: 35 kilobytes;

[0041] filename: Table16.2, date recorded: Feb. 6, 2008, file size: 75 kilobytes;

[0042] filename: Table17.1, date recorded: Feb. 6, 2008, file size: 6 kilobytes;

[0043] filename: Table17.2, date recorded: Feb. 6, 2008, file size: 32 kilobytes;

[0044] filename: Table18.1, date recorded: Feb. 6, 2008, file size: 28 kilobytes;

[0045] filename: Table18.2, date recorded: Feb. 6, 2008, file size: 76 kilobytes;

[0046] filename: Table19.1, date recorded: Feb. 6, 2008, file size: 9 kilobytes;

[0047] filename: Table19.2, date recorded: Feb. 6, 2008, file size: 22 kilobytes;

[0048] filename: Table20.1, date recorded: Feb. 6, 2008, file size: 46 kilobytes;

[0049] filename: Table20.2, date recorded: Feb. 6, 2008, file size: 40 kilobytes;

[0050] filename: Table20.3, date recorded: Feb. 6, 2008, file size: 104 kilobytes;

[0051] filename: Table21.1, date recorded: Feb. 6, 2008, file size: 59 kilobytes;

[0052] filename: Table21.2, date recorded: Feb. 6, 2008, file size: 45 kilobytes;

[0053] filename: Table21.3, date recorded: Feb. 6, 2008, file size: 218 kilobytes;

[0054] filename: Table22.1, date recorded: Feb. 6, 2008, file size: 103 kilobytes;

[0055] filename: Table22.2, date recorded: Feb. 6, 2008, file size: 95 kilobytes;

[0056] filename: Table22.3, date recorded: Feb. 6, 2008, file size: 334 kilobytes;

[0057] filename: Table23.1, date recorded: Feb. 6, 2008, file size: 52 kilobytes;

[0058] filename: Table23.2, date recorded: Feb. 6, 2008, file size: 40 kilobytes;

[0059] filename: Table23.3, date recorded: Feb. 6, 2008, file size: 140 kilobytes;

[0060] filename: Table24.1, date recorded: Feb. 6, 2008, file size: 20 kilobytes;

[0061] filename: Table24.2, date recorded: Feb. 6, 2008, file size: 18 kilobytes;

[0062] filename: Table24.3, date recorded: Feb. 6, 2008, file size: 46 kilobytes;

[0063] filename: Table25.1, date recorded: Feb. 6, 2008, file size: 23 kilobytes;

[0064] filename: Table25.2, date recorded: Feb. 6, 2008, file size: 20 kilobytes;

[0065] filename: Table25.3, date recorded: Feb. 6, 2008, file size: 49 kilobytes;

[0066] filename: Table26.1, date recorded: Feb. 6, 2008, file size: 10 kilobytes;

[0067] filename: Table26.2, date recorded: Feb. 6, 2008, file size: 8 kilobytes;

[0068] filename: Table26.3, date recorded: Feb. 6, 2008, file size: 19 kilobytes;

[0069] filename: Table27.1, date recorded: Feb. 6, 2008, file size: 153 kilobytes;

[0070] filename: Table27.2, date recorded: Feb. 6, 2008, file size: 122 kilobytes;

[0071] filename: Table27.3, date recorded: Feb. 6, 2008, file size: 304 kilobytes;

[0072] filename: Table28.1, date recorded: Feb. 6, 2008, file size: 65 kilobytes;

[0073] filename: Table28.2, date recorded: Feb. 6, 2008, file size: 50 kilobytes;

[0074] filename: Table28.3, date recorded: Feb. 6, 2008, file size: 474 kilobytes;

[0075] filename: Table29.1, date recorded: Feb. 6, 2008, file size: 2 kilobytes;

[0076] filename: Table29.2, date recorded: Feb. 6, 2008, file size: 2 kilobytes;

[0077] filename: Table30.1, date recorded: Feb. 6, 2008, file size: 13 kilobytes;

[0078] filename: Table30.2, date recorded: Feb. 6, 2008, file size: 12 kilobytes;

[0079] filename: Table30.3, date recorded: Feb. 6, 2008, file size: 37 kilobytes;

[0080] filename: Table31.1, date recorded: Feb. 6, 2008, file size: 26 kilobytes;

[0081] filename: Table31.2, date recorded: Feb. 6, 2008, file size: 70 kilobytes;

[0082] filename: Table32.1, date recorded: Feb. 6, 2008, file size: 55 kilobytes;

[0083] filename: Table32.2, date recorded: Feb. 6, 2008, file size: 39 kilobytes;

[0084] filename: Table32.3, date recorded: Feb. 6, 2008, file size: 118 kilobytes;

[0085] filename: Table33.1, date recorded: Feb. 6, 2008, file size: 143 kilobytes;

[0086] filename: Table33.2, date recorded: Feb. 6, 2008, file size: 119 kilobytes;

[0087] filename: Table33.3, date recorded: Feb. 6, 2008, file size: 195 kilobytes;

[0088] filename: Table34.1, date recorded: Feb. 6, 2008, file size: 96 kilobytes;

[0089] filename: Table34.2, date recorded: Feb. 6, 2008, file size: 68 kilobytes;

[0090] filename: Table34.3, date recorded: Feb. 6, 2008, file size: 131 kilobytes;

[0091] filename: Table35.1, date recorded: Feb. 6, 2008, file size: 29 kilobytes;

[0092] filename: Table35.2, date recorded: Feb. 6, 2008, file size: 12 kilobytes;

[0093] filename: Table36.1, date recorded: Feb. 6, 2008, file size: 69 kilobytes;

[0094] filename: Table36.2, date recorded: Feb. 6, 2008, file size: 52 kilobytes;

[0095] filename: Table36.3, date recorded: Feb. 6, 2008, file size: 160 kilobytes;

[0096] filename: Table37.1, date recorded: Feb. 6, 2008, file size: 6 kilobytes;

[0097] filename: Table37.2, date recorded: Feb. 6, 2008, file size: 4 kilobytes; and filename: Table38, date recorded: Feb. 6, 2008, file size: 16 kilobytes.

### Table Description

[0098] Table 1. List of ADHD candidate regions identified from the Genome Wide Scan association analyses. The first column denotes the region identifier. The second and third columns correspond to the chromosome and cytogenetic band, respectively. The fourth and fifth columns correspond to the chromosomal start and end coordinates of the NCBI genome assembly derived from build 36.

[0099] Table 2. List of candidate genes from the regions identified from the genome wide association analysis. The first column corresponds to the region identifier provided in Table 1. The second and third columns correspond to the chromosome and cytogenetic band, respectively. The fourth and fifth columns corresponds to the chromosomal start coordinates of the NCBI genome assembly derived from build 36 (B36) and the end coordinates (the start and end position relate to the +orientation of the NCBI assembly and don't necessarily correspond to the orientation of the gene). The sixth and seventh columns correspond to the official gene symbol and gene name, respectively, and were obtained from the NCBI Entrez Gene database. The eighth column corresponds to the NCBI Entrez Gene Identifier (GeneID). The ninth and tenth columns correspond to the Sequence IDs from nucleotide (cDNA) and protein entries in the Sequence Listing.

[0100] Table 3. List of candidate genes based on EST clustering from the regions identified from the various genome wide analyses. The first column corresponds to the region identifier provided in Table 1. The second column corresponds to the chromosome number. The third and fourth columns correspond to the chromosomal start and end coordinates of the NCBI genome assemblies derived from build 36 (B36). The fifth column corresponds to the ECGene Identifier, corresponding to the ECGene track of UCSC. These ECGene entries were determined by their overlap with the regions from Table 1, based on the start and end coordinates of both Region and ECGene identifiers. The sixth and seventh columns correspond to the Sequence IDs from nucleotide and protein entries in the Sequence Listing.

[0101] Table 4. List of micro RNA (miRNA) from the regions identified from the genome wide association analyses derived from build 36 (B36). To identify the miRNA from B36, these miRNA entries were determined by their overlap with the regions from Table 1, based on the start and end coordinates of both Region and miRNA identifiers. The first column corresponds to the region identifier provided in Table 1. The second column corresponds to the chromosome number. The third and fourth columns correspond to the chromosomal start and end coordinates of the NCBI genome assembly derived from build 36 (the start and end position relate to the +orientation of the NCBI assembly and do not necessarily correspond to the orientation of the miRNA). The fifth and sixth columns correspond to the miRNA accession and miRNA id, respectively, and were obtained from the miRBase database. The seventh column corresponds to the NCBI Entrez Gene Identifier (GeneID). The eighth column corresponds to the Sequence ID from nucleotide (RNA) in the Sequence Listing.

[0102] Table 5.1. Genome wide association study results in the Quebec Founder Population (QFP). SNP markers found to be associated with ADHD from the analysis of genome wide scan (GWS) data: full cohort. Columns include: Region ID; Chromosome; Build 36 location in base pairs (bp); rs#, dbSNP data base (NCBI) reference number; Sequence ID, unique numerical identifier for this patent application; Sequence, 21 by of sequence covering 10 base pair of unique sequence flanking either side of central polymorphic SNP; −log 10 P values for GWS, −log 10 of the P value for statistical significance from the GWS for single SNP markers (both T test and Permutation test p-values are displayed; see Example section) and for the most highly associated multi-marker haplotypes centered at the reference marker and defined by the sliding windows of specified sizes.

[0103] Table 5.2. List of significantly associated haplotypes based on the ADHD GWS results using the Quebec Founder Population (QFP). Individual haplotypes with associated relative risks are presented in each row of the table; these values were extracted from the associated marker haplotype window with the most significant p value for each SNP in Table 5.1. The first column lists the region ID as presented in Table 1. The Haplotype column lists the specific nucleotides for the individual SNP alleles contributing to the haplotype reported. The Case and Control columns correspond to the numbers of cases and controls, respectively, containing the haplotype variant noted in the Haplotype column. The Total Case and Total Control columns list the total numbers of cases and controls for which genotype data was available for the haplotype in question. The RR column gives to the relative risk for each particular haplotype. The remainder of the columns lists the SeqIDs for the SNPs contributing to the haplotype and their relative location with respect to the central marker. The Central marker (0) column lists the SeqID for the central marker on which the haplotype is based. Flanking markers are identified by minus (−) or plus (+) signs to indicate the relative location of flanking SNPs.

[0104] Table 6.1. Genome wide association study results in the Quebec Founder Population (QFP). SNP markers found to be associated with ADHD from the analysis of genome wide scan (GWS) data: HasGRID1-1_cr. Columns include: Region ID; Chromosome; Build 36 location in base pairs (bp); rs#, dbSNP data base (NCBI) reference number; Sequence ID, unique numerical identifier for this patent application; Sequence, 21 by of sequence covering 10 base pair of unique sequence flanking either side of central polymorphic SNP; −log 10 P values for GWS, −log 10 of the P value for statistical significance from the GWS for single SNP markers (both T test and Permutation test p-values are displayed; see Example section) and for the most highly associated multi-marker haplotypes centered at the reference marker and defined by the sliding windows of specified sizes.

[0105] Table 6.2. List of significantly associated haplotypes based on the ADHD GWS results using the Quebec Founder Population (QFP). Individual haplotypes with associated relative risks are presented in each row of the table; these values were extracted from the associated marker haplotype window with the most significant p value for each SNP in Table 6.1. The first column lists the region ID as presented in Table 1. The Haplotype column lists the specific nucleotides for the individual SNP alleles contributing to the haplotype reported. The Case and Control columns correspond to the numbers of cases and controls, respectively, containing the haplotype variant noted in the Haplotype column. The Total Case and Total Control columns list the total numbers of cases and controls for which genotype data was available for the haplotype in question. The RR column gives to the relative risk for each particular haplotype. The remainder of the columns lists the SeqIDs for the SNPs contributing to the haplotype and their relative location with respect to the central marker. The Central marker (0) column lists the SeqID for the central marker on which the haplotype is based. Flanking markers are identified by minus (−) or plus (+) signs to indicate the relative location of flanking SNPs.

[0106] Table 7.1. Genome wide association study results in the Quebec Founder Population (QFP). SNP markers found to be associated with ADHD from the analysis of genome wide scan (GWS) data: HasTAF4-1_cr. Columns include: Region ID; Chromosome; Build 36 location in base pairs (bp); rs#, dbSNP data base (NCBI) reference number; Sequence ID, unique numerical identifier for this patent application; Sequence, 21 by of sequence covering 10 base pair of unique sequence flanking either side of central polymorphic SNP; −log 10 P values for GWS, −log 10 of the P value for statistical significance from the GWS for single SNP markers (both T test and Permutation test p-values are displayed; see Example section) and for the most highly associated multi-marker haplotypes centered at the reference marker and defined by the sliding windows of specified sizes.

[0107] Table 7.2. List of significantly associated haplotypes based on the ADHD GWS results using the Quebec Founder Population (QFP). Individual haplotypes with associated relative risks are presented in each row of the table; these values were extracted from the associated marker haplotype window with the most significant p value for each SNP in Table 7.1. The first column lists the region ID as presented in Table 1. The Haplotype column lists the specific nucleotides for the individual SNP alleles contributing to the haplotype reported. The Case and Control columns correspond to the numbers of cases and controls, respectively, containing the haplotype variant noted in the Haplotype column. The Total Case and Total Control columns list the total numbers of cases and controls for which genotype data was available for the haplotype in question. The RR column gives to the relative risk for each particular haplotype. The remainder of the columns lists the SeqIDs for the SNPs contributing to the haplotype and their relative location with respect to the central marker. The Central marker (0) column lists the SeqID for the central marker on which the haplotype is based. Flanking markers are identified by minus (−) or plus (+) signs to indicate the relative location of flanking SNPs.

[0108] Table 8.1. Genome wide association study results in the Quebec Founder Population (QFP). SNP markers found to be associated with ADHD from the analysis of genome wide scan (GWS) data: HasSLC6A14-1_cp2. Columns include: Region ID; Chromosome; Build 36 location in base pairs (bp); rs#, dbSNP data base (NCBI) reference number; Sequence ID, unique numerical identifier for this patent application; Sequence, 21 by of sequence covering 10 base pair of unique sequence flanking either side of central polymorphic SNP; −log 10 P values for GWS, −log 10 of the P value for statistical significance from the GWS for single SNP markers (both T test and Permutation test p-values are displayed; see Example section) and for the most highly associated multi-marker haplotypes centered at the reference marker and defined by the sliding windows of specified sizes.

[0109] Table 8.2. List of significantly associated haplotypes based on the ADHD GWS results using the Quebec Founder Population (QFP). Individual haplotypes with associated relative risks are presented in each row of the table; these values were extracted from the associated marker haplotype window with the most significant p value for each SNP in Table 8.1. The first column lists the region ID as presented in Table 1. The Haplotype column lists the specific nucleotides for the individual SNP alleles contributing to the haplotype reported. The Case and Control columns correspond to the numbers of cases and controls, respectively, containing the haplotype variant noted in the Haplotype column. The Total Case and Total Control columns list the total numbers of cases and controls for which genotype data was available for the haplotype in question. The RR column gives to the relative risk for each particular haplotype. The remainder of the columns lists the SeqIDs for the SNPs contributing to the haplotype and their relative location with respect to the central marker. The Central marker (0) column lists the SeqID for the central marker on which the haplotype is based. Flanking markers are identified by minus (−) or plus (+) signs to indicate the relative location of flanking SNPs.

[0110] Table 9.1. Genome wide association study results in the Quebec Founder Population (QFP). SNP markers found to be associated with ADHD from the analysis of genome wide scan (GWS) data: HasSLC6A14-1a_cr. Columns include: Region ID; Chromosome; Build 36 location in base pairs (bp); rs#, dbSNP data base (NCBI) reference number; Sequence ID, unique numerical identifier for this patent application; Sequence, 21 by of sequence covering 10 base pair of unique sequence flanking either side of central polymorphic SNP; −log 10 P values for GWS, −log 10 of the P value for statistical significance from the GWS for single SNP markers (both T test and Permutation test p-values are displayed; see Example section) and for the most highly associated multi-marker haplotypes centered at the reference marker and defined by the sliding windows of specified sizes.

[0111] Table 9.2. List of significantly associated haplotypes based on the ADHD GWS results using the Quebec Founder Population (QFP). Individual haplotypes with associated relative risks are presented in each row of the table; these values were extracted from the associated marker haplotype window with the most significant p value for each SNP in Table 9.1. The first column lists the region ID as presented in Table 1. The Haplotype column lists the specific nucleotides for the individual SNP alleles contributing to the haplotype reported. The Case and Control columns correspond to the numbers of cases and controls, respectively, containing the haplotype variant noted in the Haplotype column. The Total Case and Total Control columns list the total numbers of cases and controls for which genotype data was available for the haplotype in question. The RR column gives to the relative risk for each particular haplotype. The remainder of the columns lists the SeqIDs for the SNPs contributing to the haplotype and their relative location with respect to the central marker. The Central marker (0) column lists the SeqID for the central marker on which the haplotype is based. Flanking markers are identified by minus (−) or plus (+) signs to indicate the relative location of flanking SNPs.

[0112] Table 10.1. Genome wide association study results in the Quebec Founder Population (QFP). SNP markers found to be associated with ADHD from the analysis of genome wide scan (GWS) data: NotLOC643182-1_cp. Columns include: Region ID; Chromosome; Build 36 location in base pairs (bp); rs#, dbSNP data base (NCBI) reference number; Sequence ID, unique numerical identifier for this patent application; Sequence, 21 by of sequence covering 10 base pair of unique sequence flanking either side of central polymorphic SNP; −log 10 P values for GWS, −log 10 of the P value for statistical significance from the GWS for single SNP markers (both T test and Permutation test p-values are displayed; see Example section) and for the most highly associated multi-marker haplotypes centered at the reference marker and defined by the sliding windows of specified sizes.

[0113] Table 10.2. List of significantly associated haplotypes based on the ADHD GWS results using the Quebec Founder Population (QFP). Individual haplotypes with associated relative risks are presented in each row of the table; these values were extracted from the associated marker haplotype window with the most significant p value for each SNP in Table 10.1. The first column lists the region ID as presented in Table 1. The Haplotype column lists the specific nucleotides for the individual SNP alleles contributing to the haplotype reported. The Case and Control columns correspond to the numbers of cases and controls, respectively, containing the haplotype variant noted in the Haplotype column. The Total Case and Total Control columns list the total numbers of cases and controls for which genotype data was available for the haplotype in question. The RR column gives to the relative risk for each particular haplotype. The remainder of the columns lists the SeqIDs for the SNPs contributing to the haplotype and their relative location with respect to the central marker. The Central marker (0) column lists the SeqID for the central marker on which the haplotype is based. Flanking markers are identified by minus (−) or plus (+) signs to indicate the relative location of flanking SNPs.

[0114] Table 11.1. Genome wide association study results in the Quebec Founder Population (QFP). SNP markers found to be associated with ADHD from the analysis of genome wide scan (GWS) data: NotKCNAB1-1-cp. Columns include: Region ID; Chromosome; Build 36 location in base pairs (bp); rs#, dbSNP data base (NCBI) reference number; Sequence ID, unique numerical identifier for this patent application; Sequence, 21 by of sequence covering 10 base pair of unique sequence flanking either side of central polymorphic SNP; −log 10 P values for GWS, −log 10 of the P value for statistical significance from the GWS for single SNP markers (both T test and Permutation test p-values are displayed; see Example section) and for the most highly associated multi-marker haplotypes centered at the reference marker and defined by the sliding windows of specified sizes.

[0115] Table 11.2. List of significantly associated haplotypes based on the ADHD GWS results using the Quebec Founder Population (QFP). Individual haplotypes with associated relative risks are presented in each row of the table; these values were extracted from the associated marker haplotype window with the most significant p value for each SNP in Table 11.1. The first column lists the region ID as presented in Table 1. The Haplotype column lists the specific nucleotides for the individual SNP alleles contributing to the haplotype reported. The Case and Control columns correspond to the numbers of cases and controls, respectively, containing the haplotype variant noted in the Haplotype column. The Total Case and Total Control columns list the total numbers of cases and controls for which genotype data was available for the haplotype in question. The RR column gives to the relative risk for each particular haplotype. The remainder of the columns lists the SeqIDs for the SNPs contributing to the haplotype and their relative location with respect to the central marker. The Central marker (0) column lists the SeqID for the central marker on which the haplotype is based. Flanking markers are identified by minus (−) or plus (+) signs to indicate the relative location of flanking SNPs.

[0116] Table 12.1. Genome wide association study results in the Quebec Founder Population (QFP). SNP markers found to be associated with ADHD from the analysis of genome wide scan (GWS) data: NotLOC643182-1_cp. Columns include: Region ID; Chromosome; Build 36 location in base pairs (bp); rs#, dbSNP data base (NCBI) reference number; Sequence. ID, unique numerical identifier for this patent application; Sequence, 21 by of sequence covering 10 base pair of unique sequence flanking either side of central polymorphic SNP; −log 10 P values for GWS, −log 10 of the P value for statistical significance from the GWS for single SNP markers (both T test and Permutation test p-values are displayed; see Example section) and for the most highly associated multi-marker haplotypes centered at the reference marker and defined by the sliding windows of specified sizes.

[0117] Table 12.2. List of significantly associated haplotypes based on the ADHD GWS results using the Quebec Founder Population (QFP). Individual haplotypes with associated relative risks are presented in each row of the table; these values were extracted from the associated marker haplotype window with the most significant p value for each SNP in Table 12.1. The first column lists the region ID as presented in Table 1. The Haplotype column lists the specific nucleotides for the individual SNP alleles contributing to the haplotype reported. The Case and Control columns correspond to the numbers of cases and controls, respectively, containing the haplotype variant noted in the Haplotype column. The Total Case and Total Control columns list the total numbers of cases and controls for which genotype data was available for the haplotype in question. The RR column gives to the relative risk for each particular haplotype. The remainder of the columns lists the SeqIDs for the SNPs contributing to the haplotype and their relative location with respect to the central marker. The Central marker (0) column lists the SeqID for the central marker on which the haplotype is based. Flanking markers are identified by minus (−) or plus (+) signs to indicate the relative location of flanking SNPs.

[0118] Table 13.1. Genome wide association study results in the Quebec Founder Population (QFP). SNP markers found to be associated with ADHD from the analysis of genome wide scan (GWS) data: NotTAF4-1_cp. Columns include: Region ID; Chromosome; Build 36 location in base pairs (bp); rs#, dbSNP data base (NCBI) reference number; Sequence ID, unique numerical identifier for this patent application; Sequence, 21 by of sequence covering 10 base pair of unique sequence flanking either side of central polymorphic SNP; −log 10 P values for GWS, −log 10 of the P value for statistical significance from the GWS for single SNP markers (both T test and Permutation test p-values are displayed; see Example section) and for the most highly associated multi-marker haplotypes centered at the reference marker and defined by the sliding windows of specified sizes.

[0119] Table 13.2. List of significantly associated haplotypes based on the ADHD GWS results using the Quebec Founder Population (QFP). Individual haplotypes with associated relative risks are presented in each row of the table; these values were extracted from the associated marker haplotype window with the most significant p value for each SNP in Table 13.1. The first column lists the region ID as presented in Table 1. The Haplotype column lists the specific nucleotides for the individual SNP alleles contributing to the haplotype reported. The Case and Control columns correspond to the numbers of cases and controls, respectively, containing the haplotype variant noted in the Haplotype column. The Total Case and Total Control columns list the total numbers of cases and controls for which genotype data was available for the haplotype in question. The RR column gives to the relative risk for each particular haplotype. The remainder of the columns lists the SeqIDs for the SNPs contributing to the haplotype and their relative location with respect to the central marker. The Central marker (0) column lists the SeqID for the central marker on which the haplotype is based. Flanking markers are identified by minus (−) or plus (+) signs to indicate the relative location of flanking SNPs.

[0120] Table 14.1. Genome wide association study results in the Quebec Founder Population (QFP). SNP markers found to be associated with ADHD from the analysis of genome wide scan (GWS) data: NotTAF4-1_cr. Columns include: Region ID; Chromosome; Build 36 location in base pairs (bp); rs#, dbSNP data base (NCBI) reference number; Sequence ID, unique numerical identifier for this patent application; Sequence, 21 by of sequence covering 10 base pair of unique sequence flanking either side of central polymorphic SNP; −log 10 P values for GWS, −log 10 of the P value for statistical significance from the GWS for single SNP markers (both T test and Permutation test p-values are displayed; see Example section) and for the most highly associated multi-marker haplotypes centered at the reference marker and defined by the sliding windows of specified sizes.

[0121] Table 14.2. List of significantly associated haplotypes based on the ADHD GWS results using the Quebec Founder Population (QFP). Individual haplotypes with associated relative risks are presented in each row of the table; these values were extracted from the associated marker haplotype window with the most significant p value for each SNP in Table 14.1. The first column lists the region ID as presented in Table 1. The Haplotype column lists the specific nucleotides for the individual SNP alleles contributing to the haplotype reported. The Case and Control columns correspond to the numbers of cases and controls, respectively, containing the haplotype variant noted in the Haplotype column. The Total Case and Total Control columns list the total numbers of cases and controls for which genotype data was available for the haplotype in question. The RR column gives to the relative risk for each particular haplotype. The remainder of the columns lists the SeqIDs for the SNPs contributing to the haplotype and their relative location with respect to the central marker. The Central marker (0) column lists the SeqID for the central marker on which the haplotype is based. Flanking markers are identified by minus (−) or plus (+) signs to indicate the relative location of flanking SNPs.

[0122] Table 15.1. Genome wide association study results in the Quebec Founder Population (QFP). SNP markers found to be associated with ADHD from the analysis of genome wide scan (GWS) data: NotSLC6A14-1_cp2. Columns include: Region ID; Chromosome; Build 36 location in base pairs (bp); rs#, dbSNP data base (NCBI) reference number; Sequence ID, unique numerical identifier for this patent application; Sequence, 21 by of sequence covering 10 base pair of unique sequence flanking either side of central polymorphic SNP; −log 10 P values for GWS, −log 10 of the P value for statistical significance from the GWS for single SNP markers (both T test and Permutation test p-values are displayed; see Example section) and for the most highly associated multi-marker haplotypes centered at the reference marker and defined by the sliding windows of specified sizes.

[0123] Table 15.2. List of significantly associated haplotypes based on the ADHD GWS results using the Quebec Founder Population (QFP). Individual haplotypes with associated relative risks are presented in each row of the table; these values were extracted from the associated marker haplotype window with the most significant p value for each SNP in Table 15.1. The first column lists the region ID as presented in Table 1. The Haplotype column lists the specific nucleotides for the individual SNP alleles contributing to the haplotype reported. The Case and Control columns correspond to the numbers of cases and controls, respectively, containing the haplotype variant noted in the Haplotype column. The Total Case and Total Control columns list the total numbers of cases and controls for which genotype data was available for the haplotype in question. The RR column gives to the relative risk for each particular haplotype. The remainder of the columns lists the SeqIDs for the SNPs contributing to the haplotype and their relative location with respect to the central marker. The Central marker (0) column lists the SeqID for the central marker on which the haplotype is based. Flanking markers are identified by minus (−) or plus (+) signs to indicate the relative location of flanking SNPs.

[0124] Table 16.1. Genome wide association study results in the Quebec Founder Population (QFP). SNP markers found to be associated with ADHD from the analysis of genome wide scan (GWS) data: AFFECTED FEMALE. Columns include: Region ID; Chromosome; Build 36 location in base pairs (bp); rs#, dbSNP data base (NCBI) reference number; Sequence ID, unique numerical identifier for this patent application; Sequence, 21 by of sequence covering 10 base pair of unique sequence flanking either side of central polymorphic SNP; −log 10 P values for GWS, −log 10 of the P value for statistical significance from the GWS for single SNP markers (both T test and Permutation test p-values are displayed; see Example section) and for the most highly associated multi-marker haplotypes centered at the reference marker and defined by the sliding windows of specified sizes.

[0125] Table 16.2. List of significantly associated haplotypes based on the ADHD GWS results using the Quebec Founder Population (QFP). Individual haplotypes with associated relative risks are presented in each row of the table; these values were extracted from the associated marker haplotype window with the most significant p value for each SNP in Table 16.1. The first column lists the region ID as presented in Table 1. The Haplotype column lists the specific nucleotides for the individual SNP alleles contributing to the haplotype reported. The Case and Control columns correspond to the numbers of cases and controls, respectively, containing the haplotype variant noted in the Haplotype column. The Total Case and Total Control columns list the total numbers of cases and controls for which genotype data was available for the haplotype in question. The RR column gives to the relative risk for each particular haplotype. The remainder of the columns lists the SeqIDs for the SNPs contributing to the haplotype and their relative location with respect to the central marker. The Central marker (0) column lists the SeqID for the central marker on which the haplotype is based. Flanking markers are identified by minus (−) or plus (+) signs to indicate the relative location of flanking SNPs.

[0126] Table 17.1. Genome wide association study results in the Quebec Founder Population (QFP). SNP markers found to be associated with ADHD from the analysis of genome wide scan (GWS) data: NotSLC6414-1_cr2. Columns include: Region ID; Chromosome; Build 36 location in base pairs (bp); rs#, dbSNP data base (NCBI) reference number; Sequence ID, unique numerical identifier for this patent application; Sequence, 21 by of sequence covering 10 base pair of unique sequence flanking either side of central polymorphic SNP; −log 10 P values for GWS, −log 10 of the P value for statistical significance from the GWS for single SNP markers (both T test and Permutation test p-values are displayed; see Example section) and for the most highly associated multi-marker haplotypes centered at the reference marker and defined by the sliding windows of specified sizes.

[0127] Table 17.2. List of significantly associated haplotypes based on the ADHD GWS results using the Quebec Founder Population (QFP). Individual haplotypes with associated relative risks are presented in each row of the table; these values were extracted from the associated marker haplotype window with the most significant p value for each SNP in Table 17.1. The first column lists the region ID as presented in Table 1. The Haplotype column lists the specific nucleotides for the individual SNP alleles contributing to the haplotype reported. The Case and Control columns correspond to the numbers of cases and controls, respectively, containing the haplotype variant noted in the Haplotype column. The Total Case and Total Control columns list the total numbers of cases and controls for which genotype data was available for the haplotype in question. The RR column gives to the relative risk for each particular haplotype. The remainder of the columns lists the SeqIDs for the SNPs contributing to the haplotype and their relative location with respect to the central marker. The Central marker (0) column lists the SeqID for the central marker on which the haplotype is based. Flanking markers are identified by minus (−) or plus (+) signs to indicate the relative location of flanking SNPs.

[0128] Table 18.1. Genome wide association study results in the Quebec Founder Population (QFP). SNP markers found to be associated with ADHD from the analysis of genome wide scan (GWS) data: NotSLC6A14-1a_cp1. Columns include: Region ID; Chromosome; Build 36 location in base pairs (bp); rs#, dbSNP data base (NCBI) reference number; Sequence ID, unique numerical identifier for this patent application; Sequence, 21 by of sequence covering 10 base pair of unique sequence flanking either side of central polymorphic SNP; −log 10 P values for GWS, −log 10 of the P value for statistical significance from the GWS for single SNP markers (both T test and Permutation test p-values are displayed; see Example section) and for the most highly associated multi-marker haplotypes centered at the reference marker and defined by the sliding windows of specified sizes.

[0129] Table 18.2. List of significantly associated haplotypes based on the ADHD GWS results using the Quebec Founder Population (QFP). Individual haplotypes with associated relative risks are presented in each row of the table; these values were extracted from the associated marker haplotype window with the most significant p value for each SNP in Table 18.1. The first column lists the region ID as presented in Table 1. The Haplotype column lists the specific nucleotides for the individual SNP alleles contributing to the haplotype reported. The Case and Control columns correspond to the numbers of cases and controls, respectively, containing the haplotype variant noted in the Haplotype column. The Total Case and Total Control columns list the total numbers of cases and controls for which genotype data was available for the haplotype in question. The RR column gives to the relative risk for each particular haplotype. The remainder of the columns lists the SeqIDs for the SNPs contributing to the haplotype and their relative location with respect to the central marker. The Central marker (0) column lists the SeqID for the central marker on which the haplotype is based. Flanking markers are identified by minus (−) or plus (+) signs to indicate the relative location of flanking SNPs.

[0130] Table 19.1. Genome wide association study results in the Quebec Founder Population (QFP). SNP markers found to be associated with ADHD from the analysis of genome wide scan (GWS) data: NotSLC6A14-1A_cr1. Columns include: Region ID; Chromosome; Build 36 location in base pairs (bp); rs#, dbSNP data base (NCBI) reference number; Sequence ID, unique numerical identifier for this patent application; Sequence, 21 by of sequence covering 10 base pair of unique sequence flanking either side of central polymorphic SNP; −log 10 P values for GWS, −log 10 of the P value for statistical significance from the GWS for single SNP markers (both T test and Permutation test p-values are displayed; see Example section) and for the most highly associated multi-marker haplotypes centered at the reference marker and defined by the sliding windows of specified sizes.

[0131] Table 19.2. List of significantly associated haplotypes based on the ADHD GWS results using the Quebec Founder Population (QFP). Individual haplotypes with associated relative risks are presented in each row of the table; these values were extracted from the associated marker haplotype window with the most significant p value for each SNP in Table 19.1. The first column lists the region ID as presented in Table 1. The Haplotype column lists the specific nucleotides for the individual SNP alleles contributing to the haplotype reported. The Case and Control columns correspond to the numbers of cases and controls, respectively, containing the haplotype variant noted in the Haplotype column. The Total Case and Total Control columns list the total numbers of cases and controls for which genotype data was available for the haplotype in question. The RR column gives to the relative risk for each particular haplotype. The remainder of the columns lists the SeqIDs for the SNPs contributing to the haplotype and their relative location with respect to the central marker. The Central marker (0) column lists the SeqID for the central marker on which the haplotype is based. Flanking markers are identified by minus (−) or plus (+) signs to indicate the relative location of flanking SNPs.

[0132] Table 20.1. ALL the Genome wide association study results in the Quebec Founder Population (QFP) (including SNPs out of CR from Table 1). SNP markers found to be associated with ADHD from the analysis of genome wide scan (GWS) data: HASODZ3-1_cp. Columns include: Region ID; Chromosome; Build 36 location in base pairs (bp); rs#, dbSNP data base (NCBI) reference number; Sequence ID, unique numerical identifier for this patent application; Sequence, 21 by of sequence covering 10 base pair of unique sequence flanking either side of central polymorphic SNP; −log 10 P values for GWS, −log 10 of the P value for statistical significance from the GWS for single SNP markers (both T test and Permutation test p-values are displayed; see Example section) and for the most highly associated multi-marker haplotypes centered at the reference marker and defined by the sliding windows of specified sizes.

[0133] Table 20.2. Genome wide association study results in the Quebec Founder Population (QFP). SNP markers found to be associated with ADHD from the analysis of genome wide scan (GWS) data: HASODZ3-1_cp. Columns include: Region ID; Chromosome; Build 36 location in base pairs (bp); rs#, dbSNP data base (NCBI) reference number; Sequence ID, unique numerical identifier for this patent application; Sequence, 21 by of sequence covering 10 base pair of unique sequence flanking either side of central polymorphic SNP; −log 10 P values for GWS, −log 10 of the P value for statistical significance from the GWS for single SNP markers (both T test and Permutation test p-values are displayed; see Example section) and for the most highly associated multi-marker haplotypes centered at the reference marker and defined by the sliding windows of specified sizes.

[0134] Table 20.3. List of significantly associated haplotypes based on the ADHD GWS results using the Quebec Founder Population (QFP). Individual haplotypes with associated relative risks are presented in each row of the table; these values were extracted from the associated marker haplotype window with the most significant p value for each SNP in Table 20.2. The first column lists the region ID as presented in Table 1. The Haplotype column lists the specific nucleotides for the individual SNP alleles contributing to the haplotype reported. The Case and Control columns correspond to the numbers of cases and controls, respectively, containing the haplotype variant noted in the Haplotype column. The Total Case and Total Control columns list the total numbers of cases and controls for which genotype data was available for the haplotype in question. The RR column gives to the relative risk for each particular haplotype. The remainder of the columns lists the SeqIDs for the SNPs contributing to the haplotype and their relative location with respect to the central marker. The Central marker (0) column lists the SeqID for the central marker on which the haplotype is based. Flanking markers are identified by minus (−) or plus (+) signs to indicate the relative location of flanking SNPs.

[0135] Table 21.1. ALL the Genome wide association study results in the Quebec Founder Population (QFP) (including SNPs out of CR from Table 1). SNP markers found to be associated with ADHD from the analysis of genome wide scan (GWS) data: HASODZ3-1_cr. Columns include: Region ID; Chromosome; Build 36 location in base pairs (bp); rs#, dbSNP data base (NCBI) reference number; Sequence ID, unique numerical identifier for this patent application; Sequence, 21 by of sequence covering 10 base pair of unique sequence flanking either side of central polymorphic SNP; −log 10 P values for GWS, −log 10 of the P value for statistical significance from the GWS for single SNP markers (both T test and Permutation test p-values are displayed; see Example section) and for the most highly associated multi-marker haplotypes centered at the reference marker and defined by the sliding windows of specified sizes.

[0136] Table 21.2. ALL the Genome wide association study results in the Quebec Founder Population (QFP) (including SNPs out of CR from Table 1). SNP markers found to be associated with ADHD from the analysis of genome wide scan (GWS) data: HAS-ODZ3-1_cr. Columns include: Region ID; Chromosome; Build 36 location in base pairs (bp); rs#, dbSNP data base (NCBI) reference number; Sequence ID, unique numerical identifier for this patent application; Sequence, 21 by of sequence covering 10 base pair of unique sequence flanking either side of central polymorphic SNP; −log 10 P values for GWS, −log 10 of the P value for statistical significance from the GWS for single SNP markers (both T test and Permutation test p-values are displayed; see Example section) and for the most highly associated multi-marker haplotypes centered at the reference marker and defined by the sliding windows of specified sizes.

[0137] Table 21.3. List of significantly associated haplotypes based on the ADHD GWS results using the Quebec Founder Population (QFP). Individual haplotypes with associated relative risks are presented in each row of the table; these values were extracted from the associated marker haplotype window with the most significant p value for each SNP in Table 21.2. The first column lists the region ID as presented in Table 1. The Haplotype column lists the specific nucleotides for the individual SNP alleles contributing to the haplotype reported. The Case and Control columns correspond to the numbers of cases and controls, respectively, containing the haplotype variant noted in the Haplotype column. The Total Case and Total Control columns list the total numbers of cases and controls for which genotype data was available for the haplotype in question. The RR column gives to the relative risk for each particular haplotype. The remainder of the columns lists the SeqIDs for the SNPs contributing to the haplotype and their relative location with respect to the central marker. The Central marker (0) column lists the SeqID for the central marker on which the haplotype is based. Flanking markers are identified by minus (−) or plus (+) signs to indicate the relative location of flanking SNPs.

[0138] Table 22.1. ALL the Genome wide association study results in the Quebec Founder Population (QFP) (including SNPs out of CR from Table 1). SNP markers found to be associated with ADHD from the analysis of genome wide scan (GWS) data: HAS-ODZ3-1_cp. Columns include: Region ID; Chromosome; Build 36 location in base pairs (bp); rs#, dbSNP data base (NCBI) reference number; Sequence ID, unique numerical identifier for this patent application; Sequence, 21 by of sequence covering 10 base pair of unique sequence flanking either side of central polymorphic SNP; −log 10 P values for GWS, −log 10 of the P value for statistical significance from the GWS for single SNP markers (both T test and Permutation test p-values are displayed; see Example section) and for the most highly associated multi-marker haplotypes centered at the reference marker and defined by the sliding windows of specified sizes.

[0139] Table 22.2. Genome wide association study results in the Quebec Founder Population (QFP). SNP markers found to be associated with ADHD from the analysis of genome wide scan (GWS) data: HAS-ODZ3-1_cp. Columns include: Region ID; Chromosome; Build 36 location in base pairs (bp); rs#, dbSNP data base (NCBI) reference number; Sequence ID, unique numerical identifier for this patent application; Sequence, 21 by of sequence covering 10 base pair of unique sequence flanking either side of central polymorphic SNP; −log 10 P values for GWS, −log 10 of the P value for statistical significance from the GWS for single SNP markers (both T test and Permutation test p-values are displayed; see Example section) and for the most highly associated multi-marker haplotypes centered at the reference marker and defined by the sliding windows of specified sizes.

[0140] Table 22.3. List of significantly associated haplotypes based on the ADHD GWS results using the Quebec Founder Population (QFP). Individual haplotypes with associated relative risks are presented in each row of the table; these values were extracted from the associated marker haplotype window with the most significant p value for each SNP in Table 22.2. The first column lists the region ID as presented in Table 1. The Haplotype column lists the specific nucleotides for the individual SNP alleles contributing to the haplotype reported. The Case and Control columns correspond to the numbers of cases and controls, respectively, containing the haplotype variant noted in the Haplotype column. The Total Case and Total Control columns list the total numbers of cases and controls for which genotype data was available for the haplotype in question. The RR column gives to the relative risk for each particular haplotype. The remainder of the columns lists the SeqIDs for the SNPs contributing to the haplotype and their relative location with respect to the central marker. The Central marker (0) column lists the SeqID for the central marker on which the haplotype is based. Flanking markers are identified by minus (−) or plus (+) signs to indicate the relative location of flanking SNPs.

[0141] Table 23.1. ALL the Genome wide association study results in the Quebec Founder Population (QFP) (including SNPs out of CR from Table 1). SNP markers found to be associated with ADHD from the analysis of genome wide scan (GWS) data: HAS-ODZ3-2_cp. Columns include: Region ID; Chromosome; Build 36 location in base pairs (bp); rs#, dbSNP data base (NCBI) reference number; Sequence ID, unique numerical identifier for this patent application; Sequence, 21 by of sequence covering 10 base pair of unique sequence flanking either side of central polymorphic SNP; −log 10 P values for GWS, −log 10 of the P value for statistical significance from the GWS for single SNP markers (both T test and Permutation test p-values are displayed; see Example section) and for the most highly associated multi-marker haplotypes centered at the reference marker and defined by the sliding windows of specified sizes.

[0142] Table 23.2. Genome wide association study results in the Quebec Founder Population (QFP). SNP markers found to be associated with ADHD from the analysis of genome wide scan (GWS) data: HAS-ODZ3-2_cp. Columns include: Region ID; Chromosome; Build 36 location in base pairs (bp); rs#, dbSNP data base (NCBI) reference number; Sequence ID, unique numerical identifier for this patent application; Sequence, 21 by of sequence covering 10 base pair of unique sequence flanking either side of central polymorphic SNP; −log 10 P values for GWS, −log 10 of the P value for statistical significance from the GWS for single SNP markers (both T test and Permutation test p-values are displayed; see Example section) and for the most highly associated multi-marker haplotypes centered at the reference marker and defined by the sliding windows of specified sizes.

[0143] Table 23.3. List of significantly associated haplotypes based on the ADHD results using the Quebec Founder Population (QFP). Individual haplotypes with associated relative risks are presented in each row of the table; these values were extracted from the associated marker haplotype window with the most significant p value for each SNP in Table 23.2. The first column lists the region ID as presented in Table 1. The Haplotype column lists the specific nucleotides for the individual SNP alleles contributing to the haplotype reported. The Case and Control columns correspond to the numbers of cases and controls, respectively, containing the haplotype variant noted in the Haplotype column. The Total Case and Total Control columns list the total numbers of cases and controls for which genotype data was available for the haplotype in question. The RR column gives to the relative risk for each particular haplotype. The remainder of the columns lists the SeqIDs for the SNPs contributing to the haplotype and their relative location with respect to the central marker. The Central marker (0) column lists the SeqID for the central marker on which the haplotype is based. Flanking markers are identified by minus (−) or plus (+) signs to indicate the relative location of flanking SNPs.

[0144] Table 24.1. ALL the Genome wide association study results in the Quebec Founder Population (QFP) (including SNPs out of CR from Table 1). SNP markers found to be associated with ADHD from the analysis of genome wide scan (GWS) data: HAS-ODZ3-2_cr. Columns include: Region ID; Chromosome; Build 36 location in base pairs (bp); rs#, dbSNP data base (NCBI) reference number; Sequence ID, unique numerical identifier for this patent application; Sequence, 21 by of sequence covering 10 base pair of unique sequence flanking either side of central polymorphic SNP; −log 10 P values for GWS, −log 10 of the P value for statistical significance from the GWS for single SNP markers (both T test and Permutation test p-values are displayed; see Example section) and for the most highly associated multi-marker haplotypes centered at the reference marker and defined by the sliding windows of specified sizes.

[0145] Table 24.2. Genome wide association study results in the Quebec Founder Population (QFP). SNP markers found to be associated with ADHD from the analysis of genome wide scan (GWS) data: HAS-ODZ3-2_cr. Columns include: Region ID; Chromosome; Build 36 location in base pairs (bp); rs#, dbSNP data base (NCBI) reference number; Sequence ID, unique numerical identifier for this patent application; Sequence, 21 by of sequence covering 10 base pair of unique sequence flanking either side of central polymorphic SNP; −log 10 P values for GWS, −log 10 of the P value for statistical significance from the GWS for single SNP markers (both T test and Permutation test p-values are displayed; see Example section) and for the most highly associated multi-marker haplotypes centered at the reference marker and defined by the sliding windows of specified sizes.

[0146] Table 24.3. List of significantly associated haplotypes based on the ADHD GWS results using the Quebec Founder Population (QFP). Individual haplotypes with associated relative risks are presented in each row of the table; these values were extracted from the associated marker haplotype window with the most significant p value for each SNP in Table 24.2. The first column lists the region ID as presented in Table 1. The Haplotype column lists the specific nucleotides for the individual SNP alleles contributing to the haplotype reported. The Case and Control columns correspond to the numbers of cases and controls, respectively, containing the haplotype variant noted in the Haplotype column. The Total Case and Total Control columns list the total numbers of cases and controls for which genotype data was available for the haplotype in question. The RR column gives to the relative risk for each particular haplotype. The remainder of the columns lists the SeqIDs for the SNPs contributing to the haplotype and their relative location with respect to the central marker. The Central marker (0) column lists the SeqID for the central marker on which the haplotype is based. Flanking markers are identified by minus (−) or plus (+) signs to indicate the relative location of flanking SNPs.

[0147] Table 25.1. ALL the Genome wide association study results in the Quebec Founder Population (QFP) (including SNPs out of CR from Table 1). SNP markers found to be associated with ADHD from the analysis of genome wide scan (GWS) data: NOT-ODZ3-1_cr. Columns include: Region ID; Chromosome; Build 36 location in base pairs (bp); rs#, dbSNP data base (NCBI) reference number; Sequence ID, unique numerical identifier for this patent application; Sequence, 21 by of sequence covering 10 base pair of unique sequence flanking either side of central polymorphic SNP; −log 10 P values for GWS, −log 10 of the P value for statistical significance from the GWS for single SNP markers (both T test and Permutation test p-values are displayed; see Example section) and for the most highly associated multi-marker haplotypes centered at the reference marker and defined by the sliding windows of specified sizes.

[0148] Table 25.2. Genome wide association study results in the Quebec Founder Population (QFP). SNP markers found to be associated with ADHD from the analysis of genome wide scan (GWS) data: NOT-ODZ3-1_cr. Columns include: Region ID; Chromosome; Build 36 location in base pairs (bp); rs#, dbSNP data base (NCBI) reference number; Sequence ID, unique numerical identifier for this patent application; Sequence, 21 by of sequence covering 10 base pair of unique sequence flanking either side of central polymorphic SNP; −log 10 P values for GWS, −log 10 of the P value for statistical significance from the GWS for single SNP markers (both T test and Permutation test p-values are displayed; see Example section) and for the most highly associated multi-marker haplotypes centered at the reference marker and defined by the sliding windows of specified sizes.

[0149] Table 25.3. List of significantly associated haplotypes based on the ADHD results using the Quebec Founder Population (QFP). Individual haplotypes with associated relative risks are presented in each row of the table; these values were extracted from the associated marker haplotype window with the most significant p value for each SNP in Table 25.2. The first column lists the region ID as presented in Table 1. The Haplotype column lists the specific nucleotides for the individual SNP alleles contributing to the haplotype reported. The Case and Control columns correspond to the numbers of cases and controls, respectively, containing the haplotype variant noted in the Haplotype column. The Total Case and Total Control columns list the total numbers of cases and controls for which genotype data was available for the haplotype in question. The RR column gives to the relative risk for each particular haplotype. The remainder of the columns lists the SeqIDs for the SNPs contributing to the haplotype and their relative location with respect to the central marker. The Central marker (0) column lists the SeqID for the central marker on which the haplotype is based. Flanking markers are identified by minus (−) or plus (+) signs to indicate the relative location of flanking SNPs.

[0150] Table 26.1. ALL the Genome wide association study results in the Quebec Founder Population (QFP) (including SNPs out of CR from Table 1). SNP markers found to be associated with ADHD from the analysis of genome wide scan (GWS) data: NOT-ODZ3-1_cp. Columns include: Region ID; Chromosome; Build 36 location in base pairs (bp); rs#, dbSNP data base (NCBI) reference number; Sequence ID, unique numerical identifier for this patent application; Sequence, 21 by of sequence covering 10 base pair of unique sequence flanking either side of central polymorphic SNP; −log 10 P values for GWS, −log 10 of the P value for statistical significance from the GWS for single SNP markers (both T test and Permutation test p-values are displayed; see Example section) and for the most highly associated multi-marker haplotypes centered at the reference marker and defined by the sliding windows of specified sizes.

[0151] Table 26.2. Genome wide association study results in the Quebec Founder Population (QFP). SNP markers found to be associated with ADHD from the analysis of genome wide scan (GWS) data: NOT-ODZ3-1_cp. Columns include: Region ID; Chromosome; Build 36 location in base pairs (bp); rs#, dbSNP data base (NCBI) reference number; Sequence ID, unique numerical identifier for this patent application; Sequence, 21 by of sequence covering 10 base pair of unique sequence flanking either side of central polymorphic SNP; −log 10 P values for GWS, −log 10 of the P value for statistical significance from the GWS for single SNP markers (both T test and Permutation test p-values are displayed; see Example section) and for the most highly associated multi-marker haplotypes centered at the reference marker and defined by the sliding windows of specified sizes.

[0152] Table 26.3. List of significantly associated haplotypes based on the ADHD GWS results using the Quebec Founder Population (QFP). Individual haplotypes with associated relative risks are presented in each row of the table; these values were extracted from the associated marker haplotype window with the most significant p value for each SNP in Table 26.2. The first column lists the region ID as presented in Table 1. The Haplotype column lists the specific nucleotides for the individual SNP alleles contributing to the haplotype reported. The Case and Control columns correspond to the numbers of cases and controls, respectively, containing the haplotype variant noted in the Haplotype column. The Total Case and Total Control columns list the total numbers of cases and controls for which genotype data was available for the haplotype in question. The RR column gives to the relative risk for each particular haplotype. The remainder of the columns lists the SeqIDs for the SNPs contributing to the haplotype and their relative location with respect to the central marker. The Central marker (0) column lists the SeqID for the central marker on which the haplotype is based. Flanking markers are identified by minus (−) or plus (+) signs to indicate the relative location of flanking SNPs.

[0153] Table 27.1. ALL the Genome wide association study results in the Quebec Founder Population (QFP) (including SNPs out of CR from Table 1). SNP markers found to be associated with ADHD from the analysis of genome wide scan (GWS) data: Affected male. Columns include: Region ID; Chromosome; Build 36 location in base pairs (bp); rs#, dbSNP data base (NCBI) reference number; Sequence ID, unique numerical identifier for this patent application; Sequence, 21 by of sequence covering 10 base pair of unique sequence flanking either side of central polymorphic SNP; −log 10 P values for GWS, −log 10 of the P value for statistical significance from the GWS for single SNP markers (both T test and Permutation test p-values are displayed; see Example section) and for the most highly associated multi-marker haplotypes centered at the reference marker and defined by the sliding windows of specified sizes.

[0154] Table 27.2. Genome wide association study results in the Quebec Founder Population (QFP). SNP markers found to be associated with ADHD from the analysis of genome wide scan (GWS) data: Affected male. Columns include: Region ID; Chromosome; Build 36 location in base pairs (bp); rs#, dbSNP data base (NCBI) reference number; Sequence ID, unique numerical identifier for this patent application; Sequence, 21 by of sequence covering 10 base pair of unique sequence flanking either side of central polymorphic SNP; −log 10 P values for GWS, −log 10 of the P value for statistical significance from the GWS for single SNP markers (both T test and Permutation test p-values are displayed; see Example section) and for the most highly associated multi-marker haplotypes centered at the reference marker and defined by the sliding windows of specified sizes.

[0155] Table 27.3. List of significantly associated haplotypes based on the ADHD GWS results using the Quebec Founder Population (QFP). Individual haplotypes with associated relative risks are presented in each row of the table; these values were extracted from the associated marker haplotype window with the most significant p value for each SNP in Table 27.2. The first column lists the region ID as presented in Table 1. The Haplotype column lists the specific nucleotides for the individual SNP alleles contributing to the haplotype reported. The Case and Control columns correspond to the numbers of cases and controls, respectively, containing the haplotype variant noted in the Haplotype column. The Total Case and Total Control columns list the total numbers of cases and controls for which genotype data was available for the haplotype in question. The RR column gives to the relative risk for each particular haplotype. The remainder of the columns lists the SeqIDs for the SNPs contributing to the haplotype and their relative location with respect to the central marker. The Central marker (0) column lists the SeqID for the central marker on which the haplotype is based. Flanking markers are identified by minus (−) or plus (+) signs to indicate the relative location of flanking SNPs.

[0156] Table 28.1. ALL the Genome wide association study results in the Quebec Founder Population (QFP) (including SNPs out of CR from Table 1). SNP markers found to be associated with ADHD from the analysis of genome wide scan (GWS) data: Not-ODZ3-1-cr. Columns include: Region ID; Chromosome; Build 36 location in base pairs (bp); rs#, dbSNP data base (NCBI) reference number; Sequence ID, unique numerical identifier for this patent application; Sequence, 21 by of sequence covering 10 base pair of unique sequence flanking either side of central polymorphic SNP; −log 10 P values for GWS, −log 10 of the P value for statistical significance from the GWS for single SNP markers (both T test and Permutation test p-values are displayed; see Example section) and for the most highly associated multi-marker haplotypes centered at the reference marker and defined by the sliding windows of specified sizes.

[0157] Table 28.2. Genome wide association study results in the Quebec Founder Population (QFP). SNP markers found to be associated with ADHD from the analysis of genome wide scan (GWS) data: Not-ODZ3-1-cr. Columns include: Region ID; Chromosome; Build 36 location in base pairs (bp); rs#, dbSNP data base (NCBI) reference number; Sequence ID, unique numerical identifier for this patent application; Sequence, 21 by of sequence covering 10 base pair of unique sequence flanking either side of central polymorphic SNP; −log 10 P values for GWS, −log 10 of the P value for statistical significance from the GWS for single SNP markers (both T test and Permutation test p-values are displayed; see Example section) and for the most highly associated multi-marker haplotypes centered at the reference marker and defined by the sliding windows of specified sizes.

[0158] Table 28.3. List of significantly associated haplotypes based on the ADHD GWS results using the Quebec Founder Population (QFP). Individual haplotypes with associated relative risks are presented in each row of the table; these values were extracted from the associated marker haplotype window with the most significant p value for each SNP in Table 28.2. The first column lists the region ID as presented in Table 1. The Haplotype column lists the specific nucleotides for the individual SNP alleles contributing to the haplotype reported. The Case and Control columns correspond to the numbers of cases and controls, respectively, containing the haplotype variant noted in the Haplotype column. The Total Case and Total Control columns list the total numbers of cases and controls for which genotype data was available for the haplotype in question. The RR column gives to the relative risk for each particular haplotype. The remainder of the columns lists the SeqIDs for the SNPs contributing to the haplotype and their relative location with respect to the central marker. The Central marker (0) column lists the SeqID for the central marker on which the haplotype is based. Flanking markers are identified by minus (−) or plus (+) signs to indicate the relative location of flanking SNPs.

[0159] Table 29.1. ALL the Genome wide association study results in the Quebec Founder Population (QFP) (including SNPs out of CR from Table 1). SNP markers found to be associated with ADHD from the analysis of genome wide scan (GWS) data: Not-ODZ3-2-cp. Columns include: Region ID; Chromosome; Build 36 location in base pairs (bp); rs#, dbSNP data base (NCBI) reference number; Sequence ID, unique numerical identifier for this patent application; Sequence, 21 by of sequence covering 10 base pair of unique sequence flanking either side of central polymorphic SNP; −log 10 P values for GWS, −log 10 of the P value for statistical significance from the GWS for single SNP markers (both T test and Permutation test p-values are displayed; see Example section) and for the most highly associated multi-marker haplotypes centered at the reference marker and defined by the sliding windows of specified sizes.

[0160] Table 29.2. List of significantly associated haplotypes based on the ADHD GWS results using the Quebec Founder Population (QFP). Individual haplotypes with associated relative risks are presented in each row of the table; these values were extracted from the associated marker haplotype window with the most significant p value for each SNP in Table 29.1. The first column lists the region ID as presented in Table 1. The Haplotype column lists the specific nucleotides for the individual SNP alleles contributing to the haplotype reported. The Case and Control columns correspond to the numbers of cases and controls, respectively, containing the haplotype variant noted in the Haplotype column. The Total Case and Total Control columns list the total numbers of cases and controls for which genotype data was available for the haplotype in question. The RR column gives to the relative risk for each particular haplotype. The remainder of the columns lists the SeqIDs for the SNPs contributing to the haplotype and their relative location with respect to the central marker. The Central marker (0) column lists the SeqID for the central marker on which the haplotype is based. Flanking markers are identified by minus (−) or plus (+) signs to indicate the relative location of flanking SNPs.

[0161] Table 30.1. ALL the Genome wide association study results in the Quebec Founder Population (QFP) (including SNPs out of CR from Table 1). SNP markers found to be associated with ADHD from the analysis of genome wide scan (GWS) data: Not-ODZ3-2-cr. Columns include: Region ID; Chromosome; Build 36 location in base pairs (bp); rs#, dbSNP data base (NCBI) reference number; Sequence ID, unique numerical identifier for this patent application; Sequence, 21 by of sequence covering 10 base pair of unique sequence flanking either side of central polymorphic SNP; −log 10 P values for GWS, −log 10 of the P value for statistical significance from the GWS for single SNP markers (both T test and Permutation test p-values are displayed; see Example section) and for the most highly associated multi-marker haplotypes centered at the reference marker and defined by the sliding windows of specified sizes.

[0162] Table 30.2. Genome wide association study results in the Quebec Founder Population (QFP). SNP markers found to be associated with ADHD from the analysis of genome wide scan (GWS) data: Not-ODZ3-2-cr. Columns include:

[0163] Region ID; Chromosome; Build 36 location in base pairs (bp); rs#, dbSNP data base (NCBI) reference number; Sequence ID, unique numerical identifier for this patent application; Sequence, 21 by of sequence covering 10 base pair of unique sequence flanking either side of central polymorphic SNP; −log 10 P values for GWS, −log 10 of the P value for statistical significance from the GWS for single SNP markers (both T test and Permutation test p-values are displayed; see Example section) and for the most highly associated multi-marker haplotypes centered at the reference marker and defined by the sliding windows of specified sizes.

[0164] Table 30.3. List of significantly associated haplotypes based on the ADHD GWS results using the Quebec Founder Population (QFP). Individual haplotypes with associated relative risks are presented in each row of the table; these values were extracted from the associated marker haplotype window with the most significant p value for each SNP in Table 31.2. The first column lists the region ID as presented in Table 1. The Haplotype column lists the specific nucleotides for the individual SNP alleles contributing to the haplotype reported. The Case and Control columns correspond to the numbers of cases and controls, respectively, containing the haplotype variant noted in the Haplotype column. The Total Case and Total Control columns list the total numbers of cases and controls for which genotype data was available for the haplotype in question. The RR column gives to the relative risk for each particular haplotype. The remainder of the columns lists the SeqIDs for the SNPs contributing to the haplotype and their relative location with respect to the central marker. The Central marker (0) column lists the SeqID for the central marker on which the haplotype is based. Flanking markers are identified by minus (−) or plus (+) signs to indicate the relative location of flanking SNPs.

[0165] Table 31.1. Genome wide association study results in the Quebec Founder Population (QFP). SNP markers found to be associated with ADHD from the analysis of genome wide scan (GWS) data: Not-GRID1-1-cr. Columns include: Region ID; Chromosome; Build 36 location in base pairs (bp); rs#, dbSNP data base (NCBI) reference number; Sequence ID, unique numerical identifier for this patent application; Sequence, 21 by of sequence covering 10 base pair of unique sequence flanking either side of central polymorphic SNP; −log 10 P values for GWS, −log 10 of the P value for statistical significance from the GWS for single SNP markers (both T test and Permutation test p-values are displayed; see Example section) and for the most highly associated multi-marker haplotypes centered at the reference marker and defined by the sliding windows of specified sizes.

[0166] Table 31.2. List of significantly associated haplotypes based on the ADHD results using the Quebec Founder Population (QFP). Individual haplotypes with associated relative risks are presented in each row of the table; these values were extracted from the associated marker haplotype window with the most significant p value for each SNP in Table 31.1. The first column lists the region ID as presented in Table 1. The Haplotype column lists the specific nucleotides for the individual SNP alleles contributing to the haplotype reported. The Case and Control columns correspond to the numbers of cases and controls, respectively, containing the haplotype variant noted in the Haplotype column. The Total Case and Total Control columns list the total numbers of cases and controls for which genotype data was available for the haplotype in question. The RR column gives to the relative risk for each particular haplotype. The remainder of the columns lists the SeqIDs for the SNPs contributing to the haplotype and their relative location with respect to the central marker. The Central marker (0) column lists the SeqID for the central marker on which the haplotype is based. Flanking markers are identified by minus (−) or plus (+) signs to indicate the relative location of flanking SNPs.

[0167] Table 32.1. All the Genome wide association study results in the Quebec Founder Population (QFP) including markers outise of the CR from table 1. SNP markers found to be associated with ADHD from the analysis of genome wide scan (GWS) data: Hascombinedsub-type. Columns include: Region ID; Chromosome; Build 36 location in base pairs (bp); rs#, dbSNP data base (NCBI) reference number; Sequence ID, unique numerical identifier for this patent application; Sequence, 21 by of sequence covering 10 base pair of unique sequence flanking either side of central polymorphic SNP; −log 10 P values for GWS, −log 10 of the P value for statistical significance from the GWS for single SNP markers (both T test and Permutation test p-values are displayed; see Example section) and for the most highly associated multi-marker haplotypes centered at the reference marker and defined by the sliding windows of specified sizes.

[0168] Table 32.2. Genome wide association study results in the Quebec Founder Population (QFP). SNP markers found to be associated with ADHD from the analysis of genome wide scan (GWS) data: Hascombinedsub-type. Columns include: Region ID; Chromosome; Build 36 location in base pairs (bp); rs#, dbSNP data base (NCBI) reference number; Sequence ID, unique numerical identifier for this patent application; Sequence, 21 by of sequence covering 10 base pair of unique sequence flanking either side of central polymorphic SNP; −log 10 P values for GWS, −log 10 of the P value for statistical significance from the GWS for single SNP markers (both T test and Permutation test p-values are displayed; see Example section) and for the most highly associated multi-marker haplotypes centered at the reference marker and defined by the sliding windows of specified sizes.

[0169] Table 32.3. List of significantly associated haplotypes based on the ADHD GWS results using the Quebec Founder Population (QFP). Individual haplotypes with associated relative risks are presented in each row of the table; these values were extracted from the associated marker haplotype window with the most significant p value for each SNP in Table 32.2. The first column lists the region ID as presented in Table 1. The Haplotype column lists the specific nucleotides for the individual SNP alleles contributing to the haplotype reported. The Case and Control columns correspond to the numbers of cases and controls, respectively, containing the haplotype variant noted in the Haplotype column. The Total Case and Total Control columns list the total numbers of cases and controls for which genotype data was available for the haplotype in question. The RR column gives to the relative risk for each particular haplotype. The remainder of the columns lists the SeqIDs for the SNPs contributing to the haplotype and their relative location with respect to the central marker. The Central marker (0) column lists the SeqID for the central marker on which the haplotype is based. Flanking markers are identified by minus (−) or plus (+) signs to indicate the relative location of flanking SNPs.

[0170] Table 33.1. All the Genome wide association study results in the Quebec Founder Population (QFP) including markers outise of the CR from table 1. SNP markers found to be associated with ADHD from the analysis of genome wide scan (GWS) data: Hasinattentivesub-type. Columns include: Region ID; Chromosome; Build 36 location in base pairs (bp); rs#, dbSNP data base (NCBI) reference number; Sequence ID, unique numerical identifier for this patent application; Sequence, 21 by of sequence covering 10 base pair of unique sequence flanking either side of central polymorphic SNP; −log 10 P values for GWS, −log 10 of the P value for statistical significance from the GWS for single SNP markers (both T test and Permutation test p-values are displayed; see Example section) and for the most highly associated multi-marker haplotypes centered at the reference marker and defined by the sliding windows of specified sizes.

[0171] Table 33.2. Genome wide association study results in the Quebec Founder Population (QFP). SNP markers found to be associated with ADHD from the analysis of genome wide scan (GWS) data: Hasinattentivesub-type. Columns include: Region ID; Chromosome; Build 36 location in base pairs (bp); rs#, dbSNP data base (NCBI) reference number; Sequence ID, unique numerical identifier for this patent application; Sequence, 21 by of sequence covering 10 base pair of unique sequence flanking either side of central polymorphic SNP; −log 10 P values for GWS, −log 10 of the P value for statistical significance from the GWS for single SNP markers (both T test and Permutation test p-values are displayed; see Example section) and for the most highly associated multi-marker haplotypes centered at the reference marker and defined by the sliding windows of specified sizes.

[0172] Table 33.3. List of significantly associated haplotypes based on the ADHD GWS results using the Quebec Founder Population (QFP). Individual haplotypes with associated relative risks are presented in each row of the table; these values were extracted from the associated marker haplotype window with the most significant p value for each SNP in Table 33.2. The first column lists the region ID as presented in Table 1. The Haplotype column lists the specific nucleotides for the individual SNP alleles contributing to the haplotype reported. The Case and Control columns correspond to the numbers of cases and controls, respectively, containing the haplotype variant noted in the Haplotype column. The Total Case and Total Control columns list the total numbers of cases and controls for which genotype data was available for the haplotype in question. The RR column gives to the relative risk for each particular haplotype. The remainder of the columns lists the SeqIDs for the SNPs contributing to the haplotype and their relative location with respect to the central marker. The Central marker (0) column lists the SeqID for the central marker on which the haplotype is based. Flanking markers are identified by minus (−) or plus (+) signs to indicate the relative location of flanking SNPs.

[0173] Table 34.1. All the Genome wide association study results in the Quebec Founder Population (QFP) including markers outise of the CR from table 1. SNP markers found to be associated with ADHD from the analysis of genome wide scan (GWS) data: Notcombinedsub-type. Columns include: Region ID; Chromosome; Build 36 location in base pairs (bp); rs#, dbSNP data base (NCBI) reference number; Sequence ID, unique numerical identifier for this patent application; Sequence, 21 by of sequence covering 10 base pair of unique sequence flanking either side of central polymorphic SNP; −log 10 P values for GWS, −log 10 of the P value for statistical significance from the GWS for single SNP markers (both T test and Permutation test p-values are displayed; see Example section) and for the most highly associated multi-marker haplotypes centered at the reference marker and defined by the sliding windows of specified sizes.

[0174] Table 34.2. Genome wide association study results in the Quebec Founder Population (QFP). SNP markers found to be associated with ADHD from the analysis of genome wide scan (GWS) data: Notcombinedsub-type. Columns include: Region ID; Chromosome; Build 36 location in base pairs (bp); rs#, dbSNP data base (NCBI) reference number; Sequence ID, unique numerical identifier for this patent application; Sequence, 21 by of sequence covering 10 base pair of unique sequence flanking either side of central polymorphic SNP; −log 10 P values for GWS, −log 10 of the P value for statistical significance from the GWS for single SNP markers (both T test and Permutation test p-values are displayed; see Example section) and for the most highly associated multi-marker haplotypes centered at the reference marker and defined by the sliding windows of specified sizes.

[0175] Table 34.3. List of significantly associated haplotypes based on the ADHD GWS results using the Quebec Founder Population (QFP). Individual haplotypes with associated relative risks are presented in each row of the table; these values were extracted from the associated marker haplotype window with the most significant p value for each SNP in Table 34.2. The first column lists the region ID as presented in Table 1. The Haplotype column lists the specific nucleotides for the individual SNP alleles contributing to the haplotype reported. The Case and Control columns correspond to the numbers of cases and controls, respectively, containing the haplotype variant noted in the Haplotype column. The Total Case and Total Control columns list the total numbers of cases and controls for which genotype data was available for the haplotype in question. The RR column gives to the relative risk for each particular haplotype. The remainder of the columns lists the SeqIDs for the SNPs contributing to the haplotype and their relative location with respect to the central marker. The Central marker (0) column lists the SeqID for the central marker on which the haplotype is based. Flanking markers are identified by minus (−) or plus (+) signs to indicate the relative location of flanking SNPs.

[0176] Table 35.1. Genome wide association study results in the Quebec Founder Population (QFP). SNP markers found to be associated with ADHD from the analysis of genome wide scan (GWS) data: Nothyperactivesub-type. Columns include: Region ID; Chromosome; Build 36 location in base pairs (bp); rs#, dbSNP data base (NCBI) reference number; Sequence ID, unique numerical identifier for this patent application; Sequence, 21 by of sequence covering 10 base pair of unique sequence flanking either side of central polymorphic SNP; −log 10 P values for GWS, −log 10 of the P value for statistical significance from the GWS for single SNP markers (both T test and Permutation test p-values are displayed; see Example section) and for the most highly associated multi-marker haplotypes centered at the reference marker and defined by the sliding windows of specified sizes.

[0177] Table 35.2. List of significantly associated haplotypes based on the ADHD GWS results using the Quebec Founder Population (QFP). Individual haplotypes with associated relative risks are presented in each row of the table; these values were extracted from the associated marker haplotype window with the most significant p value for each SNP in Table 35.1. The first column lists the region ID as presented in Table 1. The Haplotype column lists the specific nucleotides for the individual SNP alleles contributing to the haplotype reported. The Case and Control columns correspond to the numbers of cases and controls, respectively, containing the haplotype variant noted in the Haplotype column. The Total Case and Total Control columns list the total numbers of cases and controls for which genotype data was available for the haplotype in question. The RR column gives to the relative risk for each particular haplotype. The remainder of the columns lists the SeqIDs for the SNPs contributing to the haplotype and their relative location with respect to the central marker. The Central marker (0) column lists the SeqID for the central marker on which the haplotype is based. Flanking markers are identified by minus (−) or plus (+) signs to indicate the relative location of flanking SNPs.

[0178] Table 36.1. All the Genome wide association study results in the Quebec Founder Population (QFP) including markers outside of CR in Table 1. SNP markers found to be associated with ADHD from the analysis of genome wide scan (GWS) data: Notinattentivesub-type. Columns include: Region ID; Chromosome; Build 36 location in base pairs (bp); rs#, dbSNP data base (NCBI) reference number; Sequence ID, unique numerical identifier for this patent application; Sequence, 21 by of sequence covering 10 base pair of unique sequence flanking either side of central polymorphic SNP; −log 10 P values for GWS, −log 10 of the P value for statistical significance from the GWS for single SNP markers (both T test and Permutation test p-values are displayed; see Example section) and for the most highly associated multi-marker haplotypes centered at the reference marker and defined by the sliding windows of specified sizes.

[0179] Table 36.2. Genome wide association study results in the Quebec Founder Population (QFP). SNP markers found to be associated with ADHD from the analysis of genome wide scan (GWS) data: Notinattentivesub-type. Columns include: Region ID; Chromosome; Build 36 location in base pairs (bp); rs#, dbSNP data base (NCBI) reference number; Sequence ID, unique numerical identifier for this patent application; Sequence, 21 by of sequence covering 10 base pair of unique sequence flanking either side of central polymorphic SNP; −log 10 P values for GWS, −log 10 of the P value for statistical significance from the GWS for single SNP markers (both T test and Permutation test p-values are displayed; see Example section) and for the most highly associated multi-marker haplotypes centered at the reference marker and defined by the sliding windows of specified sizes.

[0180] Table 36.3. List of significantly associated haplotypes based on the ADHD GWS results using the Quebec Founder Population (QFP). Individual haplotypes with associated relative risks are presented in each row of the table; these values were extracted from the associated marker haplotype window with the most significant p value for each SNP in Table 36.2. The first column lists the region ID as presented in Table 1. The Haplotype column lists the specific nucleotides for the individual SNP alleles contributing to the haplotype reported. The Case and Control columns correspond to the numbers of cases and controls, respectively, containing the haplotype variant noted in the Haplotype column. The Total Case and Total Control columns list the total numbers of cases and controls for which genotype data was available for the haplotype in question. The RR column gives to the relative risk for each particular haplotype. The remainder of the columns lists the SeqIDs for the SNPs contributing to the haplotype and their relative location with respect to the central marker. The Central marker (0) column lists the SeqID for the central marker on which the haplotype is based. Flanking markers are identified by minus (−) or plus (+) signs to indicate the relative location of flanking SNPs.

[0181] Table 37.1. Genome wide association study results in the Quebec Founder Population (QFP). SNP markers found to be associated with ADHD from the analysis of genome wide scan (GWS) data: HAS-LOC643182-1_cr. Columns include: Region ID; Chromosome; Build 36 location in base pairs (bp); rs#, dbSNP data base (NCBI) reference number; Sequence ID, unique numerical identifier for this patent application; Sequence, 21 by of sequence covering 10 base pair of unique sequence flanking either side of central polymorphic SNP; −log 10 P values for GWS, −log 10 of the P value for statistical significance from the GWS for single SNP markers (both T test and Permutation test p-values are displayed; see Example section) and for the most highly associated multi-marker haplotypes centered at the reference marker and defined by the sliding windows of specified sizes.

[0182] Table 37.2. List of significantly associated haplotypes based on the ADHD GWS results using the Quebec Founder Population (QFP). Individual haplotypes with associated relative risks are presented in each row of the table; these values were extracted from the associated marker haplotype window with the most significant p value for each SNP in Table 37.1. The first column lists the region ID as presented in Table 1. The Haplotype column lists the specific nucleotides for the individual SNP alleles contributing to the haplotype reported. The Case and Control columns correspond to the numbers of cases and controls, respectively, containing the haplotype variant noted in the Haplotype column. The Total Case and Total Control columns list the total numbers of cases and controls for which genotype data was available for the haplotype in question. The RR column gives to the relative risk for each particular haplotype. The remainder of the columns lists the SeqIDs for the SNPs contributing to the haplotype and their relative location with respect to the central marker. The Central marker (0) column lists the SeqID for the central marker on which the haplotype is based. Flanking markers are identified by minus (−) or plus (+) signs to indicate the relative location of flanking SNPs.

[0183] Table 38. Expression study. Semi-quantitative determination of relative mRNA abundance in various tissues (see Example section for details).

### DEFINITIONS

[0184] Throughout the description of the present invention, several terms are used that are specific to the science of this field. For the sake of clarity and to avoid any misunderstanding, these definitions are provided to aid in the understanding of the specification and claims.

[0185] Allele: One of a pair, or series, of forms of a gene or non-genic region that occur at a given locus in a chromosome. Alleles are symbolized with the same basic symbol (e.g., B for dominant and b for recessive; B1, B2, Bn for n additive alleles at a locus). In a normal diploid cell there are two alleles of any one gene (one from each parent), which occupy the same relative position (locus) on homologous chromosomes. Within a population there may be more than two alleles of a gene. See multiple alleles. SNPs also have alleles, i.e., the two (or more) nucleotides that characterize the SNP.

[0186] Amplification of nucleic acids: refers to methods such as polymerase chain reaction (PCR), ligation amplification (or ligase chain reaction, LCR) and amplification methods based on the use of Q-beta replicase. These methods are well known in the art and are described, for example, in U.S. Pat. Nos. 4,683,195 and 4,683,202. Reagents and hardware for conducting PCR are commercially available. Primers useful for amplifying sequences from the disorder region are preferably complementary to, and preferably hybridize specifically to, sequences in the disorder region or in regions that flank a target region therein. Genes from Tables 2-4 generated by amplification may be sequenced directly. Alternatively, the amplified sequence(s) may be cloned prior to sequence analysis.

[0187] Antigenic component: is a moiety that binds to its specific antibody with sufficiently high affinity to form a detectable antigen-antibody complex.

[0188] Antibodies: refer to polyclonal and/or monoclonal antibodies and fragments thereof, and immunologic binding equivalents thereof, that can bind to proteins and fragments thereof or to nucleic acid sequences from the disorder region, particularly from the disorder gene products or a portion thereof. The term antibody is used both to refer to a homogeneous molecular entity, or a mixture such as a serum product made up of a plurality of different molecular entities. Proteins may be prepared synthetically in a protein synthesizer and coupled to a carrier molecule and injected over several months into rabbits. Rabbit sera are tested for immunoreactivity to the protein or fragment. Monoclonal antibodies may be made by injecting mice with the proteins, or fragments thereof. Monoclonal antibodies can be screened by ELISA and tested for specific immunoreactivity with protein or fragments thereof (Harlow et al. 1988, Antibodies: A Laboratory Manual, Cold Spring Harbor Laboratory, Cold Spring Harbor, N.Y.). These antibodies will be useful in developing assays as well as therapeutics.

[0189] Associated allele: refers to an allele at a polymorphic locus that is associated with a particular phenotype of interest, e.g., a predisposition to a disorder or a particular drug response.

[0190] cDNA: refers to complementary or copy DNA produced from an RNA template by the action of RNA-dependent DNA polymerase (reverse transcriptase). Thus, a cDNA clone means a duplex DNA sequence complementary to an RNA molecule of interest, included in a cloning vector or PCR amplified. This term includes genes from which the intervening sequences have been removed.

[0191] cDNA library: refers to a collection of recombinant DNA molecules containing cDNA inserts that together comprise essentially all of the expressed genes of an organism or tissue. A cDNA library can be prepared by methods known to one skilled in the art (see, e.g., Cowell and Austin, 1997, “DNA Library Protocols,” Methods in Molecular Biology). Generally, RNA is first isolated from the cells of the desired organism, and the RNA is used to prepare cDNA molecules.

[0192] Cloning: refers to the use of recombinant DNA techniques to insert a particular gene or other DNA sequence into a vector molecule. In order to successfully clone a desired gene, it is necessary to use methods for generating DNA fragments, for joining the fragments to vector molecules, for introducing the composite DNA molecule into a host cell in which it can replicate, and for selecting the clone having the target gene from amongst the recipient host cells.

[0193] Cloning vector: refers to a plasmid or phage DNA or other DNA molecule that is able to replicate in a host cell. The cloning vector is typically characterized by one or more endonuclease recognition sites at which such DNA sequences may be cleaved in a determinable fashion without loss of an essential biological function of the DNA, and which may contain a selectable marker suitable for use in the identification of cells containing the vector.

[0194] Coding sequence or a protein-coding sequence: is a polynucleotide sequence capable of being transcribed into mRNA and/or capable of being translated into a polypeptide or peptide. The boundaries of the coding sequence are typically determined by a translation start codon at the 5′-terminus and a translation stop codon at the 3′-terminus.

[0195] Complement of a nucleic acid sequence: refers to the antisense sequence that participates in Watson-Crick base-pairing with the original sequence.

[0196] Disorder region: refers to the portions of the human chromosomes displayed in Table 1 bounded by the markers from Tables 2-37.

[0197] Disorder-associated nucleic acid or polypeptide sequence: refers to a nucleic acid sequence that maps to region of Table 1 or the polypeptides encoded therein (Tables 2-4, nucleic acids, and polypeptides). For nucleic acids, this encompasses sequences that are identical or complementary to the gene sequences from Tables 2-4, as well as sequence-conservative, function-conservative, and non-conservative variants thereof. For polypeptides, this encompasses sequences that are identical to the polypeptide, as well as function-conservative and non-conservative variants thereof. Included are the alleles of naturally-occurring polymorphisms causative of ADHD disease such as, but not limited to, alleles that cause altered expression of genes of Tables 2-4 and alleles that cause altered protein levels or stability (e.g., decreased levels, increased levels, expression in an inappropriate tissue type, increased stability, and decreased stability).

[0198] Expression vector: refers to a vehicle or plasmid that is capable of expressing a gene that has been cloned into it, after transformation or integration in a host cell. The cloned gene is usually placed under the control of (i.e., operably linked to) a regulatory sequence.

[0199] Function-conservative variants: are those in which a change in one or more nucleotides in a given codon position results in a polypeptide sequence in which a given amino acid residue in the polypeptide has been replaced by a conservative amino acid substitution. Function-conservative variants also include analogs of a given polypeptide and any polypeptides that have the ability to elicit antibodies specific to a designated polypeptide.

[0200] Founder population: Also a population isolate, this is a large number of people who have mostly descended, in genetic isolation from other populations, from a much smaller number of people who lived many generations ago.

[0201] Gene: Refers to a DNA sequence that encodes through its template or messenger RNA a sequence of amino acids characteristic of a specific peptide, polypeptide, or protein. The term “gene” also refers to a DNA sequence that encodes an RNA product. The term gene as used herein with reference to genomic DNA includes intervening, non-coding regions, as well as regulatory regions, and can include 5′ and 3′ ends. A gene sequence is wild-type if such sequence is usually found in individuals unaffected by the disorder or condition of interest. However, environmental factors and other genes can also play an important role in the ultimate determination of the disorder. In the context of complex disorders involving multiple genes (oligogenic disorder), the wild type, or normal sequence can also be associated with a measurable risk or susceptibility, receiving its reference status based on its frequency in the general population.

[0202] GeneMaps: are defined as groups of gene(s) that are directly or indirectly involved in at least one phenotype of a disorder (some non-limiting example of GeneMaps comprises varius combinations of genes from Tables 2-4). As such, GeneMaps enable the development of synergistic diagnostic products, creating “theranostics”.

[0203] Genotype: Set of alleles at a specified locus or loci.

[0204] Haplotype: The allelic pattern of a group of (usually contiguous) DNA markers or other polymorphic loci along an individual chromosome or double helical DNA segment. Haplotypes identify individual chromosomes or chromosome segments. The presence of shared haplotype patterns among a group of individuals implies that the locus defined by the haplotype has been inherited, identical by descent (IBD), from a common ancestor. Detection of identical by descent haplotypes is the basis of linkage disequilibrium (LD) mapping. Haplotypes are broken down through the generations by recombination and mutation. In some instances, a specific allele or haplotype may be associated with susceptibility to a disorder or condition of interest, e.g., ADHD disease. In other instances, an allele or haplotype may be associated with a decrease in susceptibility to a disorder or condition of interest, i.e., a protective sequence.

[0205] Host: includes prokaryotes and eukaryotes. The term includes an organism or cell that is the recipient of an expression vector (e.g., autonomously replicating or integrating vector).

[0206] Hybridizable: nucleic acids are hybridizable to each other when at least one strand of the nucleic acid can anneal to another nucleic acid strand under defined stringency conditions. In some embodiments, hybridization requires that the two nucleic acids contain at least 10 substantially complementary nucleotides; depending on the stringency of hybridization, however, mismatches may be tolerated. The appropriate stringency for hybridizing nucleic acids depends on the length of the nucleic acids and the degree of complementarity, and can be determined in accordance with the methods described herein.

[0207] Identity by descent (IBD): Identity among DNA sequences for different individuals that is due to the fact that they have all been inherited from a common ancestor. LD mapping identifies IBD haplotypes as the likely location of disorder genes shared by a group of patients.

[0208] Identity: as known in the art, is a relationship between two or more polypeptide sequences or two or more polynucleotide sequences, as determined by comparing the sequences. In the art, identity also means the degree of sequence relatedness between polypeptide or polynucleotide sequences, as the case may be, as determined by the match between strings of such sequences. Identity and similarity can be readily calculated by known methods, including but not limited to those described in A. M. Lesk (ed), 1988, Computational Molecular Biology, Oxford University Press, NY; D. W. Smith (ed), 1993, Biocomputing. Informatics and Genome Projects, Academic Press, NY; A. M. Griffin and H. G. Griffin, H. G (eds), 1994, Computer Analysis of Sequence Data, Part 1, Humana Press, NJ; G. von Heinje, 1987, Sequence Analysis in Molecular Biology, Academic Press; and M. Gribskov and J. Devereux (eds), 1991, Sequence Analysis Primer, M Stockton Press, NY; H. Carillo and D. Lipman, 1988, SIAM J. Applied Math., 48:1073.

[0209] Immunogenic component: is a moiety that is capable of eliciting a humoral and/or cellular immune response in a host animal.

[0210] Isolated nucleic acids: are nucleic acids separated away from other components (e.g., DNA, RNA, and protein) with which they are associated (e.g., as obtained from cells, chemical synthesis systems, or phage or nucleic acid libraries). Isolated nucleic acids are at least 60% free, preferably 75% free, and most preferably 90% free from other associated components. In accordance with the present invention, isolated nucleic acids can be obtained by methods described herein, or other established methods, including isolation from natural sources (e.g., cells, tissues, or organs), chemical synthesis, recombinant methods, combinations of recombinant and chemical methods, and library screening methods.

[0211] Isolated polypeptides or peptides: are those that are separated from other components (e.g., DNA, RNA, and other polypeptides or peptides) with which they are associated (e.g., as obtained from cells, translation systems, or chemical synthesis systems). In a preferred embodiment, isolated polypeptides or peptides are at least 10% pure; more preferably, 80% or 90% pure. Isolated polypeptides and peptides include those obtained by methods described herein, or other established methods, including isolation from natural sources (e.g., cells, tissues, or organs), chemical synthesis, recombinant methods, or combinations of recombinant and chemical methods. Proteins or polypeptides referred to herein as recombinant are proteins or polypeptides produced by the expression of recombinant nucleic acids. A portion as used herein with regard to a protein or polypeptide, refers to fragments of that protein or polypeptide. The fragments can range in size from 5 amino acid residues to all but one residue of the entire protein sequence. Thus, a portion or fragment can be at least 5, 5-50, 50-100, 100-200, 200-400, 400-800, or more consecutive amino acid residues of a protein or polypeptide.

[0212] Linkage disequilibrium (LD): the situation in which the alleles for two or more loci do not occur together in individuals sampled from a population at frequencies predicted by the product of their individual allele frequencies. In other words, markers that are in LD do not follow Mendel's second law of independent random segregation. LD can be caused by any of several demographic or population artifacts as well as by the presence of genetic linkage between markers. However, when these artifacts are controlled and eliminated as sources of LD, then LD results directly from the fact that the loci involved are located close to each other on the same chromosome so that specific combinations of alleles for different markers (haplotypes) are inherited together. Markers that are in high LD can be assumed to be located near each other and a marker or haplotype that is in high LD with a genetic trait can be assumed to be located near the gene that affects that trait. The physical proximity of markers can be measured in family studies where it is called linkage or in population studies where it is called linkage disequilibrium.

[0213] LD mapping: population based gene mapping, which locates disorder genes by identifying regions of the genome where haplotypes or marker variation patterns are shared statistically more frequently among disorder patients compared to healthy controls. This method is based upon the assumption that many of the patients will have inherited an allele associated with the disorder from a common ancestor (IBD), and that this allele will be in LD with the disorder gene.

[0214] Locus: a specific position along a chromosome or DNA sequence. Depending upon context, a locus could be a gene, a marker, a chromosomal band or a specific sequence of one or more nucleotides.

[0215] Minor allele frequency (MAF): the population frequency of one of the alleles for a given polymorphism, which is equal or less than 50%. The sum of the MAF and the Major allele frequency equals one.

[0216] Markers: an identifiable DNA sequence that is variable (polymorphic) for different individuals within a population. These sequences facilitate the study of inheritance of a trait or a gene. Such markers are used in mapping the order of genes along chromosomes and in following the inheritance of particular genes; genes closely linked to the marker or in LD with the marker will generally be inherited with it. Two types of markers are commonly used in genetic analysis, microsatellites and SNPs.

[0217] Microsatellite: DNA of eukaryotic cells comprising a repetitive, short sequence of DNA that is present as tandem repeats and in highly variable copy number, flanked by sequences unique to that locus.

[0218] Mutant sequence: if it differs from one or more wild-type sequences. For example, a nucleic acid from a gene listed in Tables 2-4 containing a particular allele of a single nucleotide polymorphism may be a mutant sequence. In some cases, the individual carrying this allele has increased susceptibility toward the disorder or condition of interest. In other cases, the mutant sequence might also refer to an allele that decreases the susceptibility toward a disorder or condition of interest and thus acts in a protective manner. The term mutation may also be used to describe a specific allele of a polymorphic locus.

[0219] Non-conservative variants: are those in which a change in one or more nucleotides in a given codon position results in a polypeptide sequence in which a given amino acid residue in a polypeptide has been replaced by a non-conservative amino acid substitution. Non-conservative variants also include polypeptides comprising non-conservative amino acid substitutions.

[0220] Nucleic acid or polynucleotide: purine- and pyrimidine-containing polymers of any length, either polyribonucleotides or polydeoxyribonucleotide or mixed polyribo polydeoxyribonucleotides. This includes single- and double-stranded molecules, i.e., DNA-DNA, DNA-RNA and RNA-RNA hybrids, as well as protein nucleic acids (PNA) formed by conjugating bases to an amino acid backbone. This also includes nucleic acids containing modified bases.

[0221] Nucleotide: a nucleotide, the unit of a DNA molecule, is composed of a base, a 2′-deoxyribose and phosphate ester(s) attached at the 5′ carbon of the deoxyribose. For its incorporation in DNA, the nucleotide needs to possess three phosphate esters but it is converted into a monoester in the process.

[0222] Operably linked: means that the promoter controls the initiation of expression of the gene. A promoter is operably linked to a sequence of proximal DNA if upon introduction into a host cell the promoter determines the transcription of the proximal DNA sequence(s) into one or more species of RNA. A promoter is operably linked to a DNA sequence if the promoter is capable of initiating transcription of that DNA sequence.

[0223] Ortholog: denotes a gene or polypeptide obtained from one species that has homology to an analogous gene or polypeptide from a different species.

[0224] Paralog: denotes a gene or polypeptide obtained from a given species that has homology to a distinct gene or polypeptide from that same species.

[0225] Phenotype: any visible, detectable or otherwise measurable property of an organism such as symptoms of, or susceptibility to, a disorder.

[0226] Polymorphism: occurrence of two or more alternative genomic sequences or alleles between or among different genomes or individuals at a single locus. A polymorphic site thus refers specifically to the locus at which the variation occurs. In some cases, an individual carrying a particular allele of a polymorphism has an increased or decreased susceptibility toward a disorder or condition of interest.

[0227] Portion and fragment: are synonymous. A portion as used with regard to a nucleic acid or polynucleotide refers to fragments of that nucleic acid or polynucleotide. The fragments can range in size from 8 nucleotides to all but one nucleotide of the entire gene sequence. Preferably, the fragments are at least about 8 to about 10 nucleotides in length; at least about 12 nucleotides in length; at least about 15 to about 20 nucleotides in length; at least about 25 nucleotides in length; or at least about 35 to about 55 nucleotides in length.

[0228] Probe or primer: refers to a nucleic acid or oligonucleotide that forms a hybrid structure with a sequence in a target region of a nucleic acid due to complementarity of the probe or primer sequence to at least one portion of the target region sequence.

[0229] Protein and polypeptide: are synonymous. Peptides are defined as fragments or portions of polypeptides, preferably fragments or portions having at least one functional activity (e.g., proteolysis, adhesion, fusion, antigenic, or intracellular activity) as the complete polypeptide sequence.

[0230] Recombinant nucleic acids: nucleic acids which have been produced by recombinant DNA methodology, including those nucleic acids that are generated by procedures which rely upon a method of artificial replication, such as the polymerase chain reaction (PCR) and/or cloning into a vector using restriction enzymes. Portions of recombinant nucleic acids which code for polypeptides can be identified and isolated by, for example, the method of M. Jasin et al., U.S. Pat. No. 4,952,501.

[0231] Regulatory sequence: refers to a nucleic acid sequence that controls or regulates expression of structural genes when operably linked to those genes. These include, for example, the lac systems, the trp system, major operator and promoter regions of the phage lambda, the control region of fd coat protein and other sequences known to control the expression of genes in prokaryotic or eukaryotic cells. Regulatory sequences will vary depending on whether the vector is designed to express the operably linked gene in a prokaryotic or eukaryotic host, and may contain transcriptional elements such as enhancer elements, termination sequences, tissue-specificity elements and/or translational initiation and termination sites.

[0232] Sample: as used herein refers to a biological sample, such as, for example, tissue or fluid isolated from an individual or animal (including, without limitation, plasma, serum, cerebrospinal fluid, lymph, tears, nails, hair, saliva, milk, pus, and tissue exudates and secretions) or from in vitro cell culture-constituents, as well as samples obtained from, for example, a laboratory procedure.

[0233] Single nucleotide polymorphism (SNP): variation of a single nucleotide. This includes the replacement of one nucleotide by another and deletion or insertion of a single nucleotide. Typically, SNPs are biallelic markers although tri- and tetra-allelic markers also exist. For example, SNP MC may comprise allele C or allele A (Tables 5-37). Thus, a nucleic acid molecule comprising SNP A\C may include a C or A at the polymorphic position. For clarity purposes, an ambiguity code is used in Tables 5-37 and the sequence listing, to represent the variations. For a combination of SNPs, the term “haplotype” is used, e.g. the genotype of the SNPs in a single DNA strand that are linked to one another. In certain embodiments, the term “haplotype” is used to describe a combination of SNP alleles, e.g., the alleles of the SNPs found together on a single DNA molecule. In specific embodiments, the SNPs in a haplotype are in linkage disequilibrium with one another.

[0234] Sequence-conservative: variants are those in which a change of one or more nucleotides in a given codon position results in no alteration in the amino acid encoded at that position (i.e., silent mutation).

[0235] Substantially homologous: a nucleic acid or fragment thereof is substantially homologous to another if, when optimally aligned (with appropriate nucleotide insertions and/or deletions) with the other nucleic acid (or its complementary strand), there is nucleotide sequence identity in at least 60% of the nucleotide bases, usually at least 70%, more usually at least 80%, preferably at least 90%, and more preferably at least 95-98% of the nucleotide bases. Alternatively, substantial homology exists when a nucleic acid or fragment thereof will hybridize, under selective hybridization conditions, to another nucleic acid (or a complementary strand thereof). Selectivity of hybridization exists when hybridization which is substantially more selective than total lack of specificity occurs. Typically, selective hybridization will occur when there is at least about 55% sequence identity over a stretch of at least about nine or more nucleotides, preferably at least about 65%, more preferably at least about 75%, and most preferably at least about 90% (M. Kanehisa, 1984, Nucl. Acids Res. 11:203-213). The length of homology comparison, as described, may be over longer stretches, and in certain embodiments will often be over a stretch of at least 14 nucleotides, usually at least 20 nucleotides, more usually at least 24 nucleotides, typically at least 28 nucleotides, more typically at least 32 nucleotides, and preferably at least 36 or more nucleotides.

[0236] Wild-type gene from Tables 2-4: refers to the reference sequence. The wild-type gene sequences from Tables 2-4 used to identify the variants (polymorphisms, alleles, and haplotypes) described in detail herein.

[0237] Technical and scientific terms used herein have the meanings commonly understood by one of ordinary skill in the art to which the present invention pertains, unless otherwise defined. Reference is made herein to various methodologies known to those of skill in the art. Publications and other materials setting forth such known methodologies to which reference is made are incorporated herein by reference in their entireties as though set forth in full. Standard reference works setting forth the general principles of recombinant DNA technology include J. Sambrook et al., 1989, Molecular Cloning: A Laboratory Manual, 2d Ed., Cold Spring Harbor Laboratory Press, Cold Spring Harbor, N.Y.; P. B. Kaufman et al., (eds), 1995, Handbook of Molecular and Cellular Methods in Biology and Medicine, CRC Press, Boca Raton; M. J. McPherson (ed), 1991, Directed Mutagenesis: A Practical Approach, IRL Press, Oxford; J. Jones, 1992, Amino Acid and Peptide Synthesis, Oxford Science Publications, Oxford; B. M. Austen and O. M. R. Westwood, 1991, Protein Targeting and Secretion, IRL Press, Oxford; D. N Glover (ed), 1985, DNA Cloning, Volumes 1 and 11; M. J. Gait (ed), 1984, Oligonucleotide Synthesis; B. D. Hames and S. J. Higgins (eds), 1984, Nucleic Acid Hybridization; Quirke and Taylor (eds), 1991, PCR-A Practical Approach; Harries and Higgins (eds), 1984, Transcription and Translation; R. I. Freshney (ed), 1986, Animal Cell Culture; Immobilized Cells and Enzymes, 1986, IRL Press; Perbal, 1984, A Practical Guide to Molecular Cloning, J. H. Miller and M. P. Calos (eds), 1987, Gene Transfer Vectors for Mammalian Cells, Cold Spring Harbor Laboratory Press; M. J. Bishop (ed), 1998, Guide to Human Genome Computing, 2d Ed., Academic Press, San Diego, Calif.; L. F. Peruski and A. H. Peruski, 1997, The Internet and the New Biology. Tools for Genomic and Molecular Research, American Society for Microbiology, Washington, D.C. Standard reference works setting forth the general principles of immunology include S. Sell, 1996, Immunology, Immunopathology & Immunity, 5th Ed., Appleton & Lange, Publ., Stamford, Conn.; D. Male et al., 1996, Advanced Immunology, 3d Ed., Times Mirror Intl Publishers Ltd., Publ., London; D. P. Stites and A. L Terr, 1991, Basic and Clinical Immunology, 7th Ed., Appleton & Lange, Publ., Norwalk, Conn.; and A. K: Abbas et al., 1991, Cellular and Molecular Immunology, W. B. Saunders Co., Publ., Philadelphia, Pa. Any suitable materials and/or methods known to those of skill can be utilized in carrying out the present invention; however, preferred materials and/or methods are described. Materials, reagents, and the like to which reference is made in the following description and examples are generally obtainable from commercial sources, and specific vendors are cited herein.

### DETAILED DESCRIPTION OF THE INVENTION

### General Description of ADHD Disease

[0238] Children with attention deficit/hyperactivity disorder (ADHD) show signs of excessively high activity levels, restlessness, impulsivity and inattention. In Canada, it is estimated to occur in 2% to 12% of children, with an over-representation of boys by approximately 3:1 (Boyle et al., 1993; Offord et al., 1987; Tannock, 1998). Children with ADHD have difficulties listening to instructions, organizing their work, finishing schoolwork or chores, engaging in tasks that require sustained mental effort, engaging in quiet activities, sitting still, or waiting their turn. These problems are present before the age of 7 years and, in most cases, diagnosis will be made when starting primary school.

[0239] There is no single definitive test for the diagnosis of ADHD. However, The American Psychiatric Association has set up a number of criteria for the diagnosis of ADHD (Diagnostic and Statistical Manual of Mental Disorders DSM-IV et DSM-IVR: American Psychiatric Association, 1994 and 2000). The disease can be subdivided into three different subtypes:
[0240] 1. Attention-deficit/hyperactivity disorder, combined type
[0241] 2. Attention-deficit/hyperactivity disorder, predominantly inattentive type
[0242] 3. Attention-deficit/hyperactivity disorder, predominantly hyperactive-impulsive type

[0243] Inattention:
[0244] a. often fails to give close attention to details or makes careless mistakes in schoolwork, work, or other activities
[0245] b. often has difficulty sustaining attention in tasks or play activities
[0246] c. often does not seem to listen when spoken to directly
[0247] d. often does not follow through on instructions and fails to finish schoolwork, chores, or duties in the workplace (not due to oppositional behavior or failure to understand instructions)
[0248] e. often has difficulty organizing tasks and activities
[0249] f. often avoids, dislikes, or is reluctant to engage in tasks that require sustained mental effort (such as schoolwork or homework)
[0250] g. often loses things necessary for tasks or activities (e.g., toys, school assignments, pencils, books, or tools)
[0251] h. is often easily distracted by extraneous stimuli
[0252] i. is often forgetful in daily activities

[0253] Hyperactivity
[0254] a. often fidgets with hands or feet or squirms in seat
[0255] b. often leaves seat in classroom or in other situations in which remaining seated is expected
[0256] c. often runs about or climbs excessively in situations in which it is inappropriate (in adolescents or adults, may be limited to subjective feelings of restlessness)
[0257] d. often has difficulty playing or engaging in leisure activities quietly
[0258] e. is often “on the go” or often acts as if “driven by a motor”
[0259] f. often talks excessively

[0260] Impulsivity
[0261] g. often blurts out answers before questions have been completed
[0262] h. often has difficulty awaiting turn
[0263] i. often interrupts or intrudes on others (e.g., butts into conversations or games)

[0264] ADHD diagnosis is made only when the child shows either six (6) or more of the symptoms of inattention OR six (6) or more of the symptoms of hyperactivity-impulsivity OR six (6) symptoms of each category for the combined type. Those symptoms have persisted for at least 6 months to a degree that is maladaptive and inconsistent with developmental level of a child that age.

[0265] ADHD incidence is observed more in boys than girls; the male-to-female ratios ranging from 3:1 and 9:1 (Fergusson & Horwood, 1993; McDermott, 1996; Valla et al., 1994). However, girls seem to have the inattentive type of ADHD more often, and may thus not be properly diagnosed. Thus the discrepancy in ratios between the sexes may be because many girls are under-diagnosed (Hudziak et al., 1998; NIH Consensus report, 2000). However, boys with the Predominantly Inattentive Type also tend to be under-diagnosed, so that argument alone cannot explain the gender difference.

[0266] ADHD symptoms can persist into adolescence and adulthood which results in difficulties in occupational, social and family lives. They have social difficulties, and they often end up engaging in antisocial activities such as drug and alcohol abuse (Murphy, 2002), and criminal activities and drop out of school (Faraone & Biederman, 1998; Modigh et al., 1998). They are also more prone to risk taking which makes them more susceptible to injuries. In addition, families with children with ADHD will often come under tremendous stress, including increased levels of parental frustration, and higher rates of divorce (NIH Consensus report, 2000). Furthermore, and considering the familial incidence of the disorder, the parent may himself have to face problems related to ADHD. However, it has been suggested that up to 50% of the cases still suffer from disabling symptoms at age 20 (Modigh et al., 1998; Spencer et al., 1998). ADHD might even be the most common undiagnosed psychiatric disorder in adults (Wender, 1998).

[0267] Neurophysiological studies of individuals with ADHD suggest that either the frontal cortex of the brain is dysfunctional, or there is some subcortical projection making it look as if the front is malfunctioning. Structural imaging studies of the brains of patients with ADHD have revealed damage to the brain, consistent with the fronto-subcortical classification (Biederman & Spencer, 1999; Ernst et al., 1998). The fronto-subcortical systems which control attention and motor behavior are rich in catecholamines. This is of particular interest, since many of the pharmaceuticals used for treating ADHD interfere with the catecholamine balance (Wilens, 2006).

[0268] Non-surgical treatment for active disease involves the use of stimulant drugs, i.e. methylphendiate (Ritalin®) and dextroamphetamine (Dexedrine®), where methylphendiate has been promoted more extensively by the drug industry, studied more often, and therefore are more widely prescribed (Elia et al., 1999). Both Ritalin® and Dexedrine® have similar side effects, and have been shown to be effective in children as well as in adults. No studies are available where children on medication have been followed into adulthood. Although drugs improve the abilities to do usual tasks in schoolwork, there has been no improvement in long-term academic achievement (Williams et al., 1999). Children who have other learning disabilities as well as ADHD may not respond so well to the stimulant drugs.

[0269] There have been several family studies (Biederman et al., 1990; Faraone et al., 1996; Gross-Tsur et al., 1991) or studies on girls (Faraone et al., 1991) as well as studies on African-American children (Samuel et al., 1999) that all show that there is a strong genetic component to ADHD. Segregation analysis suggested that the sex-dependent Mendelian codominant model best supported the data (Maher et al., 1999).

[0270] Twin studies as reviewed by Thapar et al. 1999 and Tannock 1998 show heritability estimates from 0.39 to 0.91. The studies on twins were largely carried out as interviews with mothers and or teachers. There is some bias in using the mothers as reporters, therefore it is important to use an impartial source as well (Sherman et al., 1997). This seems to be especially important for dizygotic twins where the behaviour of one twin has an inhibitory influence on the other, or where there is a maternal contrast effect (Thapar et al., 1999).

[0271] There have been only three whole-genome linkage studies: two affected sib pair (ASP) linkage studies (Ogdie et al., 2003 and Bakker et al., 2003) from the USA and the Netherlands and one study of multiplex families from Colombia (Arcos-Burgos et al., 2004). In the Dutch study of 164 ASPs, two regions on chromosomes 7p and 15q showed suggestive evidence of linkage (Bakker et al., 2003). The US (UCLA) study on 270 ASPs demonstrated significance for the chromosomal regions 16p13 and 17 μl. Parametric linkage analysis on the combined set of families of 16 multigenerational and extended pedigrees from Colombia showed significance on chromosomes 5q33.3, 11q22 and 17 μl (Arcos-Burgos et al., 2004). Fine mapping linkage analysis of all families together yielded significant linkage at chromosomes 4q13.2, 5q33, 3, 11q22 and 17 μl (Arcos-Burgos et al., 2004).

[0272] Thus the discovery of more disease genes and the development of GeneMaps for ADHD may lead to a better understanding of pathogenesis and to the identification of new pathways and genetic interactions involved in the disease, ultimately leading to better treatments for the patients. GeneMaps may also lead to molecular diagnostic tools that will identify subjects with ADHD or at risk for ADHD or for any related subtypes of the disease.

### Genome Wide Association Study to Construct a GeneMap for ADHD

[0273] The present invention is based on the discovery of genes associated with ADHD disease. In the preferred embodiment, disease-associated loci (candidate regions; Table 1) are identified by the statistically significant differences in allele or haplotype frequencies between the cases and the controls. For the purpose of the present invention, candidate regions (Table 1) are identified.

[0274] The invention provides a method for the discovery of genes associated with ADHD disease and the construction of a GeneMap for ADHD disease in a human population, comprising the following steps (see also Example section herein):

[0275] Step 1: Recruit Patients (Cases) and Controls

[0276] In the preferred embodiment, 500 patients diagnosed for ADHD disease along with two family members are recruited from the Quebec Founder Population (QFP). The preferred trios recruited are parent-parent-child (PPC) trios. Trios can also be recruited as parent-child-child (PCC) trios. In another preferred embodiment, more or less than 500 trios are recruited. In another embodiment, independent case and control samples are recruited.

[0277] In another embodiment, the present invention is performed as a whole or partially with DNA samples from individuals of another founder population than the Quebec population or from the general population.

[0278] Step 2: DNA Extraction and Quantitation

[0279] Any sample comprising cells or nucleic acids from patients or controls may be used. Preferred samples are those easily obtained from the patient or control. Such samples include, but are not limited to blood, peripheral lymphocytes, buccal swabs, epithelial cell swabs, nails, hair, bronchoalveolar lavage fluid, sputum, or other body fluid or tissue obtained from an individual.

[0280] In one embodiment, DNA is extracted from such samples in the quantity and quality necessary to perform the invention using conventional DNA extraction and quantitation techniques. The present invention is not linked to any DNA extraction or quantitation platform in particular.

[0281] Step 3: Genotype the Recruited Individuals

[0282] In one embodiment, assay-specific and/or locus-specific and/or allele-specific oligonucleotides for every SNP marker of the present invention (Tables 5-37) are organized onto one or more arrays. The genotype at each SNP locus is revealed by hybridizing short PCR fragments comprising each SNP locus onto these arrays. The arrays permit a high-throughput genome wide association study using DNA samples from individuals of the Quebec founder population. Such assay-specific and/or locus-specific and/or allele-specific oligonucleotides necessary for scoring each SNP of the present invention are preferably organized onto a solid support. Such supports can be arrayed on wafers, glass slides, beads or any other type of solid support.

[0283] In another embodiment, the assay-specific and/or locus-specific and/or allele-specific oligonucleotides are not organized onto a solid support but are still used as a whole, in panels or one by one. The present invention is therefore not linked to any genotyping platform in particular.

[0284] In another embodiment, one or more portions of the SNP maps (publicly available maps and our own proprietary QLDM map) are used to screen the whole genome, a subset of chromosomes, a chromosome, a subset of genomic regions or a single genomic region.

[0285] In the preferred embodiment, the individuals composing the 500 trios or the cases and controls are preferably individually genotyped with at least 80,000 markers, generating at least a few million genotypes; more preferably, at least a hundred million. In another embodiment, individuals are pooled in cases and control pools for genotyping and genetic analysis.

[0286] Step 4: Exclude the Markers that Did not Pass the Quality Control of the Assay.

[0287] Preferably, the quality controls comprises, but are not limited to, the following criteria: eliminate SNPs that had a high rate of Mendelian errors (cut-off at 1% Mendelian error rate), that deviate from the Hardy-Weinberg equilibrium, that are non-polymorphic in the Quebec founder population or have too many missing data (cut-off at 1% missing values or higher), or simply because they are non-polymorphic in the Quebec founder population (cut-off at 1%≦10% minor allele frequency (MAF)).

[0288] Step 5: Perform the Genetic Analysis on the Results Obtained Using Haplotype Information as Well as Single-Marker Association.

[0289] In the preferred embodiment, genetic analysis is performed on all the genotypes from Step 3.

[0290] In another embodiment, genetic analysis is performed on a subset of markers from Step 3 or from markers that passed the quality controls from Step 4.

[0291] In one embodiment, the genetic analysis consists of, but is not limited to features corresponding to Phase information and haplotype structures. Phase information and haplotype structures are preferably deduced from trio genotypes using Phasefinder. Since chromosomal assignment (phase) cannot be estimated when all trio members are heterozygous, an Expectation-Maximization (EM) algorithm may be used to resolve chromosomal assignment ambiguities after Phasefinder.

[0292] In yet another embodiment, the PL-EM algorithm (Partition-Ligation EM; Niu et al., Am. J. Hum. Genet. 70:157 (2002)) can be used to estimate haplotypes from the “genotype” data as a measured estimate of the reference allele frequency of a SNP in 15-marker windows that advance in increments of one marker across the data set. The results from such algorithms are converted into 15-marker haplotype files. Subsequently, the individual 15-marker block files are assembled into one continuous block of haplotypes for the entire chromosome. These extended haplotypes can then be used for further analysis. Such haplotype assembly algorithms take the consensus estimate of the allele call at each marker over all separate estimations (most markers are estimated 15 different times as the 15 marker blocks pass over their position).

[0293] In the preferred embodiment, the haplotypes for both the controls and the patients are derived in this manner. The preferred control of a trio structure is the non-transmitted chromosomes (chromosomes found in parents but not in affected child) if the patient is the child.

[0294] In another embodiment, the haplotype frequencies among patients are compared to those among the controls using LDSTATS, a program that assesses the association of haplotypes with the disease. Such program defines haplotypes using multi-marker windows that advance across the marker map in one-marker increments. Such windows can be 1, 3, 5, 7 or 9 markers wide, and all these window sizes are tested concurrently. Larger multi-marker haplotype windows can also be used. At each position the frequency of haplotypes in cases is compared to the frequency of haplotypes in controls. Such allele frequency differences for single marker windows can be tested using Pearson's Chi-square with any degree of freedom. Multi-allelic haplotype association can be tested using Smith's normalization of the square root of Pearson's Chi-square. Such significance of association can be reported in two ways:

[0295] The significance of association within any one haplotype window is plotted against the marker that is central to that window.

[0296] P-values of association for each specific marker are calculated as a pooled P-value across all haplotype windows in which they occur. The pooled P-value is calculated using an expected value and variance calculated using a permutation test that considers covariance between individual windows. Such pooled P-values can yield narrower regions of gene location than the window data (see example 3 for details on analysis methods, such as LDSTATS v2.0 and v4.0).

[0297] In another embodiment, conditional haplotype and subtype analyses can be performed on subsets of the original set of cases and controls using the program LDSTATS. For conditional analyses, the selection of a subset of cases and their matched controls can be based on the carrier status of cases at a gene or locus of interest (see conditional analysis section in example 3 herein). Various conditional haplotypes can be derived, such as protective haplotypes and risk haplotypes.

[0298] Step 6: SNP and DNA Polymorphism Discovery

[0299] In the preferred embodiment, all the candidate genes and regions identified in step 5 are sequenced for polymorphism identification.

[0300] In another embodiment, the entire region, including all introns, is sequenced to identify all polymorphisms.

[0301] In yet another embodiment, the candidate genes are prioritized for sequencing, and only functional gene elements (promoters, conserved noncoding sequences, exons and splice sites) are sequenced.

[0302] In yet another embodiment, previously identified polymorphisms in the candidate regions can also be used. For example, SNPs from dbSNP, or others can also be used rather than resequencing the candidate regions to identify polymorphisms.

[0303] The discovery of SNPs and DNA polymorphisms generally comprises a step consisting of determining the major haplotypes in the region to be sequenced. The preferred samples are selected according to which haplotypes contribute to the association signal observed in the region to be sequenced. The purpose is to select a set of samples that covers all the major haplotypes in the given region. Each major haplotype is preferably analyzed in at least a few individuals.

[0304] Any analytical procedure may be used to detect the presence or absence of variant nucleotides at one or more polymorphic positions of the invention. In general, the detection of allelic variation requires a mutation discrimination technique, optionally an amplification reaction and optionally a signal generation system. Any means of mutation detection or discrimination may be used. For instance, DNA sequencing, scanning methods, hybridization, extension based methods, incorporation based methods, restriction enzyme-based methods and ligation-based methods may be used in the methods of the invention.

[0305] Sequencing methods include, but are not limited to, direct sequencing, and sequencing by hybridization. Scanning methods include, but are not limited to, protein truncation test (PTT), single-strand conformation polymorphism analysis (SSCP), denaturing gradient gel electrophoresis (DGGE), temperature gradient gel electrophoresis (TGGE), cleavage, heteroduplex analysis, chemical mismatch cleavage (CMC), and enzymatic mismatch cleavage. Hybridization-based methods of detection include, but are not limited to, solid phase hybridization such as dot blots, multiple allele specific diagnostic assay (MASDA), reverse dot blots, and oligonucleotide arrays (DNA Chips). Solution phase hybridization amplification methods may also be used, such as Taqman. Extension based methods include, but are not limited to, amplification refraction mutation systems (ARMS), amplification refractory mutation systems (ALEX), and competitive oligonucleotide priming systems (COPS). Incorporation based methods include, but are not limited to, mini-sequencing and arrayed primer extension (APEX). Restriction enzyme-based detection systems include, but are not limited to, restriction site generating PCR. Lastly, ligation based detection methods include, but are not limited to, oligonucleotide ligation assays (OLA). Signal generation or detection systems that may be used in the methods of the invention include, but are not limited to, fluorescence methods such as fluorescence resonance energy transfer (FRET), fluorescence quenching, fluorescence polarization as well as other chemiluminescence, electrochemiluminescence, Raman, radioactivity, colometric methods, hybridization protection assays and mass spectrometry methods. Further amplification methods include, but are not limited to self sustained replication (SSR), nucleic acid sequence based amplification (NASBA), ligase chain reaction (LCR), strand displacement amplification (SDA) and branched DNA (B-DNA).

[0306] Sequencing can also be performed using a proprietary sequencing technology (Cantaloupe; PCT/EP2005/002870).

[0307] Step 7: Ultrafine Mapping

[0308] This step further maps the candidate regions and genes confirmed in the previous step to identify and validate the responsible polymorphisms associated with ADHD disease in the human population.

[0309] In a preferred embodiment, the discovered SNPs and polymorphisms of step 6 are ultrafine mapped at a higher density of markers than the GWS described herein using the same technology described in step 3.

[0310] Step 8: GeneMap Construction

[0311] The confirmed variations in DNA (including both genic and non-genic regions) are used to build a GeneMap for ADHD disease. The gene content of this GeneMap is described in more detail below. Such GeneMap can be used for other methods of the invention comprising the diagnostic methods described herein, the susceptibility to ADHD disease, the response to a particular drug, the efficacy of a particular drug, the screening methods described herein and the treatment methods described herein.

[0312] As is evident to one of ordinary skill in the art, all of the above steps or the steps do not need to be performed, or performed in a given order to practice or use the SNPs, genomic regions, genes, proteins, etc. in the methods of the invention.

[0313] Genes from the GeneMap

[0314] In one embodiment the GeneMap consists of genes and targets, in a variety of combinations, identified from the candidate regions listed in Table 1. In another embodiment, all genes from Tables 2-4 are present in the GeneMap. In another preferred embodiment, the GeneMap consists of a selection of genes from Tables 2-4. The genes of the invention (Tables 2-4) are arranged by candidate regions and by their chromosomal location. Such order is for the purpose of clarity and does not reflect any other criteria of selection in the association of the genes with ADHD disease.

[0315] In one embodiment, genes identified in the WGAS and subsequent studies are evaluated using the Ingenuity Pathway Analysis application (IPA, Ingenuity systems) in order to identify direct biological interactions between these genes, and also to identify molecular regulators acting on those genes (indirect interactions) that could be also involved in ADHD. The purpose of this effort is to decipher the molecules involved in contributing to ADHD. These gene interaction networks are very valuable tools in the sense that they facilitate extension of the map of gene products that could represent potential drug targets for ADHD.

[0316] In another embodiment, other means (such as functional biochemical assays and genetic assays) are used to identify the biological interactions between genes to create a GeneMap.

[0317] In yet another embodiment, the GeneMaps of the invention consists of a selection of genes from Tables 2-4 and a selection of genes that are interactors (direct or indirect) with the genes from the Tables. For clarity purposes, those interactor genes are not present in Tables 2-4, but know in the art from various public documents (scientific articles, patent literature etc.).

[0318] The GeneMaps aid in the selection of the best target to intervene in a disease state. Each disease can be subdivided into various disease states and sub-phenotypes, thus various GeneMaps are needed to address various disease sub-phenotypes, and a clinical population can be stratified by sub-phenotype, which would be covered by a particular GeneMap.

### Nucleic Acid Sequences

[0319] The nucleic acid sequences of the present invention may be derived from a variety of sources including DNA, cDNA, synthetic DNA, synthetic RNA, derivatives, mimetics or combinations thereof. Such sequences may comprise genomic DNA, which may or may not include naturally occurring introns, genic regions, nongenic regions, and regulatory regions. Moreover, such genomic DNA may be obtained in association with promoter regions or poly (A) sequences. The sequences, genomic DNA, or cDNA may be obtained in any of several ways. Genomic DNA can be extracted and purified from suitable cells by means well known in the art. Alternatively, mRNA can be isolated from a cell and used to produce cDNA by reverse transcription or other means. The nucleic acids described herein are used in certain embodiments of the methods of the present invention for production of RNA, proteins or polypeptides, through incorporation into cells, tissues, or organisms. In one embodiment, DNA containing all or part of the coding sequence for the genes described in Tables 2-4, or the SNP markers described in Tables 5-37, is incorporated into a vector for expression of the encoded polypeptide in suitable host cells. The invention also comprises the use of the nucleotide sequence of the nucleic acids of this invention to identify DNA probes for the genes described in Tables 2-4 or the SNP markers described in Tables 5-37, PCR primers to amplify the genes described in Tables 2-4 or the SNP markers described in Tables 5-37, nucleotide polymorphisms in the genes described in Tables 2-4, and regulatory elements of the genes described in Tables 2-4. The nucleic acids of the present invention find use as primers and templates for the recombinant production of ADHD disease-associated peptides or polypeptides, for chromosome and gene mapping, to provide antisense sequences, for tissue distribution studies, to locate and obtain full length genes, to identify and obtain homologous sequences (wild-type and mutants), and in diagnostic applications.

### Antisense Oligonucleotides

[0320] In a particular embodiment of the invention, an antisense nucleic acid or oligonucleotide is wholly or partially complementary to, and can hybridize with, a target nucleic acid (either DNA or RNA) having the sequence of SEQ ID NO:1, NO:3 or any SEQ ID from any Tables of the invention. For example, an antisense nucleic acid or oligonucleotide comprising 16 nucleotides can be sufficient to inhibit expression of at least one gene from Tables 2-4. Alternatively, an antisense nucleic acid or oligonucleotide can be complementary to 5′ or 3′ untranslated regions, or can overlap the translation initiation codon (5′ untranslated and translated regions) of at least one gene from Tables 2-4, or its functional equivalent. In another embodiment, the antisense nucleic acid is wholly or partially complementary to, and can hybridize with, a target nucleic acid that encodes a polypeptide from a gene described in Tables 2-4.

[0321] In addition, oligonucleotides can be constructed which will bind to duplex nucleic acid (i.e., DNA:DNA or DNA:RNA), to form a stable triple helix containing or triplex nucleic acid. Such triplex oligonucleotides can inhibit transcription and/or expression of a gene from Tables 2-4, or its functional equivalent (M. D. Frank-Kamenetskii et al., 1995). Triplex oligonucleotides are constructed using the basepairing rules of triple helix formation and the nucleotide sequence of the genes described in Tables 2-4.

[0322] The present invention encompasses methods of using oligonucleotides in antisense inhibition of the function of the genes from Tables 2-4. In the context of this invention, the term “oligonucleotide” refers to naturally-occurring species or synthetic species formed from naturally-occurring subunits or their close homologs. The term may also refer to moieties that function similarly to oligonucleotides, but have non-naturally-occurring portions. Thus, oligonucleotides may have altered sugar moieties or inter-sugar linkages. Exemplary among these are phosphorothioate and other sulfur containing species which are known in the art. In preferred embodiments, at least one of the phosphodiester bonds of the oligonucleotide has been substituted with a structure that functions to enhance the ability of the compositions to penetrate into the region of cells where the RNA whose activity is to be modulated is located. It is preferred that such substitutions comprise phosphorothioate bonds, methyl phosphonate bonds, or short chain alkyl or cycloalkyl structures. In accordance with other preferred embodiments, the phosphodiester bonds are substituted with structures which are, at once, substantially non-ionic and non-chiral, or with structures which are chiral and enantiomerically specific. Persons of ordinary skill in the art will be able to select other linkages for use in the practice of the invention. Oligonucleotides may also include species that include at least some modified base forms. Thus, purines and pyrimidines other than those normally found in nature may be so employed. Similarly, modifications on the furanosyl portions of the nucleotide subunits may also be effected, as long as the essential tenets of this invention are adhered to. Examples of such modifications are 2′-O-alkyl- and 2′-halogen-substituted nucleotides. Some non-limiting examples of modifications at the 2′ position of sugar moieties which are useful in the present invention include OH, SH, SCH₃, F, OCH3, OCN, O(CH2), NH2 and O(CH2)nCH3, where n is from 1 to about 10. Such oligonucleotides are functionally interchangeable with natural oligonucleotides or synthesized oligonucleotides, which have one or more differences from the natural structure. All such analogs are comprehended by this invention so long as they function effectively to hybridize with at least one gene from Tables 2-4 DNA or RNA to inhibit the function thereof.

[0323] The oligonucleotides in accordance with this invention preferably comprise from about 3 to about 50 subunits. It is more preferred that such oligonucleotides and analogs comprise from about 8 to about 25 subunits and still more preferred to have from about 12 to about 20 subunits. As defined herein, a “subunit” is a base and sugar combination suitably bound to adjacent subunits through phosphodiester or other bonds.

[0324] Antisense nucleic acids or oligonulcleotides can be produced by standard techniques (see, e.g., Shewmaker et al., U.S. Pat. No. 6,107,065). The oligonucleotides used in accordance with this invention may be conveniently and routinely made through the well-known technique of solid phase synthesis. Any other means for such synthesis may also be employed; however, the actual synthesis of the oligonucleotides is well within the abilities of the practitioner. It is also well known to prepare other oligonucleotides such as phosphorothioates and alkylated derivatives.

[0325] The oligonucleotides of this invention are designed to be hybridizable with RNA (e.g., mRNA) or DNA from genes described in Tables 2-4. For example, an oligonucleotide (e.g., DNA oligonucleotide) that hybridizes to mRNA from a gene described in Tables 2-4 can be used to target the mRNA for RnaseH digestion. Alternatively an oligonucleotide that can hybridize to the translation initiation site of the mRNA of a gene described in Tables 2-4 can be used to prevent translation of the mRNA. In another approach, oligonucleotides that bind to the double-stranded DNA of a gene from Tables 2-4 can be administered. Such oligonucleotides can form a triplex construct and inhibit the transcription of the DNA encoding polypeptides of the genes described in Tables 2-4. Triple helix pairing prevents the double helix from opening sufficiently to allow the binding of polymerases, transcription factors, or regulatory molecules. Recent therapeutic advances using triplex DNA have been described (see, e.g., J. E. Gee et al., 1994, Molecular and Immunologic Approaches, Futura Publishing Co., Mt. Kisco, N.Y.).

[0326] As non-limiting examples, antisense oligonucleotides may be targeted to hybridize to the following regions: mRNA cap region; translation initiation site; translational termination site; transcription initiation site; transcription termination site; polyadenylation signal; 3′ untranslated region; 5′ untranslated region; 5′ coding region; mid coding region; 3′ coding region; DNA replication initiation and elondation sites. Preferably, the complementary oligonucleotide is designed to hybridize to the most unique 5′ sequence of a gene described in Tables 2-4, including any of about 15-35 nucleotides spanning the 5′ coding sequence. In accordance with the present invention, the antisense oligonucleotide can be synthesized, formulated as a pharmaceutical composition, and administered to a subject. The synthesis and utilization of antisense and triplex oligonucleotides have been previously described (e.g., Simon et al., 1999; Barre et al., 2000; Elez et al., 2000; Sauter et al., 2000).

[0327] Alternatively, expression vectors derived from retroviruses, adenovirus, herpes or vaccinia viruses or from various bacterial plasmids may be used for delivery of nucleotide sequences to the targeted organ, tissue or cell population. Methods which are well known to those skilled in the art can be used to construct recombinant vectors which will express nucleic acid sequence that is complementary to the nucleic acid sequence encoding a polypeptide from the genes described in Tables 2-4. These techniques are described both in Sambrook et al., 1989 and in Ausubel et al., 1992. For example, expression of at least one gene from Tables 2-4 can be inhibited by transforming a cell or tissue with an expression vector that expresses high levels of untranslatable sense or antisense sequences. Even in the absence of integration into the DNA, such vectors may continue to transcribe RNA molecules until they are disabled by endogenous nucleases. Transient expression may last for a month or more with a nonreplicating vector, and even longer if appropriate replication elements are included in the vector system. Various assays may be used to test the ability of gene-specific antisense oligonucleotides to inhibit the expression of at least one gene from Tables 2-4. For example, mRNA levels of the genes described in Tables 2-4 can be assessed by Northern blot analysis (Sambrook et al., 1989; Ausubel et al., 1992; J. C. Alwine et al. 1977; I. M. Bird, 1998), quantitative or semi-quantitative RT-PCR analysis (see, e.g., W. M. Freeman et al., 1999; Ren et al., 1998; J. M. Cale et al., 1998), or in situ hybridization (reviewed by A. K. Raap, 1998). Alternatively, antisense oligonucleotides may be assessed by measuring levels of the polypeptide from the genes described in Tables 2-4, e.g., by western blot analysis, indirect immunofluorescence and immunoprecipitation techniques (see, e.g., J. M. Walker, 1998, Protein Protocols on cD-ROM, Humana Press, Totowa, N.J.). Any other means for such detection may also be employed, and is well within the abilities of the practitioner.

### Mapping Technologies

[0328] The present invention includes various methods which employ mapping technologies to map SNPs and polymorphisms. For purpose of clarity, this section comprises, but is not limited to, the description of mapping technologies that can be utilized to achieve the embodiments described herein. Mapping technologies may be based on amplification methods, restriction enzyme cleavage methods, hybridization methods, sequencing methods, and cleavage methods using agents.

[0329] Amplification methods include: self sustained sequence replication (Guatelli et al., 1990), transcriptional amplification system (Kwoh et al., 1989), Q-Beta Replicase (Lizardi at al., 1988), isothermal amplification (e.g. Dean at al., 2002; and Hafner et al., 2001), or any other nucleic acid amplification method, followed by the detection of the amplified molecules using techniques well known to those of ordinary skill in the art. These detection schemes are especially useful for the detection of nucleic acid molecules if such molecules are present in very low number.

[0330] Restriction enzyme cleavage methods include: isolating sample and control DNA, amplification (optional), digestion with one or more restriction endonucleases, determination of fragment length sizes by gel electrophoresis and comparing samples and controls. Differences in fragment length sizes between sample and control DNA indicates mutations in the sample DNA. Moreover, sequence specific ribozymes (see, e.g., U.S. Pat. No. 5,498,531 or DNAzyme e.g. U.S. Pat. No. 5,807,718) can be used to score for the presence of specific mutations by development or loss of a ribozyme or DNAzyme cleavage site.

[0331] Hybridization methods include any measurement of the hybridization or gene expression levels, of sample nucleic acids to probes corresponding to about 2, 3, 4, 5, 6, 7, 8, 9, 10, 15, 20, 25, 30, 50, 75, 100, 200, 500, 1000 or more genes, or ranges of these numbers, such as about 5-20, about 10-20, about 20-50, about 50-100, or about 100-200 genes of Tables 2-4.

[0332] SNPs and SNP maps of the invention can be identified or generated by hybridizing sample nucleic acids, e.g., DNA or RNA, to high density arrays or bead arrays containing oligonucleotide probes corresponding to the polymorphisms of Tables 5-37 (see the Affymetrix arrays and Illumina bead sets at www.affymetrix.com and www.illumina.com and see Cronin et al., 1996; or Kozal et al., 1996).

[0333] Methods of forming high density arrays of oligonucleotides with a minimal number of synthetic steps are known. The oligonucleotide analogue array can be synthesized on a single or on multiple solid substrates by a variety of methods, including, but not limited to, light-directed chemical coupling, and mechanically directed coupling (see Pirrung, U.S. Pat. No. 5,143,854).

[0334] In brief, the light-directed combinatorial synthesis of oligonucleotide arrays on a glass surface precedes using automated phosphoramidite chemistry and chip masking techniques. In one specific implementation, a glass surface is derivatized with a silane reagent containing a functional group, e.g., a hydroxyl or amine group blocked by a photolabile protecting group. Photolysis through a photolithogaphic mask is used selectively to expose functional groups which are then ready to react with incoming 5′ photoprotected nucleoside phosphoramidites. The phosphoramidites react only with those sites which are illuminated (and thus exposed by removal of the photolabile blocking group). Thus, the phosphoramidites only add to those areas selectively exposed from the preceding step. These steps are repeated until the desired array of sequences have been synthesized on the solid surface. Combinatorial synthesis of different oligonucleotide analogues at different locations on the array is determined by the pattern of illumination during synthesis and the order of addition of coupling reagents.

[0335] In addition to the foregoing, additional methods which can be used to generate an array of oligonucleotides on a single substrate are described in PCT Publication Nos. WO 93/09668 and WO 01/23614. High density nucleic acid arrays can also be fabricated by depositing pre-made or natural nucleic acids in predetermined positions. Synthesized or natural nucleic acids are deposited on specific locations of a substrate by light directed targeting and oligonucleotide directed targeting. Another embodiment uses a dispenser that moves from region to region to deposit nucleic acids in specific spots.

[0336] Nucleic acid hybridization simply involves contacting a probe and target nucleic acid under conditions where the probe and its complementary target can form stable hybrid duplexes through complementary base pairing. See WO 99/32660. The nucleic acids that do not form hybrid duplexes are then washed away leaving the hybridized nucleic acids to be detected, typically through detection of an attached detectable label. It is generally recognized that nucleic acids are denatured by increasing the temperature or decreasing the salt concentration of the buffer containing the nucleic acids. Under low stringency conditions (e.g., low temperature and/or high salt) hybrid duplexes (e.g., DNA:DNA, RNA:RNA, or RNA:DNA) will form even where the annealed sequences are not perfectly complementary. Thus, specificity of, hybridization is reduced at lower stringency. Conversely, at higher stringency (e.g., higher temperature or lower salt) successful hybridization tolerates fewer mismatches. One of skill in the art will appreciate that hybridization conditions may be selected to provide any degree of stringency.

[0337] In a preferred embodiment, hybridization is performed at low stringency to ensure hybridization and then subsequent washes are performed at higher stringency to eliminate mismatched hybrid duplexes. Successive washes may be performed at increasingly higher stringency until a desired level of hybridization specificity is obtained. Stringency can also be increased by addition of agents such as formamide. Hybridization specificity may be evaluated by comparison of hybridization to the test probes with hybridization to the various controls that can be present (e.g., expression level control, normalization control, mismatch controls, etc.).

[0338] In general, there is a tradeoff between hybridization specificity (stringency) and signal intensity. Thus, in a preferred embodiment, the wash is performed at the highest stringency that produces consistent results and that provides a signal intensity greater than approximately 10% of the background intensity. Thus, in a preferred embodiment, the hybridized array may be washed at successively higher stringency solutions and read between each wash. Analysis of the data sets thus produced will reveal a wash stringency above which the hybridization pattern is not appreciably altered and which provides adequate signal for the particular oligonucleotide probes of interest.

[0339] Probes based on the sequences of the genes described above may be prepared by any commonly available method. Oligonucleotide probes for screening or assaying a tissue or cell sample are preferably of sufficient length to specifically hybridize only to appropriate, complementary genes or transcripts. Typically the oligonucleotide probes will be at least about 10, 12, 14, 16, 18, 20 or 25 nucleotides in length. In some cases, longer probes of at least 30, 40, or 50 nucleotides will be desirable.

[0340] As used herein, oligonucleotide sequences that are complementary to one or more of the genes or gene fragments described in Tables 2-4 refer to oligonucleotides that are capable of hybridizing under stringent conditions to at least part of the nucleotide sequences of said genes. Such hybridizable oligonucleotides will typically exhibit at least about 75% sequence identity at the nucleotide level to said genes, preferably about 80% or 85% sequence identity or more preferably about 90% or 95% or more sequence identity to said genes (see GeneChip® Expression Analysis Manual, Affymetrix, Rev. 3, which is herein incorporated by reference in its entirety).

[0341] The phrase “hybridizing specifically to” or “specifically hybridizes” refers to the binding, duplexing, or hybridizing of a molecule substantially to or only to a particular nucleotide sequence or sequences under stringent conditions when that sequence is present in a complex mixture (e.g., total cellular) DNA or RNA.

[0342] As used herein a “probe” is defined as a nucleic acid, capable of binding to a target nucleic acid of complementary sequence through one or more types of chemical bonds, usually through complementary base pairing, usually through hydrogen bond formation. As used herein, a probe may include natural (i.e., A, G, U, C, or T) or modified bases (7-deazaguanosine, inosine, etc.). In addition, the bases in probes may be joined by a linkage other than a phosphodiester bond, so long as it does not interfere with hybridization. Thus, probes may be peptide nucleic acids in which the constituent bases are joined by peptide bonds rather than phosphodiester linkages.

[0343] A variety of sequencing reactions known in the art can be used to directly sequence nucleic acids for the presence or the absence of one or more polymorphisms of Tables 5-37. Examples of sequencing reactions include those based on techniques developed by Maxam and Gilbert (1977) or Sanger (1977). It is also contemplated that any of a variety of automated sequencing procedures can be utilized, including sequencing by mass spectrometry (see, e.g. PCT International Publication No. WO 94/16101; Cohen et al., 1996; and Griffin et al., 1993), real-time pyrophosphate sequencing method (Ronaghi et al., 1998; and Permutt et al., 2001) and sequencing by hybridization (see e.g. Drmanac et al., 2002).

[0344] Other methods of detecting polymorphisms include methods in which protection from cleavage agents is used to detect mismatched bases in RNA/RNA, DNA/DNA or RNA/DNA heteroduplexes (Myers et al., 1985). In general, the technique of “mismatch cleavage” starts by providing heteroduplexes formed by hybridizing (labeled) RNA or DNA containing a wild-type sequence with potentially mutant RNA or DNA obtained from a sample. The double-stranded duplexes are treated with an agent who cleaves single-stranded regions of the duplex such as which will exist due to basepair mismatches between the control and sample strands. For instance, RNA/DNA duplexes can be treated with RNase and DNA/DNA hybrids treated with S1 nuclease to enzymatically digest the mismatched regions. In other embodiments, either DNA/DNA or RNA/DNA duplexes can be treated with hydroxylamine or osmium tetroxide and with piperidine in order to digest mismatched regions. After digestion of the mismatched regions, the resulting material is then separated by size on denaturing polyacrylamide gels to determine the site of a mutation or SNP (see, for example, Cotton et al., 1988; and Saleeba et al., 1992). In a preferred embodiment, the control DNA or RNA can be labeled for detection.

[0345] In still another embodiment, the mismatch cleavage reaction employs one or more proteins that recognize mismatched base pairs in double-stranded DNA (so called “DNA mismatch repair” enzymes) in defined systems for detecting and mapping polymorphisms. For example, the mutY enzyme of E. coli cleaves A at G/A mismatches (Hsu et al., 1994). Other examples include, but are not limited to, the MutHLS enzyme complex of E. coli (Smith and Modrich Proc. 1996) and Cel 1 from the celery (Kulinski et al., 2000) both cleave the DNA at various mismatches. According to an exemplary embodiment, a probe based on a polymorphic site corresponding to a polymorphism of Tables 5-37 is hybridized to a cDNA or other DNA product from a test cell or cells. The duplex is treated with a DNA mismatch repair enzyme, and the cleavage products, if any, can be detected from electrophoresis protocols or the like. See, for example, U.S. Pat. No. 5,459,039. Alternatively, the screen can be performed in vivo following the insertion of the heteroduplexes in an appropriate vector. The whole procedure is known to those ordinary skilled in the art and is referred to as mismatch repair detection (see e.g. Fakhrai-Rad et al., 2004).

[0346] In other embodiments, alterations in electrophoretic mobility can be used to identify polymorphisms in a sample. For example, single strand conformation polymorphism (SSCP) analysis can be used to detect differences in electrophoretic mobility between mutant and wild type nucleic acids (Orita et al., 1989; Cotton et al., 1993; and Hayashi 1992). Single-stranded DNA fragments of case and control nucleic acids will be denatured and allowed to renature. The secondary structure of single-stranded nucleic acids varies according to sequence. The resulting alteration in electrophoretic mobility enables the detection of even a single base change. The DNA fragments may be labeled or detected with labeled probes. The sensitivity of the assay may be enhanced by using RNA (rather than DNA), in which the secondary structure is more sensitive to a change in sequence. In a preferred embodiment, the method utilizes heteroduplex analysis to separate double stranded heteroduplex molecules on the basis of changes in electrophoretic mobility (Kee et al., 1991).

[0347] In yet another embodiment, the movement of mutant or wild-type fragments in a polyacrylamide gel containing a gradient of denaturant is assayed using denaturing gradient gel electrophoresis (DGGE) (Myers et a, 1985). When DGGE is used as the method of analysis, DNA will be modified to insure that it does not completely denature, for example by adding a GC clamp of approximately 40 by of high-melting GC-rich DNA by PCR. In a further embodiment, a temperature gradient is used in place of a denaturing gradient to identify differences in the mobility of control and sample DNA (Rosenbaum et al., 1987). In another embodiment, the mutant fragment is detected using denaturing HPLC (see e.g. Hoogendoom et al., 2000).

[0348] Examples of other techniques for detecting polymorphisms include, but are not limited to, selective oligonucleotide hybridization, selective amplification, selective primer extension, selective ligation, single-base extension, selective termination of extension or invasive cleavage assay. For example, oligonucleotide primers may be prepared in which the polymorphism is placed centrally and then hybridized to target DNA under conditions which permit hybridization only if a perfect match is found (Saiki et al., 1986; Saiki et al., 1989). Such oligonucleotides are hybridized to PCR amplified target DNA or a number of different mutations when the oligonucleotides are attached to the hybridizing membrane and hybridized with labeled target DNA. Alternatively, the amplification, the allele-specific hybridization and the detection can be done in a single assay following the principle of the 5′ nuclease assay (e.g. see Livak et al., 1995). For example, the associated allele, a particular allele of a polymorphic locus, or the like is amplified by PCR in the presence of both allele-specific oligonucleotides, each specific for one or the other allele. Each probe has a different fluorescent dye at the 5′ end and a quencher at the 3′ end. During PCR, if one or the other or both allele-specific oligonucleotides are hybridized to the template, the Taq polymerase via its 5′ exonuclease activity will release the corresponding dyes. The latter will thus reveal the genotype of the amplified product.

[0349] Hybridization assays may also be carried out with a temperature gradient following the principle of dynamic allele-specific hybridization or like e.g. Jobs et al., (2003); and Bourgeois and Labuda, (2004). For example, the hybridization is done using one of the two allele-specific oligonucleotides labeled with a fluorescent dye, and an intercalating quencher under a gradually increasing temperature. At low temperature, the probe is hybridized to both the mismatched and full-matched template. The probe melts at a lower temperature when hybridized to the template with a mismatch. The release of the probe is captured by an emission of the fluorescent dye, away from the quencher. The probe melts at a higher temperature when hybridized to the template with no mismatch. The temperature-dependent fluorescence signals therefore indicate the absence or presence of an associated allele, a particular allele of a polymorphic locus, or the like (e.g. Jobs et al., 2003). Alternatively, the hybridization is done under a gradually decreasing temperature. In this case, both allele-specific oligonucleotides are hybridized to the template competitively. At high temperature none of the two probes are hybridized. Once the optimal temperature of the full-matched probe is reached, it hybridizes and leaves no target for the mismatched probe (e.g. Bourgeois and Labuda, 2004). In the latter case, if the allele-specific probes are differently labeled, then they are hybridized to a single PCR-amplified target. If the probes are labeled with the same dye, then the probe cocktail is hybridized twice to identical templates with only one labeled probe, different in the two cocktails, in the presence of the unlabeled competitive probe.

[0350] Alternatively, allele specific amplification technology that depends on selective PCR amplification may be used in conjunction with the present invention. Oligonucleotides used as primers for specific amplification may carry the associated allele, a particular allele of a polymorphic locus, or the like, also referred to as “mutation” of interest in the center of the molecule, so that amplification depends on differential hybridization (Gibbs et al., 1989) or at the extreme 3′ end of one primer where, under appropriate conditions, mismatch can prevent, or reduce polymerase extension (Prossner, 1993). In addition it may be desirable to introduce a novel restriction site in the region of the mutation to create cleavage-based detection (Gasparini et al., 1992). It is anticipated that in certain embodiments, amplification may also be performed using Taq ligase for amplification (Barany, 1991). In such cases, ligation will occur only if there is a perfect match at the 3′ end of the 5′ sequence making it possible to detect the presence of a known associated allele, a particular allele of a polymorphic locus, or the like at a specific site by looking for the presence or absence of amplification. The products of such an oligonucleotide ligation assay can also be detected by means of gel electrophoresis. Furthermore, the oligonucleotides may contain universal tags used in PCR amplification and zip code tags that are different for each allele. The zip code tags are used to isolate a specific, labeled oligonucleotide that may contain a mobility modifier (e.g. Grossman et al., 1994).

[0351] In yet another alternative, allele-specific elongation followed by ligation will form a template for PCR amplification. In such cases, elongation will occur only if there is a perfect match at the 3′ end of the allele-specific oligonucleotide using a DNA polymerase. This reaction is performed directly on the genomic DNA and the extension/ligation products are amplified by PCR. To this end, the oligonucleotides contain universal tags allowing amplification at a high multiplex level and a zip code for SNP identification. The PCR tags are designed in such a way that the two alleles of a SNP are amplified by different forward primers, each having a different dye. The zip code tags are the same for both alleles of a given SNPs and they are used for hybridization of the PCR-amplified products to oligonucleotides bound to a solid support, chip, bead array or like. For an example of the procedure, see Fan et al. (Cold Spring Harbor Symposia on Quantitative Biology, Vol. LXVIII, pp. 69-78 2003).

[0352] Another alternative includes the single-base extension/ligation assay using a molecular inversion probe, consisting of a single, long oligonucleotide (see e.g. Hardenbol et al., 2003). In such an embodiment, the oligonucleotide hybridizes on both side of the SNP locus directly on the genomic DNA, leaving a one-base gap at the SNP locus. The gap-filling, one-base extension/ligation is performed in four tubes, each having a different dNTP. Following this reaction, the oligonucleotide is circularized whereas unreactive, linear oligonucleotides are degraded using an exonuclease such as exonuclease I of E. coli. The circular oligonucleotides are then linearized and the products are amplified and labeled using universal tags on the oligonucleotides. The original oligonucleotide also contains a SNP-specific zip code allowing hybridization to oligonucleotides bound to a solid support, chip, and bead array or like. This reaction can be performed at a high multiplexed level.

[0353] In another alternative, the associated allele, a particular allele of a polymorphic locus, or the like is scored by single-base extension (see e.g. U.S. Pat. No. 5,888,819). The template is first amplified by PCR. The extension oligonucleotide is then hybridized next to the SNP locus and the extension reaction is performed using a thermostable polymerase such as ThermoSequenase (GE Healthcare) in the presence of labeled ddNTPs. This reaction can therefore be cycled several times. The identity of the labeled ddNTP incorporated will reveal the genotype at the SNP locus. The labeled products can be detected by means of gel electrophoresis, fluorescence polarization (e.g. Chen et al., 1999) or by hybridization to oligonucleotides bound to a solid support, chip, and bead array or like. In the latter case, the extension oligonucleotide will contain a SNP-specific zip code tag.

[0354] In yet another alternative, a SNP is scored by selective termination of extension. The template is first amplified by PCR and the extension oligonucleotide hybridizes in the vicinity of the SNP locus, close to but not necessarily adjacent to it. The extension reaction is carried out using a thermostable polymerase such as ThermoSequenase (GE Healthcare) in the presence of a mix of dNTPs and at least one ddNTP. The latter has to terminate the extension at one of the allele of the interrogated SNP, but not both such that the two alleles will generate extension products of different sizes. The extension product can then be detected by means of gel electrophoresis, in which case the extension products need to be labeled, or by mass spectrometry (see e.g. Storm et al., 2003).

[0355] In another alternative, SNPs are detected using an invasive cleavage assay (see U.S. Pat. No. 6,090,543). There are five oligonucleotides per SNP to interrogate but these are used in a two step-reaction. During the primary reaction, three of the designed oligonucleotides are first hybridized directly to the genomic DNA. One of them is locus-specific and hybridizes up to the SNP locus (the pairing of the 3′ base at the SNP locus is not necessary). There are two allele-specific oligonucleotides that hybridize in tandem to the locus-specific probe but also contain a 5′ flap that is specific for each allele of the SNP. Depending upon hybridization of the allele-specific oligonucleotides at the base of the SNP locus, this creates a structure that is recognized by a cleavase enzyme (U.S. Pat. No. 6,090,606) and the allele-specific flap is released. During the secondary reaction, the flap fragments hybridize to a specific cassette to recreate the same structure as above except that the cleavage will release a small DNA fragment labeled with a fluorescent dye that can be detected using regular fluorescence detector. In the cassette, the emission of the dye is inhibited by a quencher.

Methods to Identify Agents that Modulate the Expression of a Nucleic Acid Encoding a Gene Involved in ADHD

[0356] The present invention provides methods for identifying agents that modulate the expression of a nucleic acid encoding a gene from Tables 2-4. Such methods may utilize any available means of monitoring for changes in the expression level of the nucleic acids of the invention. As used herein, an agent is said to modulate the expression of a nucleic acid of the invention if it is capable of up- or down-regulating expression of the nucleic acid in a cell. Such cells can be obtained from any parts of the body such as the hair, mouth, rectum, scalp, blood, dermis, epidermis, skin cells, cutaneous surfaces, intertrigious areas, genitalia and fluids, vessels and endothelium. Some non-limiting examples of cells that can be used are: muscle cells, nervous cells, blood and vessels cells, T cell, mast cell, lymphocyte, monocyte, macrophage, and epithelial cells.

[0357] In one assay format, the expression of a nucleic acid encoding a gene of the invention (see Tables 2-4) in a cell or tissue sample is monitored directly by hybridization to the nucleic acids of the invention. Cell lines or tissues are exposed to the agent to be tested under appropriate conditions and time and total RNA or mRNA is isolated by standard procedures such as those disclosed in Sambrook et al., (1989) Molecular Cloning: A Laboratory Manual, Cold Spring Harbor Laboratory Press).

[0358] Probes to detect differences in RNA expression levels between cells exposed to the agent and control cells may be prepared as described above. Hybridization conditions are modified using known methods, such as those described by Sambrook et al., and Ausubel et al., as required for each probe. Hybridization of total cellular RNA or RNA enriched for polyA RNA can be accomplished in any available format. For instance, total cellular RNA or RNA enriched for polyA RNA can be affixed to a solid support and the solid support exposed to at least one probe comprising at least one, or part of one of the sequences of the invention under conditions in which the probe will specifically hybridize. Alternatively, nucleic acid fragments comprising at least one, or part of one of the sequences of the invention can be affixed to a solid support, such as a silicon chip or a porous glass wafer. The chip or wafer can then be exposed to total cellular RNA or polyA RNA from a sample under conditions in which the affixed sequences will specifically hybridize to the RNA. By examining for the ability of a given probe to specifically hybridize to an RNA sample from an untreated cell population and from a cell population exposed to the agent, agents which up or down regulate expression are identified.

Methods to Identify Agents that Modulate the Activity of a Protein Encoded by a Gene Involved in ADHD Disease and Antibodies of the Invention

[0359] The present invention provides methods for identifying agents that modulate at least one activity of the proteins described in Tables 2-4. Such methods may utilize any means of monitoring or detecting the desired activity. As used herein, an agent is said to modulate the expression of a protein of the invention if it is capable of up- or down-regulating expression of the protein in a cell. Such cells can be obtained from any parts of the body such as the hair, mouth, rectum, scalp, blood, dermis, epidermis, skin cells, cutaneous surfaces, intertrigious areas, genitalia and fluids, vessels and endothelium. Some non-limiting examples of cells that can be used are: muscle cells, nervous cells, blood and vessels cells, T cell, mast cell, lymphocyte, monocyte, macrophage, and epithelial cells.

[0360] In one format, the specific activity of a protein of the invention, normalized to a standard unit, may be assayed in a cell population that has been exposed to the agent to be tested and compared to an unexposed control cell population. Cell lines or populations are exposed to the agent to be tested under appropriate conditions and times. Cellular lysates may be prepared from the exposed cell line or population and a control, unexposed cell line or population. The cellular lysates are then analyzed with a probe, such as an antibody probe.

[0361] Antibodies and Antibody probes can be prepared by immunizing suitable mammalian hosts (e.g. mice or transgenic mice) utilizing appropriate immunization protocols using the proteins of the invention or antigen-containing fragments thereof. To enhance immunogenicity for immunization protocols, these proteins or fragments can be conjugated to suitable carriers. Methods for preparing immunogenic conjugates with carriers such as BSA, KLH or other carrier proteins are well known in the art. In some circumstances, direct conjugation using, for example, carbodiimide reagents may be effective; in other instances linking reagents such as those supplied by Pierce Chemical Co. (Rockford, Ill.) may be desirable to provide accessibility to the hapten. The hapten peptides can be extended at either the amino or carboxy terminus with a cysteine residue or interspersed with cysteine residues, for example, to facilitate linking to a carrier. Administration of the immunogens is conducted generally by injection over a suitable time period and with use of suitable adjuvants, as is generally understood in the art. During the immunization schedule, titers of antibodies are taken to determine adequacy of antibody formation. While the polyclonal antisera produced in this way may be satisfactory for some applications, for pharmaceutical compositions, use of monoclonal preparations is preferred. Immortalized cell lines which secrete the desired monoclonal antibodies may be prepared using standard methods, see e.g., Kohler & Milstein (1992) or modifications which affect immortalization of lymphocytes or spleen cells, as is generally known. The immortalized cell lines secreting the desired antibodies can be screened by immunoassay in which the antigen is the peptide hapten, polypeptide or protein. When the appropriate immortalized cell culture secreting the desired antibody is identified, the cells can be cultured either in vitro or by production in ascites fluid. The desired monoclonal antibodies may be recovered from the culture supernatant or from the ascites supernatant. Fragments of the monoclonal antibodies or the polyclonal antisera which contain the immunologically significant portion(s) can be used as antagonists, as well as the intact antibodies. Use of immunologically reactive fragments, such as Fab or Fab′ fragments, is often preferable, especially in a therapeutic context, as these fragments are generally less immunogenic than the whole immunoglobulin. The antibodies or fragments may also be produced, using current technology, by recombinant means. The antibody chains (light and heavy) may be cloned into the vector by methods known in the art. Specific antibody regions that bind specifically to the desired regions of the protein can also be produced in the context of chimeras derived from multiple species. Antibody regions that bind specifically to the desired regions of the protein can also be produced in the context of chimeras from multiple species, for instance, humanized antibodies. The antibody can therefore be a humanized antibody or a human antibody, as described in U.S. Pat. No. 5,585,089 or Riechmann et al. (1988).

[0362] Phage display techniques can be used to provide libraries containing a repertoire of antibodies with varying affinities for proteins, or fragments thereof, described in Tables 2-4. Techniques for the identification of high affinity human antibodies from such libraries are described by Griffiths et al., EMBO J., 13:3245-3260 (1994); Nissim et al., ibid, pp. 692-698 and by Griffiths et al., ibid, 12:725-734. The antibody of the invention also comprise humanized and human antibodies. Such antibodies are mage by methods known in the art.

[0363] Agents that are assayed in the above method can be randomly selected or rationally selected or designed. As used herein, an agent is said to be randomly selected when the agent is chosen randomly without considering the specific sequences involved in the association of the protein of the invention alone or with its associated substrates, binding partners, etc. An example of randomly selected agents is the use of a chemical library or a peptide combinatorial library, or a growth broth of an organism. As used herein, an agent is said to be rationally selected or designed when the agent is chosen on a non-random basis which takes into account the sequence of the target site or its conformation in connection with the agent's action. Agents can be rationally selected or rationally designed by utilizing the peptide sequences that make up these sites. For example, a rationally selected peptide agent can be a peptide whose amino acid sequence is identical to or a derivative of any functional consensus site. The agents of the present invention can be, as examples, oligonucleotides, antisense polynucleotides, interfering RNA, peptides, peptide mimetics, antibodies, antibody fragments, small molecules, vitamin derivatives, as well as carbohydrates. Peptide agents of the invention can be prepared using standard solid phase (or solution phase) peptide synthesis methods, as is known in the art. In addition, the DNA encoding these peptides may be synthesized using commercially available oligonucleotide synthesis instrumentation and produced recombinantly using standard recombinant production systems. The production using solid phase peptide synthesis is necessitated if non-gene-encoded amino acids are to be included.

[0364] Another class of agents of the present invention includes antibodies or fragments thereof that bind to a protein encoded by a gene in Tables 2-4. Antibody agents can be obtained by immunization of suitable mammalian subjects with peptides, containing as antigenic regions, those portions of the protein intended to be targeted by the antibodies (see section above of antibodies as probes for standard antibody preparation methodologies).

[0365] In yet another class of agents, the present invention includes peptide mimetics that mimic the three-dimensional structure of the protein encoded by a gene from Tables 2-4. Such peptide mimetics may have significant advantages over naturally occurring peptides, including, for example: more economical production, greater chemical stability, enhanced pharmacological properties (half-life, absorption, potency, efficacy, etc.), altered specificity (e.g., a broad-spectrum of biological activities), reduced antigenicity and others. In one form, mimetics are peptide-containing molecules that mimic elements of protein secondary structure. The underlying rationale behind the use of peptide mimetics is that the peptide backbone of proteins exists chiefly to orient amino acid side chains in such a way as to facilitate molecular interactions, such as those of antibody and antigen. A peptide mimetic is expected to permit molecular interactions similar to the natural molecule. In another form, peptide analogs are commonly used in the pharmaceutical industry as non-peptide drugs with properties analogous to those of the template peptide. These types of non-peptide compounds are also referred to as peptide mimetics or peptidomimetics (Fauchere, 1986; Veber & Freidinger, 1985; Evans et al., 1987) which are usually developed with the aid of computerized molecular modeling. Peptide mimetics that are structurally similar to therapeutically useful peptides may be used to produce an equivalent therapeutic or prophylactic effect. Generally, peptide mimetics are structurally similar to a paradigm polypeptide (i.e., a polypeptide that has a biochemical property or pharmacological activity), but have one or more peptide linkages optionally replaced by a linkage using methods known in the art. Labeling of peptide mimetics usually involves covalent attachment of one or more labels, directly or through a spacer (e.g., an amide group), to non-interfering position(s) on the peptide mimetic that are predicted by quantitative structure-activity data and molecular modeling. Such non-interfering positions generally are positions that do not form direct contacts with the macromolecule(s) to which the peptide mimetic binds to produce the therapeutic effect. Derivitization (e.g., labeling) of peptide mimetics should not substantially interfere with the desired biological or pharmacological activity of the peptide mimetic. The use of peptide mimetics can be enhanced through the use of combinatorial chemistry to create drug libraries. The design of peptide mimetics can be aided by identifying amino acid mutations that increase or decrease binding of the protein to its binding partners. Approaches that can be used include the yeast two hybrid method (see Chien et al., 1991) and the phage display method. The two hybrid method detects protein-protein interactions in yeast (Fields et al., 1989). The phage display method detects the interaction between an immobilized protein and a protein that is expressed on the surface of phages such as lambda and M13 (Amberg et al., 1993; Hogrefe et al., 1993). These methods allow positive and negative selection for protein-protein interactions and the identification of the sequences that determine these interactions.

### Method to Diagnose ADHD

[0366] The present invention also relates to methods for diagnosing ADHD or a related disease, preferably a subtype of ADHD, a predisposition to such a disease and/or disease progression. In some methods, the steps comprise contacting a target sample with (a) nucleic acid molecule(s) or fragments thereof and comparing the concentration of individual mRNA(s) with the concentration of the corresponding mRNA(s) from at least one healthy donor. An aberrant (increased or decreased) mRNA level of at least one gene from Tables 2-4, at least 5 or 10 genes from Tables 2-4, at least 50 genes from Tables 2-4, at least 100 genes from Tables 2-4 or at least 200 genes from Tables 2-4 determined in the sample in comparison to the control sample is an indication of ADHD disease or a related subtype or a disposition to such kinds of diseases. For diagnosis, samples are, preferably, obtained from any parts of the body such as the hair, mouth, rectum, scalp, blood, dermis, epidermis, skin cells, cutaneous surfaces, intertrigious areas, genitalia and fluids, vessels and endothelium. Some non-limiting examples of cells that can be used are: muscle cells, nervous cells, blood and vessels cells, T cell, mast cell, lymphocyte, monocyte, macrophage, and epithelial cells.

[0367] For analysis of gene expression, total RNA is obtained from cells according to standard procedures and, preferably, reverse-transcribed. Preferably, a DNAse treatment (in, order to get rid of contaminating genomic DNA) is performed.

[0368] The nucleic acid molecule or fragment is typically a nucleic acid probe for hybridization or a primer for PCR. The person skilled in the art is in a position to design suitable nucleic acids probes based on the information provided in the Tables of the present invention. The target cellular component, i.e. mRNA, e.g., in brain tissue, may be detected directly in situ, e.g. by in situ hybridization or it may be isolated from other cell components by common methods known to those skilled in the art before contacting with a probe. Detection methods include Northern blot analysis, RNase protection, in situ methods, e.g. in situ hybridization, in vitro amplification methods (PCR, LCR, QRNA replicase or RNA-transcription/amplification (TAS, 3SR), reverse dot blot disclosed in EP-B10237362) and other detection assays that are known to those skilled in the art. Products obtained by in vitro amplification can be detected according to established methods, e.g. by separating the products on agarose or polyacrylamide gels and by subsequent staining with ethidium bromide or any other dye or reagent. Alternatively, the amplified products can be detected by using labeled primers for amplification or labeled dNTPs. Preferably, detection is based on a microarray.

[0369] The probes (or primers) (or, alternatively, the reverse-transcribed sample mRNAs) can be detectably labeled, for example, with a radioisotope, a bioluminescent compound, a chemiluminescent compound, a fluorescent compound, a metal chelate, or an enzyme.

[0370] The present invention also relates to the use of the nucleic acid molecules or fragments described above for the preparation of a diagnostic composition for the diagnosis of ADHD or a subtype or predisposition to such a disease.

[0371] The present invention also relates to the use of the nucleic acid molecules of the present invention for the isolation or development of a compound which is useful for therapy of ADHD. For example, the nucleic acid molecules of the invention and the data obtained using said nucleic acid molecules for diagnosis of ADHD might allow for the identification of further genes which are specifically dysregulated, and thus may be considered as potential targets for therapeutic interventions. Furthermore, such diagnostic might also be used for selection of patients that might respond positively or negatively to a potential target for therapeutic interventions (as for the pharmacogenomics and personalized medicine concept well know in the art; see prognostic assays text below).

[0372] The invention further provides prognostic assays that can be used to identify subjects having or at risk of developing ADHD. In such method, a test sample is obtained from a subject and the amount and/or concentration of the nucleic acid described in Tables 2-4 is determined; wherein the presence of an associated allele, a particular allele of a polymorphic locus, or the likes in the nucleic acids sequences of this invention (see SEQ ID from Tables 5-37) can be diagnostic for a subject having or at risk of developing ADHD. As used herein, a “test sample” refers to a biological sample obtained from a subject of interest. For example, a test sample can be a biological fluid, a cell sample, or tissue. A biological fluid can be, but is not limited to saliva, serum, mucus, urine, stools, spermatozoids, vaginal secretions, lymph, amniotic liquid, pleural liquid and tears. Cells can be, but are not limited to: hair cells, muscle cells, nervous cells, blood and vessels cells, dermis, epidermis and other skin cells, and various brain cells.

[0373] Furthermore, the prognostic assays described herein can be used to determine whether a subject can be administered an agent (e.g., an agonist, antagonist, peptidomimetic, polypeptide, nucleic acid such as antisense DNA or interfering RNA (RNAi), small molecule or other drug candidate) to treat ADHD. Specifically, these assays can be used to predict whether an individual will have an efficacious response or will experience adverse events in response to such an agent. For example, such methods can be used to determine whether a subject can be effectively treated with an agent that modulates the expression and/or activity of a gene from Tables 2-4 or the nucleic acids described herein. In another example, an association study may be performed to identify polymorphisms from Tables 5-37 that are associated with a given response to the agent, e.g., an efficacious response or the likelihood of one or more adverse events. Thus, one embodiment of the present invention provides methods for determining whether a subject can be effectively treated with an agent for a disease associated with aberrant expression or activity of a gene from Tables 2-4 in which a test sample is obtained and nucleic acids or polypeptides from Tables 2-4 are detected (e.g., wherein the presence of a particular level of expression of a gene from Tables 2-4 or a particular allelic variant of such gene, such as polymorphisms from Tables 5-37 is diagnostic for a subject that can be administered an agent to treat a disorder such as ADHD). In one embodiment, the method includes obtaining a sample from a subject suspected of having ADHD or an affected individual and exposing such sample to an agent. The expression and/or activity of the nucleic acids and/or genes of the invention are monitored before and after treatment with such agent to assess the effect of such agent. After analysis of the expression values, one skilled in the art can determine whether such agent can effectively treat such subject. In another embodiment, the method includes obtaining a sample from a subject having or susceptible to developing ADHD and determining the allelic constitution of polymorphisms from Tables 5-37 that are associated with a particular response to an agent. After analysis of the allelic constitution of the individual at the associated polymorphisms, one skilled in the art can determine whether such agent can effectively treat such subject.

[0374] The methods of the invention can also be used to detect genetic alterations in a gene from Tables 2-4, thereby determining if a subject with the lesioned gene is at risk for a disease associated with ADHD. In preferred embodiments, the methods include detecting, in a sample of cells from the subject, the presence or absence of a genetic alteration characterized by at least one alteration linked to or affecting the integrity of a gene from Tables 2-4 encoding a polypeptide or the misexpression of such gene. For example, such genetic alterations can be detected by ascertaining the existence of at least one of: (1) a deletion of one or more nucleotides from a gene from Tables 2-4; (2) an addition of one or more nucleotides to a gene from Tables 2-4; (3) a substitution of one or more nucleotides of a gene from Tables 2-4; (4) a chromosomal rearrangement of a gene from Tables 2-4; (5) an alteration in the level of a messenger RNA transcript of a gene from Tables 2-4; (6) aberrant modification of a gene from Tables 2-4, such as of the methylation pattern of the genomic DNA, (7) the presence of a non-wild type splicing pattern of a messenger RNA transcript of a gene from Tables 2-4; (8) inappropriate post-translational modification of a polypeptide encoded by a gene from Tables 2-4; and (9) alternative promoter use. As described herein, there are a large number of assay techniques known in the art which can be used for detecting alterations in a gene from Tables 2-4. A preferred biological sample is a peripheral blood sample obtained by conventional means from a subject. Another preferred biological sample is a buccal swab. Other biological samples can be, but are not limited to, urine, stools, spermatozoids, vaginal secretions, lymph, amniotic liquid, pleural liquid and tears.

[0375] In certain embodiments, detection of the alteration involves the use of a probe/primer in a polymerase chain reaction (PCR) (see, e.g., U.S. Pat. Nos. 4,683,195 and 4,683,202), such as anchor PCR or RACE PCR, or alternatively, in a ligation chain reaction (LCR) (see, e.g., Landegran et al., 1988; and Nakazawa et al., 1994), the latter of which can be particularly useful for detecting point mutations in a gene from Tables 2-4 (see Abavaya et al., 1995). This method can include the steps of collecting a sample of cells from a patient, isolating nucleic acid (e.g., genomic DNA, mRNA, or both) from the cells of the sample, contacting the nucleic acid sample with one or more primers which specifically hybridize to a gene from Tables 2-4 under conditions such that hybridization and amplification of the nucleic acid from Tables 2-4 (if present) occurs, and detecting the presence or absence of an amplification product, or detecting the size of the amplification product and comparing the length to a control sample. PCR and/or LCR may be desirable to use as a preliminary amplification step in conjunction with some of the techniques used for detecting a mutation, an associated allele, a particular allele of a polymorphic locus, or the like described in the above sections. Other mutation detection and mapping methods are described in previous sections of the detailed description of the present invention.

[0376] The present invention also relates to further methods for diagnosing ADHD or a related disorder or subtype, a predisposition to such a disorder and/or disorder progression. In some methods, the steps comprise contacting a target sample with (a) nucleic molecule(s) or fragments thereof and determining the presence or absence of a particular allele of a polymorphism that confers a disorder-related phenotype (e.g., predisposition to such a disorder and/or disorder progression). The presence of at least one allele from Tables 5-37 that is associated with ADHD (“associated allele”), at least 5 or 10 associated alleles from Tables 5-37, at least 50 associated alleles from Tables 5-37 at least 100 associated alleles from Tables 5-37, or at least 200 associated alleles from Tables 5-37 determined in the sample is an indication of ADHD disease or a related disorder, a disposition or predisposition to such kinds of disorders, or a prognosis for such disorder progression. Such samples and cells can be obtained from any parts of the body such as the hair, mouth, rectum, scalp, blood, dermis, epidermis, skin cells, cutaneous surfaces, intertrigious areas, genitalia and fluids, vessels and endothelium. Some non-limiting examples of cells that can be used are: muscle cells, nervous cells, blood and vessels cells, T cell, mast cell, lymphocyte, monocyte, macrophage, and epithelial cells.

[0377] In other embodiments, alterations in a gene from Tables 2-4 can be identified by hybridizing sample and control nucleic acids, e.g., DNA or RNA, to high density arrays or bead arrays containing tens to thousands of oligonucleotide probes (Cronin et al., 1996; Kozal et al., 1996). For example, alterations in a gene from Tables 2-4 can be identified in two dimensional arrays containing light-generated DNA probes as described in Cronin et al., (1996). Briefly, a first hybridization array of probes can be used to scan through long stretches of DNA in a sample and control to identify base changes between the sequences by making linear arrays of sequential overlapping probes. This step allows the identification of point mutations, associated alleles, particular alleles of a polymorphic locus, or the like. This step is followed by a second hybridization array that allows the characterization of specific mutations by using smaller, specialized probe arrays complementary to all variants, mutations, alleles detected. Each mutation array is composed of parallel probe sets, one complementary to the wild-type gene and the other complementary to the mutant gene.

[0378] In yet another embodiment, any of a variety of sequencing reactions known in the art can be used to directly sequence a gene from Tables 2-4 and detect an associated allele, a particular allele of a polymorphic locus, or the like by comparing the sequence of the sample gene from Tables 2-4 with the corresponding wild-type (control) sequence (see text described in previous sections for various sequencing techniques and other methods of detecting an associated allele, a particular allele of a polymorphic locus, or the likes in a gene from Tables 2-4. Such methods include methods in which protection from cleavage agents is used to detect mismatched bases in RNA/RNA, DNA/DNA or RNA/DNA heteroduplexes (Myers et al., 1985) and alterations in electrophoretic mobility. Examples of other techniques for detecting point mutations, an associated allele, a particular allele of a polymorphic locus, or the like include, but are not limited to, selective oligonucleotide hybridization, selective amplification, selective primer extension, selective ligation, single-base extension, selective termination of extension or invasive cleavage assay.

[0379] Other types of markers can also be used for diagnostic purposes. For example, microsatellites can also be useful to detect the genetic predisposition of an individual to a given disorder. Microsatellites consist of short sequence motifs of one or a few nucleotides repeated in tandem. The most common motifs are polynucleotide runs, dinucleotide repeats (particularly the CA repeats) and trinucleotide repeats. However, other types of repeats can also be used. The microsatellites are very useful for genetic mapping because they are highly polymorphic in their length. Microsatellite markers can be typed by various means, including but not limited to DNA fragment sizing, oligonucleotide ligation assay and mass spectrometry. For example, the locus of the microsatellite is amplified by PCR and the size of the PCR fragment will be directly correlated to the length of the microsatellite repeat. The size of the PCR-fragment can be detected by regular means of gel electrophoresis. The fragment can be labeled internally during PCR or by using end-labeled oligonucleotides in the PCR reaction (e.g. Mansfield et al., 1996). Alternatively, the size of the PCR fragment is determined by mass spectrometry. In another alternative, an oligonucleotide ligation assay can be performed. The microsatellite locus is first amplified by PCR. Then, different oligonucleotides can be submitted to ligation at the center of the repeat with a set of oligonucleotides covering all the possible lengths of the marker at a given locus (Zirvi et al., 1999). Another example of design of an oligonucleotide assay comprises the ligation of three oligonucleotides; a 5′ oligonucleotide hybridizing to the 5′ flanking sequence, a repeat oligonucleotide of the length of the shortest allele of the marker hybridizing to the repeated region and a set of 3′ oligonucleotides covering all the existing alleles hybridizing to the 3′ flanking sequence and a portion of the repeated region for all the alleles longer than the shortest one. For the shortest allele, the 3′ oligonucleotide exclusively hybridizes to the 3′ flanking sequence (U.S. Pat. No. 6,479,244).

[0380] The methods described herein may be performed, for example, by utilizing pre-packaged diagnostic kits comprising at least one probe nucleic acid selected from the SEQ ID of Tables 5-37, or antibody reagent described herein, which may be conveniently used, for example, in a clinical setting to diagnose patient exhibiting symptoms or a family history of a disorder or disorder involving abnormal activity of genes from Tables 2-4.

### Method to Treat an Animal Suspected of Having ADHD

[0381] The present invention provides methods of treating a disease associated with ADHD disease by expressing in vivo the nucleic acids of at least one gene from Tables 2-4. These nucleic acids can be inserted into any of a number of well-known vectors for the transfection of target cells and organisms as described below. The nucleic acids are transfected into cells, ex vivo or in vivo, through the interaction of the vector and the target cell. The nucleic acids encoding a gene from Tables 2-4, under the control of a promoter, then express the encoded protein, thereby mitigating the effects of absent, partial inactivation, or abnormal expression of a gene from Tables 2-4.

[0382] Such gene therapy procedures have been used to correct acquired and inherited genetic defects, cancer, and viral infection in a number of contexts. The ability to express artificial genes in humans facilitates the prevention and/or cure of many important human disorders, including many disorders which are not amenable to treatment by other therapies (for a review of gene therapy procedures, see Anderson, 1992; Nabel & Feigner, 1993; Mitani & Caskey, 1993; Mulligan, 1993; Dillon, 1993; Miller, 1992; Van Brunt, 1998; Vigne, 1995; Kremer & Perricaudet 1995; Doerfler & Bohm 1995; and Yu et al., 1994).

[0383] Delivery of the gene or genetic material into the cell is the first critical step in gene therapy treatment of a disorder. A large number of delivery methods are well known to those of skill in the art. Preferably, the nucleic acids are administered for in vivo or ex vivo gene therapy uses. Non-viral vector delivery systems include DNA plasmids, naked nucleic acid, and nucleic acid complexed with a delivery vehicle such as a liposome. Viral vector delivery systems include DNA and RNA viruses, which have either episomal or integrated genomes after delivery to the cell. For a review of gene therapy procedures, see the references included in the above section.

[0384] The use of RNA or DNA based viral systems for the delivery of nucleic acids take advantage of highly evolved processes for targeting a virus to specific cells in the body and trafficking the viral payload to the nucleus. Viral vectors can be administered directly to patients (in vivo) or they can be used to treat cells in vitro and the modified cells are administered to patients (ex vivo). Conventional viral based systems for the delivery of nucleic acids could include retroviral, lentivirus, adenoviral, adeno-associated and herpes simplex virus vectors for gene transfer. Viral vectors are currently the most efficient and versatile method of gene transfer in target cells and tissues. Integration in the host genome is possible with the retrovirus, lentivirus, and adeno-associated virus gene transfer methods, often resulting in long term expression of the inserted transgene. Additionally, high transduction efficiencies have been observed in many different cell types and target tissues.

[0385] The tropism of a retrovirus can be altered by incorporating foreign envelope proteins, expanding the potential target population of target cells. Lentiviral vectors are retroviral vectors that are able to transduce or infect non-dividing cells and typically produce high viral titers. Selection of a retroviral gene transfer system would therefore depend on the target tissue. Retroviral vectors are comprised of cis-acting long terminal repeats with packaging capacity for up to 6-10 kb of foreign sequence. The minimum cis-acting LTRs are sufficient for replication and packaging of the vectors, which are then used to integrate the therapeutic gene into the target cell to provide permanent transgene expression. Widely used retroviral vectors include those based upon murine leukemia virus (MuLV), gibbon ape leukemia virus (GaLV), Simian Immuno deficiency virus (SIV), human immuno deficiency virus (HIV), and combinations thereof (see, e.g., Buchscher et al., 1992; Johann et al., 1992; Sommerfelt et al., 1990; Wilson et al., 1989; Miller et al., 1999; and PCT/US94/05700).

[0386] In applications where transient expression of the nucleic acid is preferred, adenoviral based systems are typically used. Adenoviral based vectors are capable of very high transduction efficiency in many cell types and do not require cell division. With such vectors, high titer and levels of expression have been obtained. This vector can be produced in large quantities in a relatively simple system. Adeno-associated virus (“AAV”) vectors are also used to transduce cells with target nucleic acids, e.g., in the in vitro production of nucleic acids and peptides, and for in vivo and ex vivo gene therapy procedures (see, e.g., West et al., 1987; U.S. Pat. No. 4,797,368; WO 93/24641; Kotin, 1994; Muzyczka, 1994). Construction of recombinant AAV vectors is described in a number of publications, including U.S. Pat. No. 5,173,414; Tratschin et al., 1985; Tratschin, et al., 1984; Hermonat & Muzyczka, 1984; and Samulski et al., 1989.

[0387] In particular, numerous viral vector approaches are currently available for gene transfer in clinical trials, with retroviral vectors by far the most frequently used system. All of these viral vectors utilize approaches that involve complementation of defective vectors by genes inserted into helper cell lines to generate the transducing agent. pLASN and MFG-S are examples are retroviral vectors that have been used in clinical trials (Dunbar et al., 1995; Kohn et al., 1995; Malech et al., 1997). PA317/pLASN was the first therapeutic vector used in a gene therapy trial (Blaese et al., 1995). Transduction efficiencies of 50% or greater have been observed for MFG-S packaged vectors (Ellem et al., 1997; and Dranoff et al., 1997).

[0388] Recombinant adeno-associated virus vectors (rAAV) are a promising alternative gene delivery systems based on the defective and nonpathogenic parvovirus adeno-associated type 2 virus. All vectors are derived from a plasmid that retains only the AAV 145 by inverted terminal repeats flanking the transgene expression cassette. Efficient gene transfer and stable transgene delivery due to integration into the genomes of the transduced cell are key features for this vector system (Wagner et al., 1998, Kearns et al., 1996).

[0389] Replication-deficient recombinant adenoviral vectors (Ad) are predominantly used in transient expression gene therapy; because they can be produced at high titer and they readily infect a number of different cell types. Most adenovirus vectors are engineered such that a transgene replaces the Ad E1a, E1b, and E3 genes; subsequently the replication defector vector is propagated in human 293 cells that supply the deleted gene function in trans. Ad vectors can transduce multiple types of tissues in vivo, including nondividing, differentiated cells such as those found in the liver, kidney and muscle tissues. Conventional Ad vectors have a large carrying capacity. An example of the use of an Ad vector in a clinical trial involved polynucleotide therapy for antitumor immunization with intramuscular injection (Sterman et al., 1998). Additional examples of the use of adenovirus vectors for gene transfer in clinical trials include Rosenecker et al., 1996; Sterman et al., 1998; Welsh et al., 1995; Alvarez et al., 1997; Topf et al., 1998.

[0390] Packaging cells are used to form virus particles that are capable of infecting a host cell. Such cells include 293 cells, which package adenovirus, and ψ2 cells or PA317 cells, which package retrovirus. Viral vectors used in gene therapy are usually generated by a producer cell line that packages a nucleic acid vector into a viral particle. The vectors typically contain the minimal viral sequences required for packaging and subsequent integration into a host, other viral sequences being replaced by an expression cassette for the protein to be expressed. The missing viral functions are supplied in trans by the packaging cell line. For example, AAV vectors used in gene therapy typically only possess ITR sequences from the AAV genome which are required for packaging and integration into the host genome. Viral DNA is packaged in a cell line, which contains a helper plasmid encoding the other AAV genes, namely rep and cap, but lacking ITR sequences. The cell line is also infected with adenovirus as a helper. The helper virus promotes replication of the AAV vector and expression of AAV genes from the helper plasmid. The helper plasmid is not packaged in significant amounts due to a lack of ITR sequences. Contamination with adenovirus can be reduced by, e.g., heat treatment to which adenovirus is more sensitive than AAV.

[0391] In many gene therapy applications, it is desirable that the gene therapy vector be delivered with a high degree of specificity to a particular tissue type. A viral vector is typically modified to have specificity for a given cell type by expressing a ligand as a fusion protein with a viral coat protein on the viruses outer surface. The ligand is chosen to have affinity for a receptor known to be present on the cell type of interest. For example, Han et al., 1995, reported that Moloney murine leukemia virus can be modified to express human heregulin fused to gp70, and the recombinant virus infects certain human breast cancer cells expressing human epidermal growth factor receptor. This principle can be extended to other pairs of viruses expressing a ligand fusion protein and target cells expressing a receptor. For example, filamentous phage can be engineered to display antibody fragments (e.g., Fab or Fv) having specific binding affinity for virtually any chosen cellular receptor. Although the above description applies primarily to viral vectors, the same principles can be applied to nonviral vectors. Such vectors can be engineered to contain specific uptake sequences thought to favor uptake by specific target cells.

[0392] Gene therapy vectors can be delivered in vivo by administration to an individual patient, typically by systemic administration (e.g., intravenous, intraperitoneal, intramuscular, subdermal, or intracranial infusion) or topical application. Alternatively, vectors can be delivered to cells ex vivo, such as cells explanted from an individual patient (e.g., lymphocytes, bone marrow aspirates, and tissue biopsy) or universal donor hematopoietic stem cells, followed by reimplantation of the cells into a patient, usually after selection for cells which have incorporated the vector.

[0393] Ex vivo cell transfection for diagnostics, research, or for gene therapy (e.g., via re-infusion of the transfected cells into the host organism) is well known to those of skill in the art. In a preferred embodiment, cells are isolated from the subject organism, transfected with a nucleic acid (gene or cDNA), and re-infused back into the subject organism (e.g., patient). Various cell types suitable for ex vivo transfection are well known to those of skill in the art (see, e.g., Freshney et al., 1994; and the references cited therein for a discussion of how to isolate and culture cells from patients).

[0394] In one embodiment, stem cells are used in ex vivo procedures for cell transfection and gene therapy. The advantage to using stem cells is that they can be differentiated into other cell types in vitro, or can be introduced into a mammal (such as the donor of the cells) where they will engraft in the bone marrow. Methods for differentiating CD34+ cells in vitro into clinically important immune cell types using cytokines such a GM-CSF, IFN-γ and TNF-α are known (see Inaba et al., 1992).

[0395] Stem cells are isolated for transduction and differentiation using known methods. For example, stem cells are isolated from bone marrow cells by panning the bone marrow cells with antibodies which bind unwanted cells, such as CD4+ and CD8+ (T cells), CD45+ (panB cells), GR-1 (granulocytes), and lad (differentiated antigen presenting cells).

[0396] Vectors (e.g., retroviruses, adenoviruses, liposomes, etc.) containing therapeutic nucleic acids can be also administered directly to the organism for transduction of cells in vivo. Alternatively, naked DNA can be administered.

[0397] Administration is by any of the routes normally used for introducing a molecule into ultimate contact with blood or tissue cells, as described above. The nucleic acids from Tables 2-4 are administered in any suitable manner, preferably with the pharmaceutically acceptable carriers described above. Suitable methods of administering such nucleic acids are available and well known to those of skill in the art, and, although more than one route can be used to administer a particular composition, a particular route can often provide a more immediate and more effective reaction than another route (see Samulski et al., 1989). The present invention is not limited to any method of administering such nucleic acids, but preferentially uses the methods described herein.

[0398] The present invention further provides other methods of treating ADHD disease such as administering to an individual having ADHD disease an effective amount of an agent that regulates the expression, activity or physical state of at least one gene from Tables 2-4. An “effective amount” of an agent is an amount that modulates a level of expression or activity of a gene from Tables 2-4, in a cell in the individual at least about 10%, at least about 20%, at least about 30%, at least about 40%, at least about 50%, at least about 60%, at least about 70%, at least about 80% or more, compared to a level of the respective gene from Tables 2-4 in a cell in the individual in the absence of the compound. The preventive or therapeutic agents of the present invention may be administered, either orally or parenterally, systemically or locally. For example, intravenous injection such as drip infusion, intramuscular injection, intraperitoneal injection, subcutaneous injection, suppositories, intestinal lavage, oral enteric coated tablets, and the like can be selected, and the method of administration may be chosen, as appropriate, depending on the age and the conditions of the patient. The effective dosage is chosen from the range of 0.01 mg to 100 mg per kg of body weight per administration. Alternatively, the dosage in the range of 1 to 1000 mg, preferably 5 to 50 mg per patient may be chosen. The therapeutic efficacy of the treatment may be monitored by observing various parts of the brain and or body, or any other monitoring methods known in the art. Other ways of monitoring efficacy can be, but are not limited to monitoring inattention and/or hyperactive symptoms, or any other ADHD symptom described herein.

[0399] The present invention further provides a method of treating an individual clinically diagnosed with ADHDs' disease. The methods generally comprises analyzing a biological sample that includes a cell, in some cases, a brain cell, from an individual clinically diagnosed with ADHD disease for the presence of modified levels of expression of at least 1 gene, at least 10 genes, at least 50 genes, at least 100 genes, or at least 200 genes from Tables 2-4. A treatment plan that is most effective for individuals clinically diagnosed as having a condition associated with ADHD disease is then selected on the basis of the detected expression of such genes in a cell. Treatment may include administering a composition that includes an agent that modulates the expression or activity of a protein from Tables 2-4 in the cell. Information obtained as described in the methods above can also be used to predict the response of the individual to a particular agent. Thus, the invention further provides a method for predicting a patient's likelihood to respond to a drug treatment for a condition associated with ADHD disease, comprising determining whether modified levels of a gene from Tables 2-4 is present in a cell, wherein the presence of protein is predictive of the patient's likelihood to respond to a drug treatment for the condition. Examples of the prevention or improvement of symptoms accompanied by ADHD disease that can monitored for effectiveness include prevention or improvement of inattention and/or hyperactivity, or any other ADHD related symptom described herein.

[0400] The invention also provides a method of predicting a response to therapy in a subject having ADHD disease by determining the presence or absence in the subject of one or more markers associated with ADHD disease described in Tables 5-37, diagnosing the subject in which the one or more markers are present as having ADHD disease, and predicting a response to a therapy based on the diagnosis e.g., response to therapy may include an efficacious response and/or one or more adverse events. The invention also provides a method of optimizing therapy in a subject having ADHD disease by determining the presence or absence in the subject of one or more markers associated with a clinical subtype of ADHD disease, diagnosing the subject in which the one or more markers are present as having a particular clinical subtype of ADHD disease, and treating the subject having a particular clinical subtype of ADHD disease based on the diagnosis. As an example, treatment for the inattentive subtype of ADHD.

[0401] Thus, while there are a number of treatments for ADHD disease currently available, they all are accompanied by various side effects, high costs, and long complicated treatment protocols, which are often not available and effective in a large number of individuals. Accordingly, there remains a need in the art for more effective and otherwise improved methods for treating and preventing ADHD. Thus, there is a continuing need in the medical arts for genetic markers of ADHD disease and guidance for the use of such markers. The present invention fulfills this need and provides further related advantages.

### EXAMPLES

### Example 1

### Identification of Cases and Controls

[0402] All individuals were sampled from the Quebec founder population (QFP). Membership in the founder population was defined as having four grandparents of the affected child having French Canadian family names and being born in the Province of Quebec, Canada or in adjacent areas of the Provinces of New Brunswick and Ontario or in New England or New York State. The Quebec founder population is expected to have two distinct advantages over general populations for LD mapping: 1) increased LD resulting from a limited number of generations since the founding of the population and 2) increased genetic alleic homogeneity because of the restricted number of founders (estited 2600 effective founders, Charbonneau et al. 1987). Reduced allelic heterogeneity will act to increase relative risk imparted by the remaining alleles and so increase the power of case/control studies to detect genes and gene alleles involved in complex disorders within the Quebec population. The specific combination of age in generations, optimal number of founders and large present population size makes the QFP optimal for LD-based gene mapping.

[0403] All enrolled QFP subjects (patients and controls) provided a 20 ml blood sample (2 barcoded tubes of 10 ml). Samples were processed immediately upon arrival at the laboratory. All samples were scanned and logged into a LabVantage Laboratory Information Management System (LIMS), which served as a hub between the clinical data management system and the genetic analysis system. Following centrifugation, the buffy coat containing the white blood cells was isolated from each tube. Genomic DNA was extracted from the buffy coat from one of the tubes, and stored at 4° C. until required for genotyping. DNA extraction was performed with a commercial kit using a guanidine hydrochloride based method (FlexiGene, Qiagen) according to the manufacturer's instructions. The extraction method yielded high molecular weight DNA, and the quality of every DNA sample was verified by agarose gel electrophoresis. Genomic DNA appeared on the gel as a large band of very high molecular weight. The remaining two buffy coats were stored at ±80° C. as backups.

[0404] The QFP samples were collected as family trios consisting of ADHD disease subjects and two first degree relatives. 459 Parent, Parent, Child (PPC) trios were used for the analysis reported here. For the 459 trios used in the genome wide scan, these included 93 daughters and 376 sons. The child is always the affected member of the trio, so, the two non-transmitted parental chromosomes (one from each parent) were used as controls. The recruitment of trios allowed a more precise determination of long extended haplotypes.

### Example 2

### Genome Wide Association

[0405] Genotyping was performed using the QLDM-Max SNP map using IIlumina's Infinium-II technology Single Sample Beadchips. The QLDM-Max map contains 374,187 SNPs. The SNPs are contained in the Illumina HumanHap-300 arrays plus two custom SNP sets of approximately 30,000 markers each. The HumanHap-300 chip includes 317,503 tag SNPs derived from the Phase I HapMap data. The additional (approx.) 60,000 SNPs were selected by to optimize the density of the marker map across the genome matching the LD pattern in the Quebec Founder Population, as established from previous studies at Genizon, and to fill gaps in the Illumina HumanHap-300 map. The SNPs were genotyped on the 459 trios for a total of ˜515,255,499 genotypes.

[0406] The genotyping information was entered into a Unified Genotype Database (a proprietary database under development) from which it was accessed using custom-built programs for export to the genetic analysis pipeline. Analyses of these genotypes were performed with the statistical tools described in Example 3. The GWS and the different analyses permitted the identification of 288 candidate chromosomal regions linked to ADHD disease (Table 1).

### Example 3

### Genetic Analysis

[0407] 1. Dataset Quality Assessment

[0408] Prior to performing any analysis, the dataset from the GWS was verified for completeness of the trios. The programs FamCheck and FamPull removed any trios with abnormal family structure or missing individuals (e.g. trios without a proband, duos, singletons, etc.), and calculated the total number of complete trios in the dataset. The trios were also tested to make sure that no subjects within the cohort were related more closely than second cousins (6 meiotic steps).

[0409] Subsequently, the program DataCheck2.1 was used to calculate the following statistics per marker and per family:

[0410] Minor allele frequency (MAF) for each marker; Missing values for each marker and family; Hardy Weinberg Equilibrium for each marker; and Mendelian segregation error rate.

[0411] The following acceptance criteria were applied for internal analysis purposes:

[0412] MAF>4%;

[0413] Missing values <1%;

[0414] Observed non-Mendelian segregation<0.33%;

[0415] Non significant deviation in allele frequencies from Hardy Weinberg equilibrium.

[0416] Markers or families not meeting these criteria were removed from the dataset in the following step. Analyses of variance were performed using the algorithm GenAnova, to assess whether families or markers have a greater effect on missing values and/or non-Mendelian segregation. This was used to determine the smallest number of data points to remove from the dataset in order to meet the requirements for missing values and non-Mendelian segregation. The families and/or markers were removed from the dataset using the program DataPull, which generates an output file that is used for subsequent analysis of the genotype data.

[0417] 2. Phase Determination

[0418] The program PhaseFinderSNP2.0 was used to determine phase from trio data on a marker-by-marker, trio-by-trio basis. The output file contains haplotype data for all trio members, with ambiguities present when all trio members are heterozygous or where data is missing. The program AllHaps2PatCtrl was then used to determine case and control haplotypes and to prepare the data in the proper input format for the next stage of analysis, using the expectation maximization algorithm, PL-EM, to call phase on the remaining ambiguities. This stage consists of several modules for resolution of the remaining phase ambiguities. PLEMPre was first used to recode the haplotypes for input into the PL-EM algorithm in 11-marker blocks. The haplotype information was encoded as genotypes, allowing for the entry of known phase into the algorithm; this method limits the possible number of estimated haplotypes conditioned on already known phase assignments. The PL-EM algorithm was used to estimate haplotypes from the “pseudo-genotype” data in 11-marker windows, advancing in increments of one marker across the chromosome. The results were then converted into multiple haplotype files using the program PLEMPost. Subsequently PLEMBlockGroup was used to convert the individual 11-marker block files into one continuous block of haplotypes for the entire chromosome, and to generate files for further analysis by LDSTATS and SINGLETYPE. PLEMMerge takes the consensus estimation of the allele call at each marker over all separate estimations (most markers are estimated 11 different times as the 11 marker blocks pass over their position).

[0419] 3. Haplotype Association Analysis

[0420] Haplotype association analysis was performed using the program LDSTATS. LDSTATS tests for association of haplotypes with the disease phenotype. The algorithms LDSTATS (v2.0) and LDSTATS (v4.0) define haplotypes using multi-marker windows that advance across the marker Map in one-marker increments. Windows can contain any odd number of markers specified as a parameter of the algorithm. Other marker windows can also be used. At each position the frequency of haplotypes in cases and controls was calculated and a chi-square statistic was calculated from case control frequency tables. For LDSTATS v2.0, the significance of the chi-square for single marker and 3-marker windows was calculated as Pearson's chi-square with degrees of freedom. Larger windows of multi-allelic haplotype association were tested using Smith's normalization of the square root of Pearson's Chi-square. In addition, LDSTATS v2.0 calculates Chi-square values for the transmission disequilibrium test (TDT) for single markers in situations where the trios consisted of parents and an affected child.

[0421] LDSTATS v4.0 calculates significance of chi-square values using a permutation test in which case-control status is randomly permuted until 350 permuted chi-square values are observed that are greater than or equal to chi-square value of the actual data. The P value is then calculated as 350/the number of permutations required.

[0422] Table 5.1 lists the results for association analysis using LDSTATs (v2.0 and v4.0) for the candidate regions described above based on the genome wide scan genotype data for 459 QFP trios. For each one of these regions, we report in Table 5.2 the allele frequencies and the relative risk (RR) for the haplotypes contributing to the best signal at each SNP in the region. The best signal at a given location was determined by comparing the significance (p-value) of the association with ADHD disease for window sizes of 1, 3, 5, 7, and 9 SNPs, and selecting the most significant window. For a given window size at a given location, the association with ADHD disease was evaluated by comparing the overall distribution of haplotypes in the cases with the overall distribution of haplotypes in the controls. Haplotypes with a relative risk greater than one increase the risk of developing ADHD disease while haplotypes with a relative risk less than one are protective and decrease the risk.

[0423] 4. Singletype Analysis

[0424] The SINGLETYPE algorithm assesses the significance of case-control association for single markers using the genotype data from the laboratory as input in contrast to LDSTATS single marker window analyses, in which case-control alleles for single markers from estimated haplotypes in file, hapatctr.txt, as input. SINGLETYPE calculates P values for association for both alleles, 1 and 2, as well as for genotypes, 11, 12, and 22, and plots these as −log₁₀ P values for significance of association against marker position. Significance of dominance/recessive models is also assessed for each marker.

[0425] 5. Conditional Haplotype Analyses

[0426] Conditional haplotype analyses were performed on subsets of the original set of 459 cases using the program LDSTATS (v2.0). The selection of a subset of cases and their matched controls was based on the carrier status of cases at a gene or locus of interest. We selected the locus LOC643182 on chromosome 3 and genes KCNAB1 on chromosome 3, ODZ3 on chromosome 4, ODZ2 on chromosome 5, GRID1 on chromosome 10, TAF4 on chromosome 20 and SLC6A14 on chromosome X, based on our association findings using LDSTATS (v2.0). The most significant association signal in LOC643182, using build 36, was obtained with a haplotype window of size 5 containing SNPs corresponding to SEQ IDs 14447, 14448, 14449, 14450, 14451 (see Table below for conversion to the specific DNA alleles used). A reduced haplotype diversity was observed and we selected a set of risk and a set of protective haplotypes for conditional analyses. The risk set consisted of haplotypes 12222, 11221, and 21212 but not the haplo-genotypes 11221/11122 and 21212/11122. Using this set, we partitioned the cases into two groups; the first group consisting of those cases that were carrier of a risk haplo-genotype and the second group consisting of the remaining cases, the non-carriers. The resulting sample sizes were respectively 222 and 230. LDSTATS (v2.0) was run in each group and regions showing association with ADHD are reported in Table 37.1. Regions associated with ADHD in the group of carriers (Has LOC643182-1_cr) indicate the presence of an epistatic interaction between risk factors in those regions and risk factors in LOC643182 (Table 37.2). The protective set consisted of haplotype 11122 but not the haplo-genotypes 11122/12222 and 11122/11221. Using this set, we partitioned the cases into two groups; the first group consisting of those cases that were carrier of a protective haplo-genotype and the second group consisting of the remaining cases, the non-carriers. The resulting sample sizes were respectively 126 and 326. LDSTATS (v2.0) was run in each group and regions showing association with ADHD are reported in Table 10.1. Regions associated with ADHD in the group of non-carriers (Not LOC643182-1_cp) indicate the presence of an epistatic interaction between risk factors in those regions and risk factors in LOC643182 (Table 10.2).

[0427] A second conditional analysis was performed using gene KCNAB1 on chromosome 3. The most significant association, using build 36, was obtained with a haplotype window of size 5 containing SNPs corresponding to SEQ IDs 15002, 15003, 15004, 15005, 15006 (see Table below for conversion to the specific DNA alleles used). A reduced haplotype diversity was observed and we selected a set of protective haplotypes for conditional analyses. The set consisted of haplo-genotypes 11121/21212, 11121/22222, 11121/11121 and 11121/22212. Using the risk set, we partitioned the cases into two groups; the first group consisting of those cases that were carrier of a protective haplo-genotype and the second group consisting of the remaining cases, the non-carriers. The resulting sample sizes were respectively 55 and 397. LDSTATS (v2.0) was run in each group and regions showing association with ADHD are reported in Table 11.1. Regions associated with ADHD in the group of non-carriers (Not LOC643182-2_cp) indicate the presence of an epistatic interaction between risk factors in those regions and risk factors in KCNAB1 (Table 11.2).

[0428] A third conditional analysis was performed using gene ODZ3 on chromosome 4. The most significant association in ODZ3, using build 36, in the subset of cases without the Combined sub-phenotype, was obtained with a haplotype window of size 5 containing SNPs corresponding to SEQ 15723, 15724, 15725, 15726, 15727 (see Table below for conversion to the specific DNA alleles used). A reduced haplotype diversity was observed and we selected a set of risk and a set of protective haplo-genotypes for conditional analyses. The risk set consisted of haplotypes 12122, 21221, 22221, 22112 but not haplo-genotype 22221/22122. The protective set consisted of haplotypes 22122, 12121, 21121 but not haplo-genotypes 22122/12122, 22122/21221, 22122/22112, 21121/22221 and 21121/22112. Using the risk set, we partitioned the cases into two groups; the first group consisting of those cases that were carrier of a risk haplo-genotype and the second group consisting of the remaining cases, the non-carriers. The resulting sample sizes were respectively 91 and 107. LDSTATS (v2.0) was run in each group and regions showing association with ADHD are reported in Tables 21.2 and 25.2. Regions associated with ADHD in the group of carriers (Has ODZ3-1_cr) indicate the presence of an epistatic interaction between risk factors in those regions and risk factors in ODZ3 (Table 21.3). Regions associated with ADHD in the group of non-carriers (Not ODZ3-1_cr) indicate the existence of risk factors acting independently of ODZ3 (Table ODZ3.3). Using the protective set, we partitioned the cases into two groups; the first group consisting of those cases that were carrier of a protective haplo-genotype and the second group consisting of the remaining cases, the non-carriers. The resulting sample sizes were respectively 72 and 126. LDSTATS (v2.0) was run in each group and regions showing association with ADHD are reported in Table 20.2. Regions associated with ADHD in the group of carriers (Has ODZ3-1_cp) indicate the presence of an epistatic interaction between risk factors in those regions and risk factors in ODZ3 (Table 20.3).

[0429] A fourth conditional analysis was performed using gene ODZ2 on chromosome 5. The most significant association in ODZ2, using build 36, in the subset of cases without the Mainly Inattentive sub-phenotype, was obtained with a haplotype window of size 7 containing SNPs corresponding to SEQ IDs 16305, 16306, 16307, 16308, 16309, 16310, 16311 (see Table below for conversion to the specific DNA alleles used). A reduced haplotype diversity was observed and we selected a set of risk and a set of protective haplo-genotypes for conditional analyses. The risk set consisted of haplotypes 1122212, 1122112, 2211122, 2122112, 1111112, 1111122, 1222122 and haplo-genotype 1222121/1222121 but not haplo-genotypes 1122212/1211122, 2211122/1211122 and 2122112/1222121. The protective set consisted of haplo-genotypes 1211122/1211122, 1211122/2211122, 1211122/1222121, 2122112/1222121. Using the risk set, we partitioned the cases into two groups; the first group consisting of those cases that were carrier of a risk haplo-genotype and the second group consisting of the remaining cases, the non-carriers. The resulting sample sizes were respectively 167 and 130. LDSTATS (v2.0) was run in each group and regions showing association with ADHD are reported in Table 28.2. Regions associated with ADHD in the group of non-carriers (Not ODZ3-1_cr) indicate the existence of risk factors acting independently of ODZ2 (Table 28.3). Using the protective set, we partitioned the cases into two groups; the first group consisting of those cases that were carrier of a protective haplo-genotype and the second group consisting of the remaining cases, the non-carriers. The resulting sample sizes were respectively 110 and 187. LDSTATS (v2.0) was run in each group and regions showing association with ADHD are reported in Tables 22.2 and 26.2. Regions associated with ADHD in the group of carriers (Has ODZ3-1_cp) indicate the existence of risk factors acting independently of ODZ2 (Table 22.3). Regions associated with ADHD in the group of non-carriers (Not ODZ3-1_cp) indicate the presence of an epistatic interaction between risk factors in those regions and risk factors in ODZ2 (Table 26.3).

[0430] A fifth conditional analysis was performed using gene ODZ2 on chromosome 5. The most significant association in ODZ2, using build 36, in the subset of cases with the Combined sub-phenotype, was obtained with a haplotype window of size 7 containing SNPs corresponding to SEQ IDs 16321, 16322, 16323, 16324, 16325, 16326, 16327 (see Table below for conversion to the specific DNA alleles used). A reduced haplotype diversity was observed and we selected a set of risk and a set of protective haplo-genotypes for conditional analyses. The risk set consisted of haplotypes 2122112, 1221222, 1211122, 2111122 and haplo-genotypes 1211111/1211111 and 2121111/2121111 but not haplo-genotypes 2122112/1222112, 1221222/1222112, 1221222/1221111, 1211122/1221111, 1211122/2111111, 2111122/1221111. The protective set consisted of haplo-genotypes 1222112/1222112, 1222112/2221111, 1222112/1221222, 1222112/1221111, 1222112/1212111, 1222112/2121111, 1222112/1221112, 1222112/1211111, 2221111/2221111, 2221111/1221111, 2221111/2121111, 2221111/2111111, 2221111/1211111, 1221111/1221111, 1221111/1212111, 1221111/2121111, 1221111/2111111, 1221111/1222111, 1221111/1221112, 1221111/1222222, 1221111/1211111, 1221111/2122222, 1221111/1221211, 1221111/2211122 and 1222111/1211111. Using the risk set, we partitioned the cases into two groups; the first group consisting of those cases that were carrier of a risk haplo-genotype and the second group consisting of the remaining cases, the non-carriers. The resulting sample sizes were respectively 100 and 161. LDSTATS (v2.0) was run in each group and regions showing association with ADHD are reported in Tables 24.2 and 30.2. Regions associated with ADHD in the group of non-carriers (Has ODZ3-2_cr) indicate the presence of an epistatic interaction between risk factors in those regions and risk factors in ODZ2 (Table 24.3). Regions associated with ADHD in the group of carriers (Not ODZ3-2_cr) indicate the existence of risk factors acting independently of ODZ2 (Table 30.3). Using the protective set, we partitioned the cases into two groups; the first group consisting of those cases that were carrier of a protective haplo-genotype and the second group consisting of the remaining cases, the non-carriers. The resulting sample sizes were respectively 77 and 184. LDSTATS (v2.0) was run in each group and regions showing association with ADHD are reported in Tables 23.2 abd 29.1. Regions associated with ADHD in the group of carriers (Has ODZ3-2_cp) indicate the existence of risk factors acting independently of ODZ2 (Table 23.3). Regions associated with ADHD in the group of non-carriers (Not ODZ3-2_cp) indicate the presence of an epistatic interaction between risk factors in those regions and risk factors in ODZ2 (Table 29.2).

[0431] A sixth conditional analysis was performed using gene GRID1 on chromosome 10. The most significant association in GRID1, using build 36, was obtained with a haplotype window of size 9 containing SNPs corresponding to SEQ IDs 19043, 19044, 19045, 19046, 19047, 19048, 19049, 19050, 19051 (see Table below for conversion to the specific DNA alleles used). A reduced haplotype diversity was observed and we selected a set of risk and a set of protective haplo-genotypes for conditional analyses. The risk set consisted of haplo-genotypes 112111111/212111111, 211222222/212111111, 212111111/212222212, 112111111/112111111, 112211122/212111111, The protective set consisted of haplo-genotypes 122111111/212111111, 212111111/212111212, 112111112/212111111, 112222212/212111111, 121222222/212111111, 122111112/212111111. Using the risk set, we partitioned the cases into two groups; the first group consisting of those cases that were carrier of a risk haplo-genotype and the second group consisting of the remaining cases, the non-carriers. The resulting sample sizes were respectively 97 and 355. LDSTATS (v2.0) was run in each group and regions showing association with ADHD are reported in Tables 6.1 and 31.1. Regions associated with ADHD in the group of carriers (Has GRID1-1_cr) indicate the presence of an epistatic interaction between risk factors in those regions and risk factors in GRID1 (Table 6.2). Regions associated with ADHD in the group of non-carriers (Not GRID1-1_cr) indicate the existence of risk factors acting independently of GRID1 (Table 31.2). Using the protective set, we partitioned the cases into two groups; the first group consisting of those cases that were carrier of a protective haplo-genotype and the second group consisting of the remaining cases, the non-carriers. The resulting sample sizes were respectively 34 and 418. LDSTATS (v2.0) was run in each group and regions showing association with ADHD are reported in Table 12.1. Regions associated with ADHD in the group of non-carriers (Not GRID1-1_cp) indicate the presence of an epistatic interaction between risk factors in those regions and risk factors in GRID1 (Table 12.2).

[0432] A seventh conditional analysis was performed using gene TAF4 on chromosome 20. The most significant association in TAF4, using build 36, was obtained with a haplotype window of size 3 containing SNPs corresponding to SEQ ID 22583, 22584, 22585 (see Table below for conversion to the specific DNA alleles used). A reduced haplotype diversity was observed and we selected a set of risk and a set of protective haplotypes for conditional analyses. The risk set consisted of haplotype 122 and haplo-genotypes 111/222, 212/222, 111/111 and 111/112. The protective set consisted of haplotype 211 but excluding haplo-genotypes 211/122, 211/221 and 211/111 due to dominance effects. Using the risk set, we partitioned the cases into two groups; the first group consisting of those cases that were carrier of a risk haplo-genotype and the second group consisting of the remaining cases, the non-carriers. The resulting sample sizes were respectively 135 and 317. LDSTATS (v2.0) was run in each group and regions showing association with ADHD are reported in Tables 7.1 and 14.1. Regions associated with ADHD in the group of carriers (Has TAF4-1_cr) indicate the presence of an epistatic interaction between risk factors in those regions and risk factors in TAF4 (Table 7.2). Regions associated with ADHD in the group of non-carriers (Not C20-1_cr) indicate the existence of risk factors acting independently of TAF4 (Table 14.2). Using the protective set, we partitioned the cases into two groups; the first group consisting of those cases that were carrier of a protective haplo-genotype and the second group consisting of the remaining cases, the non-carriers. The resulting sample sizes were respectively 115 and 337. LDSTATS (v2.0) was run in each group and regions showing association with ADHD are reported in Table 13.1. Regions associated with ADHD in the group of non-carriers (Not TAF4-1_cp) indicate the presence of an epistatic interaction between risk factors in those regions and risk factors in TAF4 (Table 13.2).

[0433] An eighth conditional analysis was performed using gene SLC6A14 on chromosome X. The most significant association signal in SLC6A14, using build 36, was obtained with a haplotype window of size 5 containing SNPs corresponding to SEQ IDs 23307, 23308, 23309, 23310, 23311 (see Table below for conversion to the specific DNA alleles used). A reduced haplotype diversity was observed and we selected a set of risk and two sets of protective haplotypes for conditional analyses. The risk set consisted of haplotypes 21211 and 21121. The protective set consisted of haplotypes 12122 and 12121. Using the risk set, we partitioned the cases into two groups; the first group consisting of those cases that were carrier of a risk haplo-genotype and the second group consisting of the remaining cases, the non-carriers. The resulting sample sizes were respectively 66 and 389. LDSTATS (v2.0) was run in each group and regions showing association, with ADHD are reported in Table 17.1. Regions associated with ADHD in the group of non-carriers (Not SLC6A14-1_cr2) indicate the existence of risk factors acting independently of SLC6A14 (Table 17.2). Using the protective set, we partitioned the cases into two groups; the first group consisting of those cases that were carrier of a protective haplotype and the second group consisting of the remaining cases, the non-carriers. The resulting sample sizes were respectively 168 and 287. LDSTATS (v2.0) was run in each group and regions showing association with ADHD are reported in Tables 8.1 and 15.1. Regions associated with ADHD in the group of non-carriers (Not SLC6A14-1_cp2) indicate the presence of an epistatic interaction between risk factors in those regions and risk factors in SLC6A14 (Table 15.2). Regions associated with ADHD in the group of carriers (Has SLC6A14-1_cp2) indicate the existence of risk factors acting independently of SLC6A14 (Table 8.2). In addition, we considered a set of risk and a set of protective haplotypes in gene SLC6A14, based on the association results using LDSTATS (v04). The most significant association signal in SLC6A14, using build 36, was obtained with a single SNP corresponding to SEQ ID 11406 (see Table below for conversion to the specific DNA alleles used). Allele 1 was the risk allele, however because of dominance effect in heterozygote female we also considered the protective allele 2 to partition the cases. Using the risk allele, we partitioned the cases into two groups; the first group consisting of those cases that were carrier of allele 1 and the second group consisting of the remaining cases, the females 2/2 and male 2, the non-carriers. The resulting sample sizes were respectively 87 and 368. Using the protective allele 2, the resulting sample sizes were respectively 395 and 60. LDSTATS (v2.0) was run in each group and regions showing association with ADHD are reported in Table 9.1, 18.1 and 19.1. Regions associated with ADHD in the group of non-carriers of allele 1 (Not SLC6A14-1a_cr1 and Not SLC6A14-1a_cp1) indicate the presence of an epistatic interaction between risk factors in those regions and risk factors in SLC6A14 (Tables 19.2 and 18.2). Regions associated with ADHD in the group of carriers of allele 1 (has SLC6A14-1a_cr1) indicate the existence of risk factors acting independently of SLC6A14 (Table 9.2).

[0434] For each region that was associated with ADHD in the conditional analyses, we report in the allele frequencies and the relative risk (RR) for the haplotypes contributing to the best signal at each SNP in the region. The best signal at a given location was determined by comparing the significance (p-value) of the association with ADHD for window sizes of 1, 3, 5, 7, and 9 SNPs, and selecting the most significant window. For regions showing association to single SNPs we report on window of size 1 only. For a given window size at a given location, the association with ADHD was evaluated by comparing the overall distribution of haplotypes in the cases with the overall distribution of haplotypes in the controls. Haplotypes with a relative risk greater than one increase the risk of developing ADHD while haplotypes with a relative risk less than one are protective and decrease the risk.

DNA alleles used in haplotypes (LOC643182)

| SeqID | 14447 | 14448 | 14449 | 14450 | 14451 |
|---|---|---|---|---|---|
| Position | 5097629 | 5101013 | 5101391 | 5104769 | 5107540 |
| Alleles | T/C | A/G | T/G | A/G | T/C |
| 12222 | T | G | G | G | C |
| 11221 | T | A | G | G | T |
| 21212 | C | A | G | A | C |
| 11122 | T | A | T | G | C |

DNA alleles used in haplotyes KCNAB1

| SeqID | 15002 | 15003 | 15004 | 15005 | 15006 |
|---|---|---|---|---|---|
| Position | 157384557 | 157448444 | 157466631 | 157475203 | 157487648 |
| Alleles | C/T | A/G | A/C | C/T | C/T |
| 11121 | T | A | A | C | T |
| 21212 | C | A | C | T | C |
| 22222 | C | G | C | C | C |
| 22212 | C | G | C | T | C |

DNA alleles used in haplotypes (GRID1)

| SeqID | 19043 | 19044 | 19045 | 19046 | 19047 | 19048 | 19049 | 19050 | 19051 |
|---|---|---|---|---|---|---|---|---|---|
| Position | 87981204 | 87981896 | 87983053 | 87986431 | 87998880 | 88002203 | 88004329 | 88019566 | 88030744 |
| Alleles | G/A | C/A | G/A | A/G | T/C | A/C | C/T | T/C | C/T |
| 112111111 | A | A | G | A | T | A | T | T | T |
| 112111112 | A | A | G | A | T | A | T | T | C |
| 112211122 | A | A | G | G | T | A | T | C | C |
| 112222212 | A | A | G | G | C | C | C | T | C |
| 121222222 | A | C | A | G | C | C | C | C | C |
| 122111111 | A | C | G | A | T | A | T | T | T |
| 122111112 | A | C | G | A | T | A | T | T | C |
| 211222222 | G | A | A | G | C | C | C | C | C |
| 212111111 | G | A | G | A | T | A | T | T | T |
| 212111212 | G | A | G | A | T | A | C | T | C |
| 212222212 | G | A | G | 6 | C | C | C | T | C |

DNA alleles used in haplotypes (TAF4)

| SeqID | 22583 | 22584 | 22585 |
|---|---|---|---|
| Position | 60083924 | 60091799 | 60095481 |
| Alleles | C/T | A/G | A/G |
| 211 | C | A | A |
| 122 | T | G | G |
| 221 | C | G | A |
| 111 | T | A | A |
| 222 | C | G | G |
| 212 | C | A | G |
| 112 | T | A | G |

DNA alleles used in haplotypes (SLC6A14)

| SeqID | 23307 | 23308 | 23309 | 23310 | 23311 |
|---|---|---|---|---|---|
| Position | 115464677 | 115465239 | 115479909 | 115480867 | 115485218 |
| Alleles | A/C | A/G | A/C | G/A | C/T |
| 12122 | A | G | A | G | C |
| 12121 | A | G | A | G | T |

| SeqId | 11406 |
|---|---|
| Position | 115465239 |
| Alleles | A/G |
| RISK ALLELE | A |
| 1 | |
| PROTECTIVE | G |
| ALLELE 2 | |

DNA alleles used in haplotypes (ODZ3)

| SeqID | 15723 | 15724 | 15725 | 15726 | 15727 |
|---|---|---|---|---|---|
| Position | 183922396 | 183923229 | 183926660 | 183928473 | 183928541 |
| Alleles | A/G | A/C | A/G | T/C | A/G |
| 22122 | G | C | A | C | G |
| 12121 | A | C | A | C | A |
| 21121 | G | A | A | C | A |
| 12122 | A | C | A | C | G |
| 21221 | G | A | G | C | A |
| 22221 | G | C | G | C | A |
| 22112 | G | C | A | T | G |

DNA alleles used in haplotypes (ODZ2)

| SeqID | 16305 | 16306 | 16307 | 16308 | 16309 | 16310 | 16311 |
|---|---|---|---|---|---|---|---|
| Position | 166726668 | 166730514 | 166741180 | 166741993 | 166753729 | 166756680 | 166770180 |
| Alleles | A/G | A/G | T/C | A/C | T/G | T/G | T/G |
| 1211122 | A | G | T | A | T | G | G |
| 2211122 | G | G | T | A | T | G | G |
| 2122112 | G | A | C | C | T | T | G |
| 1222121 | A | G | C | C | T | G | T |
| 1122212 | A | A | C | C | G | T | G |
| 1122112 | A | A | C | C | T | T | G |
| 1111112 | A | A | T | A | T | T | G |
| 1111122 | A | A | T | A | T | G | G |
| 1222122 | A | G | C | C | T | G | G |
| SeqID | 16321 | 16322 | 16323 | 16324 | 16325 | 16326 | 16327 |
| Position | 166975676 | 166988514 | 166992037 | 166992322 | 166996825 | 167002992 | 167012099 |
| Alleles | A/G | A/G | T/C | T/C | A/C | T/C | T/C |
| 1222112 | A | G | C | C | A | T | C |
| 2221111 | G | G | C | T | A | T | T |
| 1221222 | A | G | C | T | C | C | C |
| 1221111 | A | G | C | T | A | T | T |
| 1212111 | A | G | T | C | A | T | T |
| 2121111 | G | A | C | T | A | T | T |
| 1221112 | A | G | C | T | A | T | C |
| 1211111 | A | G | T | T | A | T | T |
| 2111111 | G | A | T | T | A | T | T |
| 1222111 | A | G | C | C | A | T | T |
| 1222222 | A | G | C | C | C | C | C |
| 2122222 | G | A | C | C | C | C | C |
| 1221211 | A | G | C | T | C | T | T |
| 2211122 | G | G | T | T | A | C | C |
| 2122112 | G | A | C | C | A | T | C |
| 1211122 | A | G | T | T | A | C | C |
| 2111122 | G | A | T | T | A | C | C |

[0435] 6. Gender Specific Analyses

[0436] The total sample of 459 trios was subdivided into those with male affected children (368 trios) and those with female affected children (91 trios) and analyzed separately. A complete genome wide analysis was redone on each separate sample and genome wide significance was recalculated for each.

[0437] 7. Sub-Phenotype Analysis

[0438] Trios with affected children who were characterized by the mainly inattentive subphenotype of ADHD (162 trios) as determined by the computerized version of the Diagnostic Interview Schedule for Children (DISC-4) according to DSM-IV criteria were analyzed separately in a second genome wide scan and genome wide significance for this scan was determined separately as well.

[0439] Trios with affected children were diagnosis as determined by the computerized version of the Diagnostic Interview Schedule for Children (DISC-4) according to DSM-IV criteria were analyzed separately in a second genome wide scan and genome wide significance for this scan was determined separately as well. It can be subdivided into three different subtypes:
[0440] Attention-deficit/hyperactivity disorder, predominantly inattentive type (mainly inattentive, 162 trios)
[0441] Attention-deficit/hyperactivity disorder, predominantly hyperactive-impulsive type (mainly hyperactive of ADHD, 36 trios)
[0442] Attention-deficit/hyperactivity disorder, combined type (combined, 261 trios)

### Example 5

### Gene Identification and Characterization

[0443] A series of gene characterization was performed for each candidate region described in Table 1. Any gene or EST mapping to the interval based on public map data or proprietary map data was considered as a candidate ADHD disease gene. The approach used to identify all genes located in the critical regions is described below.

### Public Gene Mining

[0444] Once regions were identified using the analyses described above, a series of public data mining efforts were undertaken, with the aim of identifying all genes located within the critical intervals as well as their respective structural elements (i.e., promoters and other regulatory elements, UTRs, exons and splice sites). The initial analysis relied on annotation information stored in public databases (e.g. NCBI, UCSC Genome Bioinformatics, Entrez Human Genome Browser, OMIM—see below for database URL information). Table 2 lists the genes that have been mapped to the candidate regions.

[0445] For some genes the available public annotation was extensive, whereas for others very little was known about a gene's function. Customized analysis was therefore performed to characterize genes that corresponded to this latter class. Importantly, the presence of rare splice variants and artifactual ESTs was carefully evaluated. Subsequent cluster analysis of novel ESTs provided an indication of additional gene content in some cases. The resulting clusters were graphically displayed against the genomic sequence, providing indications of separate clusters that may contribute to the same gene, thereby facilitating development of confirmatory experiments in the laboratory. While much of this information was available in the public domain, the customized analysis performed revealed additional information not immediately apparent from the public genome browsers.

[0446] A unique consensus sequence was constructed for each splice variant and a trained reviewer assessed each alignment. This assessment included examination of all putative splice junctions for consensus splice donor/acceptor sequences, putative start codons, consensus Kozak sequences and upstream in-frame stops, and the location of polyadenylation signals. In addition, conserved noncoding sequences (CNSs) that could potentially be involved in regulatory functions were included as important information for each gene. The genomic reference and exon sequences were then archived for future reference. A master assembly that included all splice variants, exons and the genomic structure was used in subsequent analyses (i.e., analysis of polymorphisms). Table 3 lists gene clusters based on the publicly available EST and cDNA clustering algorithm, ECGene.

[0447] An important component of these efforts was the ability to visualize and store the results of the data mining efforts. A customized version of the highly versatile genome browser GBrowse (http://www.gmod.org/) was implemented in order to permit the visualization of several types of information against the corresponding genomic sequence. In addition, the results of the statistical analyses were plotted against the genomic interval, thereby greatly facilitating focused analysis of gene content.

### Computational Analysis of Genes and GeneMaps

[0448] In order to assist in the prioritization of candidate genes for which minimal annotation existed, a series of computational analyses were performed that included basic BLAST searches and alignments to identify related genes. In some cases this provided an indication of potential function. In addition, protein domains and motifs were identified that further assisted in the understanding of potential function, as well as predicted cellular localization.

[0449] A comprehensive review of the public literature was also performed in order to facilitate identification of information regarding the potential role of candidate genes in the pathophysiology of ADHD disease. In addition to the standard review of the literature, public resources (Medline and other online databases) were also mined for information regarding the involvement of candidate genes in specific signaling pathways. A variety of pathway and yeast two hybrid databases were mined for information regarding protein-protein interactions. These included BIND, MINT, DIP, Interdom, and Reactome, among others. By identifying homologues of genes in the ADHD candidate regions and exploring whether interacting proteins had been identified already, knowledge regarding the GeneMaps for ADHD disease was advanced. The pathway information gained from the use of these resources was also integrated with the literature review efforts, as described above.

[0450] Genes identified in the WGAS and subsequent studies for ADHD disease (ADHD) were evaluated using the Ingenuity Pathway Analysis application (IPA, Ingenuity systems) in order to identify direct biological interactions between these genes, and also to identify molecular regulators acting on those genes (indirect interactions) that could be also involved in ADHD. The purpose of this effort was to decipher the molecules involved in contributing to ADHD. These gene interaction networks are very valuable tools in the sense that they facilitate extension of the map of gene products that could represent potential drug targets for ADHD.

### ADHD Genemap and Pathways

[0451] The GWAS and subsequent data mining analyses resulted in a compelling GeneMap that contains networks highly relevant to ADHD as well as many genes under neuronal communication. Many of the identified regions contain genes involved in biologically relevant pathways: serotonin pathway, glutamate pathway, GABA pathway, dopamine pathway, Wnt signaling, T cell signaling and neuronal potentiation. The emerging GeneMap includes signaling pathways in brain development, brain plasticity, neuronal communication, behavior, memory, anxiety and aggressiveness. Interestingly, some identified hits contain genes that tend to confirm observations that link ADHD and eyes disorders.

[0452] Neuronal communication and Synaptic transmission: Although the etiology of ADHD is currently unknown, considerable evidence implicates the catecholaminergic systems. In our GWAS, several genes are link to neurotransmission. For example, SLC6A14 is a neurotransmitter (tryptophan) transporter. Tryptophan is a precursor of serotonin which has been associated with ADHD. GRID1 (glutamate receptor) and KCNAB1 (potassium voltage-gated channel) are both involved in excitatory synaptic transmission. It is also known that KCNAB1 interacts with SNAP25, a recognized candidate gene for ADHD. TAC4 is a neurotransmitter involved in synaptic plasticity. GABRG2 is the receptor for GABA, the major inhibitory neurotransmitter in the brain. SLC6A14, GRID1, KCNAB1, TAC4 and GABRG2 (mainly inattentive subphenotype) are all genes found in our GWAS, along with CYFIP1, ARHGAP22, ODZ2 and ODZ3. CYFIP has a role in neuronal connectivity: it has been shown that CYFIP mutations affect axons and synapses leading to neuronal connectivity defects. ODZ2 and ODZ3 are both adaptor in developing and adult CNS, transported from cell body to axon, having a function in neuronal communication. ARHGAP22 is a Rho GTPase activating protein. In the CNS, Rho GTPases regulate multiple signaling pathways that influence neuronal development: Rho GTPases modulate neuronal growth cone remodeling, synaptic neurotransmitter release, dendritic spine morphogenesis, synapse formation and axonal guidance. In addition to their effects on neuronal physiology, Rho GTPases are also key regulators of neuron survival. This is biologically relevant for ADHD.

[0453] Brain development, Function and Plasticity; Neuronal plasticity requires actin cytoskeleton remodeling and local protein translation in response to extracellular signals. Mutations affecting either pathway produce neuronal connectivity defects in model organisms and mental retardation in humans.

[0454] ARHGAP22, CD247, SYNE1, MYST2, S100B (from conditional analyses), THRB and AKAP12 (both from conditional analyses), EPHA5 and FGF7 (both from mainly inattentive subphenotype) are all genes found in our GWAS that are linked to brain development and plasticity.

[0455] ARHGAP22 is a Rho GTPases and this pathway control actin reorganization (needed for neuronal plasticity). CD247 has a role in neuronal development and plasticity, and also in neuronal signaling and synaptic connectivity. SYNE1 is a scaffold protein with a potential role in neuromuscular junction and development. MYST2 is a transcriptional regulator involved in adult neurogenesis and brain plasticity. S100B, a neurotrophic factor, is also a neuron survival protein during development of the central nervous system. S100 proteins influence cellular response along the calcium-signal-transduction pathway. Several disorders are linked to altered calcium levels. S100B has been linked to several neurological diseases, including Alzheimer's disease, Down's syndrome and epilepsy. THRB is a nuclear receptor that has been associated with ADHD in linkage studies by other group and is involved in brain development and function. Thyroid hormones are important during development of the mammalian brain, acting on migration and differentiation of neuronal cells, synaptogenesis, and myelination. The thyroid hormones play a critical role in brain development, and thyroid disorders have been linked to a variety of psychiatric and neuropsychological disorders, including learning deficits, impaired attention, anxiety, and depression. EPHA5 and EPH-related receptors have been implicated in mediating development of the nervous system, and also as mediators of plasticity in the adult mammalian brain. FGF7, a growth factor, promotes presynaptic differentiation. AKAP12 is a scaffold protein involved in the localization for protein kinases during neuronal development. All of these genes are biologically relevant for ADHD.

[0456] Behavior; ADHD is a neuropsychiatric condition characterized by hyperactive-impulsive behavior and persistent inattention. Individuals with this condition experience social and academic dysfunction. In our GWAS, we found several genes related to behavior: SLC6A14, GRID1, TAC4, FZD10, CYP1B1, PRKCE (from conditional analyses), SSTR2 and NBN (both from mainly inattentive subphenotype).

[0457] Already mentioned, SLC6A14 is a neurotransmitter transporter, involved in the transport of tryptophan, the precursor of serotonin which has been associated with ADHD. Serotonin plays an important role in the regulation of mood and appetite and low levels have been associated with depression and anxiety. GRID1, a glutamate receptor, has also been reported to have a role in anxiety. The role of glutamate in anxiety disorders is becoming more recognized. Glutamate is ubiquitous within the central nervous system and has been shown to play important roles in many brain processes, including neurodevelopment (differentiation, migration and survival), learning (long term potentiation and depression), neurodegeneration (Alzheimer'.s disease) and more recently anxiety disorders. TAC4, a neurotransmitter, is expressed in areas of the brain implicated in depression, anxiety, and stress, and has a role in abnormal social behaviors in rats. PRKCE is a potential target for anxiety. FDZ10 is a receptor involved behavior and social interaction. SSTR2 is the somatostatin receptor and it has been shown that decreased concentrations of somatostatin were found in disruptive behavior disorder patients. CYP1B1 is an enzyme involved in the synthesis of steroid and it is known that sex steroid hormone gene polymorphisms and depressive symptoms are involved in women at midlife. CYP1B1 also binds estrogen receptor which is involved in psychiatric disorders. All of these genes are biologically relevant for ADHD.

### ADHD and Eye

[0458] It is important to consider that all those different genes are expressed in different tissues. Even if the majority of our genes found are expressed in the brain, maybe they are in different cell structure and are not interacting together. It is interesting to look at one specific tissue and look at the genes found in that specific tissue and their relation.

[0459] One another example to connect genes is by looking at their tissues expression and tends to link genes according to that. Beside the brain, one interesting example in ADHD is the eye. Interesting observations may link ADHD to eye related problems. It is known that there is a potential relationship between convergence insufficiency, an eye disorder that normally affects less than 5% of children, and ADHD. The symptoms of convergence insufficiency can make it hard to keep both eyes pointed and focused at a near target, making it difficult for a child to concentrate on extended reading and overlap with those of ADHD. Children with the disorder, convergence insufficiency are 3 times more likely to be diagnosed with ADHD than children without the disorder. It account for 16% incidence in ADHD population.

[0460] Interestingly, one of the genes from the GWAS is a gene involved in visual perception; IMPG1 (interphotoreceptor matrix proteoglycan 1, full cohort and male analysis). It is an eye specific structural adaptor that participates in the formation of the ordered interphotoreceptor matrix lattice that surrounds photoreceptors in the outer retinal surface. It has been shown that a mutation in the IMPG1 gene may play a causal role in benign concentric annular macular dystrophy (BCAMD). The BCAMD phenotype is initially characterized by parafoveal hypopigmentation and good visual acuity, but progresses to a retinitis pigmentosa-like phenotype.

[0461] Another gene from the GWAS is SYNE1. It is a known protein associated with an orphan disease (Cerebral ataxia) discovered in Quebec. One of the associated features is minor abnormalities in ocular saccades and pursuit.

[0462] Another gene from the GWAS coincides with a specific protein (COL4A3, male analysis) component of the basement membrane and have also been associated with an orphan disease, the Alport syndrome, which has features as muscular contractures and retinal arterial tortuosities. Up to 15% of Alport syndrome cases represent the autosomal recessive form due to mutations in either the COL4A3 or the COL4A4 gene.

[0463] Coincidentally, in a recent study aiming to investigate visual function and ocular features in children with ADHD, researchers came to the conclusion that these children's had a high frequency of opthalmologic findings, which were not significantly improved with stimulants. They presented subtle morphological changes of the optic nerve and retinal vasculature, indicating an early disturbance of the development of these structures. They found smaller optic discs and neuroretinal rim areas and decreased tortuosity of retinal arteries than that of controls. It is also important to mention here that the observed subtle morphological changes are very supportive of the presence of the IMPG1 gene in our best hits list.

[0464] Furthermore, the specific component of the basement membrane (COL4A3) has also been associated in another rare eye disease study with immunohistochemical evidence of ectopic expression of this protein in corneal endothelium. In this disease, researchers showed presence of a complex (core plus secondary) binding site for specific a transcription factor (TCF8) in the promoter of our target candidate (COL4A3). This transcription factor contains a zinc-finger homeodomain and coincidentally another protein, a zinc metalloprotease, is known to act directly on our candidate (COL4A3). The zinc metalloproteases are a diverse group of enzymes which are becoming increasingly important in a variety of biological systems. Their major function is to break down proteins. Interestingly, numerous controlled studies report cross-sectional evidence of lower zinc tissue levels (serum, red cells, hair, urine, nails) in children who have ADHD, compared to normal controls and population norms. In a recent study researchers have observed that the plasma zinc levels were significantly lower in ADHD groups than controls. Also, zinc monotherapy was significantly superior to placebo in reducing symptoms of hyperactivity, impulsivity and impaired socialization in patients with ADHD, suggesting a role of zinc deficiency in the pathogenesis of ADHD.

[0465] Moreover cardiac arrhythmia and brain MRI abnormalities were also observed in association with the defect of this specific basement membrane component (COL4A3). Another identified gene, from conditional analyses (AKAP6), a scaffold protein, is expressed in various brain regions and also in cardiac and skeletal muscle. One of the most prescribed medications to treat ADHD (amphetamine, Ritalin) has been recently reported to cause serious heart problems. Thus in the Genemap, in addition to biologically relevant pathways involved in neurotransmission a brain development and behavior, we have also identified genes that may be involved in cardiac side effects.

[0466] Other GWAS gene in the Genemap is CYP1B1, a member of the cytochrome P450 superfamily of enzymes. The cytochrome P450 proteins are monooxygenases which catalyze many reactions involved in drug metabolism and synthesis of cholesterol, steroids and other lipids. Mutations in this gene have been associated with primary congenital glaucoma; therefore it is thought that the enzyme also metabolizes a signaling molecule involved in eye development, possibly a steroid. Studies on CYP1B1 indicate its requirement for normal eye development, both in human and mouse. The distribution of the enzyme in the mouse eye is in three regions, which may reflect three different, perhaps equally important, functions in this organ. Its presence in the inner ciliary and lens epithelia appears to be necessary for normal development of the trabecular meshwork and its function in regulating intraocular pressure. Its expression in the retinal ganglion and inner nuclear layers may reflect a role in maintenance of the visual cycle. Its expression in the corneal epithelium may indicate a function in metabolism of environmental xenobiotics. Identification of CYP1B1 as the gene affected in primary congenital glaucoma was the first example in which mutations in a member of the cytochrome P450 superfamily results in a primary developmental defect. At first, it was speculated that CYP1B1 participates in the metabolism of an as-yet-unknown biologically active molecule that is a participant in eye development. Later, it has been demonstrated that a stable protein product is produced in the affected subjects, and that the mutations result in a product lacking between 189 and 254 amino acids from the C terminus. This segment harbors the invariant cysteine of all known cytochrome P450 amino sequences; in CYP1B1 it is cys470. It has been demonstrated that a cytochrome-P450-dependent arachidonate metabolite inhibits Na+, K+-ATPase in the cornea in regulating corneal transparency and aqueous humor secretion. This finding is consistent with the clouding of the cornea and increased intraocular pressure, the 2 major diagnostic criteria for primary congenital glaucoma. Also reported that mice deficient in CYP1B1 have ocular drainage structure abnormalities resembling those reported in human primary congenital glaucoma patients.

[0467] In summary, this is one example describing interesting observations using only 5 genes from our discoveries (IMPG1, SYNE1, COL4A3, AKAP6 and CYP1B1) to build potential connections aiming to support link between, ADHD, eye problems and the GWAS discoveries.

### Expression Studies

[0468] In order to determine the expression patterns for genes, relevant information was first extracted from public databases. The UniGene database, for example, contains information regarding the tissue source for ESTs and cDNAs contributing to individual clusters. This information was extracted and summarized to provide an indication in which tissues the gene was expressed. Particular emphasis was placed on annotating the tissue source for bona fide ESTs, since many ESTs mapped to Unigene clusters are artifactual. In addition, SAGE and microarray data, also curated at NCBI (Gene Expression Omnibus), provided information on expression profiles for individual genes: Particular emphasis was placed on identifying genes that were expressed in tissues known to be involved in the pathophysiology of ADHD. To complement available information about the expression pattern of candidate disease genes, a RT-PCR based semi-quantitative gene expression profiling method was used.

[0469] Total human RNA samples from 24 different tissues Total RNA sample were purchased from commercial sources (Clontech, Stratagene) and used as templates for first-strand cDNA synthesis with the High-Capacity cDNA Archive kit (Applied Biosystems) according to the manufacturer's instructions. A standard PCR protocol was used to amplify genes of interest from the original sample (50 ng cDNA); three serial dilutions of the cDNA samples corresponding to 5, 0.5 and 0.05 ng of cDNA were also tested. PCR products were separated by electrophoresis on a 96-well agarose gel containing ethidium bromide followed by UV imaging. The serial dilutions of the cDNA provided semi-quantitative determination of relative mRNA abundance. Tissue expression profiles were analyzed using standard gel imaging software (AlphaImager 2200); mRNA abundance was interpreted according to the presence of a PCR product in one or more of the cDNA sample dilutions used for amplification. For example, a PCR product present in all the cDNA dilutions (i.e. from 50 to 0.05 ng cDNA) was designated ++++ while a PCR product only detectable in the original undiluted cDNA sample (i.e., 50 ng cDNA) was designated as + or +/−, for barely detectable PCR products (see Table 38). For each target gene, one or more gene-specific primer pairs were designed to span at least one intron when possible. Multiple primer-pairs targeting the same gene allowed comparison of the tissue expression profiles and controlled for cases of poor amplification.

1.-38. (canceled)

39. A method of detecting susceptibility to ADHD disease comprising detecting at least one mutation or polymorphism in the nucleic acid molecule selected from Table 2-4 in a patient.

40. The method of claim 39, wherein said method comprises hybridizing a probe to said patient's sample of DNA or RNA under stringent conditions which allow hybridization of said probe to nucleic acid comprising said mutation or polymorphism, wherein the presence of a hybridization signal indicates the presence of said mutation or polymorphism in at least one gene from Table 2-4.

41.-48. (canceled)

49. The method of claim 39, wherein the mutation is selected from the group consisting of at least one of the SNPs from Tables 5-37, alone or in combination.

50. (canceled)

52. A method of diagnosing susceptibility to ADHD disease in an individual, comprising screening for an at-risk haplotype of at least one gene or gene region from Table 2-4, that is more frequently present in an individual susceptible to ADHD disease compared to a control individual, wherein the presence of the at-risk haplotype is indicative of a susceptibility to ADHD disease.

53. The method of claim 52 wherein the at-risk haplotype is indicative of increased risk for ADHD disease.

54. The method of claim 53, wherein the risk is increased at least about 20%.

55. The method of claim 52, wherein the at-risk haplotype is characterized by the presence of at least one single nucleotide polymorphism from Tables 5-37.

56.-65. (canceled)

66. A drug screening assay comprising: a) administering a test compound to an animal having ADHD disease, or a cell population isolated therefrom; and (b) comparing the level of gene expression of at least one gene from Table 2-4 in the presence of the test compound with the level of said gene expression in normal cells; wherein test compounds which provide the level of expression of one or more genes from Table 2-4 similar to that of the normal cells are candidates for drugs to treat ADHD disease.

67.-80. (canceled)

81. A method for predicting the efficacy of a drug for treating ADHD disease in a human patient, comprising: a) obtaining a sample of cells from the patient; b) obtaining a set of genotypes from the sample, wherein the set of genotypes comprises genotypes of one or more polymorphic loci from Tables 2-37; and c) comparing the set of genotypes of the sample with a set of genotypes associated with efficacy of the drug, wherein similarity between the set of genotypes of the sample and the set of genotypes associated with efficacy of the drug predicts the efficacy of the drug for treating ADHD disease in the patient.

82.-84. (canceled)

85. The method of claim 81, wherein the set of genotypes from the sample comprises genotypes of at least two of the polymorphic loci listed in Tables 2-37.

86. The method of claim 81 wherein the set of genotypes from the sample is obtained by hybridization to allele-specific oligonucleotides complementary to the polymorphic loci from Tables 2-37, wherein said allele-specific oligonucleotides are contained on a microarray.

87. The method of claim 86, wherein the oligonucleotides comprise nucleic acid molecules at least 95% identical to SEQ ID from Tables 2-37.

88.-117. (canceled)

118. A method for identifying a gene that regulates drug response in ADHD disease, comprising: (a) obtaining a gene expression profile for at least one gene from Table 2-4 in a resident tissue cell induced for a proinflammatory like state in the presence of the candidate drug; and (b) comparing the expression profile of said gene to a reference expression profile for said gene in a cell induced for the proinflammatory like state in the absence of the candidate drug, wherein genes whose expression relative to the reference expression profile is altered by the drug may identifies the gene as a gene that regulates drug response in ADHD disease.

119.-137. (canceled)

138. A method of assessing a patient's risk of having or developing ADHD disease, comprising (a) determining a genotype for at least one polymorphic locus from Tables 2-37 in a patient; (b) comparing said genotype of (a) to a genotype for at least one polymorphic locus from Tables 2-37 that is associated with ADHD disease; and (c) assessing the patient's risk of having or developing ADHD disease, wherein said patient has a higher risk of having or developing ADHD disease if the genotype for at least one polymorphic locus from Tables 2-37 in said patient is the same as said genotype for at least one polymorphic locus from Tables 2-37 that is associated with ADHD disease.

139.-140. (canceled)

141. The method of claim 138, wherein the at least one polymorphic locus is associated a gene listed in any one of Tables 2 to 4.

142. The method of claim 138, wherein the at least one polymorphic locus comprises a single nucleotide polymorphism listed in any one of Tables 5.1, 6.1, 7.1, 8.1, 9.1, 10.1, 11.1, 12.1, 13.1, 14.1, 15.1, 16.1, 17.1, 18.1, 19.1, 20.2, 21.2, 22.2, 23.1, 23.2, 24.2, 25.2, 26.2, 27.2, 28.2, 29.1, 29.2, 30.2, 31.1, 31.2, 32.2, 33.2, 34.2, 35.1, 35.2, 36.2, 37.1 and 37.2.

143. The method of claim 138, wherein the at least one polymorphic locus comprises an haplotype listed in any one of Tables 5.2, 6.2, 7.2, 8.2, 9.2, 10.2, 11.2, 12.2, 13.2, 14.2, 15.2, 16.2, 17.2, 18.2, 19.2, 20.3, 21.3, 22.3, 23.3, 24.3, 25.3, 26.3, 27.3, 28.3, 29.3, 30.3, 31.3, 32.3, 33.3, 34.3, 35.3, 36.3 and 37.3.

144. The method of claim 138, wherein the genotype comprises (i) a risk haplotype at locus GRID-1 and (ii) a SNP listed in Table 6.1 or an haplotype listed in Table 6.2.

145. The method of claim 138, wherein the genotype comprises (i) a risk haplotype at locus TAF4 and (ii) a SNP listed in Table 7.1 or an haplotype listed in Table 7.2.

146. The method of claim 138, wherein the genotype comprises (i) a protective haplotype at locus SLC6A14 and (ii) a SNP listed in Table 8.1 or an haplotype listed in Table 8.2.

147. The method of claim 138, wherein the genotype comprises (i) a risk haplotype at locus SLC6A14 and (ii) a SNP listed in Table 9.1 or an haplotype listed in Table 9.2.

148. The method of claim 138, wherein the genotype (i) lacks a protective haplotype at locus LOC643182 and (ii) comprises a SNP liste in Table 10.1 or 15.1 or an haplotype listed in Table 10.2. or 15.2

149. The method of claim 138, wherein the genotype (i) lacks a protective haplotype at locus KCNAB1 and (ii) comprises a SNP listed in Table 11.2 or an haplotype listed in Table 11.2.

150. The method of claim 138, wherein the genotype (i) lacks a protective haplotype at locus LOC643182 and (ii) comprises a SNP listed in Table 12.1 or an haplotype listed in Table 12.2.

151. The method of claim 138, wherein the genotype (i) lacks a protective haplotype at locus TAF4 and (ii) comprises a SNP listed in Table 13.1 or an haplotype listed in Table 13.2.

152. The method of claim 138, wherein the genotype (i) lacks a risk haplotype at locus TAF4 and (ii) comprises a SNP listed in Table 14.1 or an haplotype listed in Table 14.2.

153. The method of claim 138, wherein the patient is a female patient and the genotype comprises a SNP listed in Table 16.1 or an haplotype listed in Table 16.2. [support paragraph 414]

154. The method of claim 138, wherein the genotype (i) lacks a risk haplotype at locus SLC6A14 and (ii) comprises a SNP listed in Table 17.1 or 19.1 or an haplotype listed in Table 17.2 or 19.2.

155. The method of claim 138, wherein the genotype (i) lacks a protective haplotype at locus SLC6A14 and (ii) comprises a SNP listed in Table 18.1 or an haplotype listed in Table 18.2.

148. The method of claim 138, wherein the genotype comprises (i) a protective haplotype at locus ODZ3 and (ii) a SNP listed in Table 20.2 or 22.2 or an haplotype listed in Table 20.3 or 22.3.

147. The method of claim 138, wherein the genotype comprises (i) a risk haplotype at locus ODZ3 and (ii) a SNP listed in any one of Tables 21.2, 23.2 or 24.2 or an haplotype listed in any one of Tables 21.3, 23.3 and 24.3.

150. The method of claim 138, wherein the genotype comprises (i) a protective haplotype at locus ODZ2 and (ii) a SNP listed in Table 22.2 or an haplotype listed in Table 22.3.

151. The method of claim 138, wherein the genotype (i) lacks a risk haplotype at locus ODZ3 and (ii) comprises a SNP listed in Table 25.2 or 30.2 or an haplotype listed in Table 25.3 or 30.3.

152. The method of claim 138, wherein the genotype (i) lacks a protective haplotype at locus ODZ2 and (ii) comprises a SNP listed in Table 26.2 or an haplotype listed in Table 26.3.

153. The method of claim 138, wherein the patient is a male patient and the genotype comprises a SNP listed in Table 27.2 or a haplotype listed in Table 27.3.

154. The method of claim 138, wherein the genotype (i) lacks a risk haplotype at locus ODZ2 and (ii) comprises a SNP listed in Table 28.2 or an haplotype listed in Table 28.3.

155. The method of claim 138, wherein the genotype (i) lacks a protective haplotype at locus ODZ2 and (ii) comprises a SNP listed in Table 29.2 or an haplotype listed in Table 29.3.

156. The method of claim 138, wherein the genotype (i) lacks a risk haplotype at locus GRID-1 and (ii) comprises a SNP listed in Table 31.2 or an haplotype listed in Table 31.1.

157. The method of claim 138, wherein the patient is of the combined sub-type and the genotype comprises a SNP listed in Table 32.2 or an haplotype listed in Table 32.3.

158. The method of claim 138, wherein the patient is of the inattentive sub-type and the genotype comprises a SNP listed in Table 33.2 or an haplotype listed in Table 33.3.

159. The method of claim 138, wherein the patient is not of the combined sub-type and the genotype comprises a SNP listed in Table 34.2 or an haplotype listed in Table 34.3.

160. The method of claim 138, wherein the patient is not of the hyperactive sub-type and the genotype comprises a SNP listed in Table 35.2 or an haplotype listed in Table 35.3.

161. The method of claim 138, wherein the patient is not of the combined sub-type and the genotype comprises a SNP listed in Table 36.2 or an haplotype listed in Table 36.3.

162. The method of claim 138, wherein the genotype comprises (i) a risk haplotype at locus LOC643182 and (ii) a SNP listed in Table 37.2 or an haplotype listed in Table 31.2.

The application's sequence listing, which the Patent Office published only in electronic form, follows.

SEQUENCE LISTING (23638 sequences)

SEQ ID NO: 1 - DNA, 2111 bp, Homo sapiens
acagcccggcccctgccctgcaccaggccactgccctgttggtgaggagggtcggaggggcgacctccctgccccctgctccaagctccccacccccacctggaacctgccggcaggaagcctggccctggagggtggtcacggcccctccccagatgcccggcccacgagaggccaatggggagcagccaggaggagggactccggtgtcagccaagccagccagaccacgacgcagatggacactgtgggccggacctggagggggcggaaagagcctctgccacacccggaccccctgggctcctgaacagccaccggcctgcagactcggatgacactaacgccgccgggccctcagctgccctcctggaggggctcctgctggggggtgggaagccatcgccccacagcacccggccggggcccttcttctacattggaggcagcaacggggccacaatcatcagctcctactgcaaaagcaagggctggcagcgcatccatgacagccgccgggacgactacacgctgaagtggtgtgaggtcaagagccgagacagctacggcagcttccgggaaggagagcagctgctgtaccagcttcccaacaacaagctcctcaccaccaagatcgggctgctcagcacccttcggggacgggcacgggccatgagcagggccagcaaggtgccggggggggtccaggccaggctggaaaaggacgcagcagcgcccgccctggaggacctcccgtggacaagcccaggatacctcaggccacagagggtcctgagaatggaagagtttttcccagagacctaccgcctggacctcaaacacgagagagaggcctttttcaccttgtttgatgaaacccagatatggatctgcaagcccacagcctccaaccagggcaaaggcatcttcctgctccggaaccaggaggaagttgccgccctgcaggccaagacccggagcatggaggacgaccccatccaccacaagacgccgttccgggggcctcaggcgcgggtggtgcagaggtacatccagaacccgctgctggtggacgggagaaagtttgacgtgcgctcctacctgctcattgcctgcaccacaccctacatgatcttctttggccacggctatgctcgcctcacccttagcctttacgacccccattccagcgacctcggcggccacttgaccaaccagttcatgcagaagaagagccctctgtacatgctgctgaaggagcacacggtgtggagcatggaacatctcaaccgctacatcagtgacacgttctggaaggcccggggcctcgccaaggactgggtcttcaccaccctcaaggtgcgtccactgtgccctccagtctgggagtgagatccctcggggcgggggtgtgtggtcaggctgggcaccaggcacacagatgtccgtggcgtgcgtgggcggctgcgctgaagtgtgacctgaccgtgtggaaccaaacccttccagcgtctctgctcacttagctggcagtgcctgtccccagcagccagcaaaggcccggacggaaagcccagtcgggggtctgtcggcacgagtcccgcgggcagcctcgccgtagggtcaggggacagctcggcttcagtgacagccaccatgtgaagagtctttgttcctttcagatcctccacttggcaggcagggccaacagcagcccccgggccaggtgtcctggagcagcagcagctgcccgtgcaggcccggactctccctagctaagggccatgtgcggtggagtgtcctaattttgcagggttcctttctgtgggggtacctgtggggtacttcaaacagccctagcagcaaaggcccttgagcagcgcggtgtgaaactgggataaaaacggggcttggccgaaggacttttatctgtcttggtcaccccggccaggccccggaagcagcagccagggatggtccttcctcacccacaggcgtgtgtcactgtggctgggacggcagcgctcagaggagcctccagttactttcctcacatctcccaaactctctcttaattgcgataattcacagaacataaaattcacgatctt

SEQ ID NO: 2 - protein, 404 aa, Homo sapiens
MGSSQEEGLRCQPSQPDHDADGHCGPDLEGAERASATPGPPGLLNSHRPADSDDTNAAGPSAALLEGLLLGGGKPSPHSTRPGPFFYIGGSNGATIISSYCKSKGWQRIHDSRRDDYTLKWCEVKSRDSYGSFREGEQLLYQLPNNKLLTTKIGLLSTLRGRARAMSRASKVPGGVQARLEKDAAAPALEDLPWTSPGYLRPQRVLRMEEFFPETYRLDLKHEREAFFTLFDETQIWICKPTASNQGKGIFLLRNQEEVAALQAKTRSMEDDPIHHKTPFRGPQARVVQRYIQNPLLVDGRKFDVRSYLLIACTTPYMIFFGHGYARLTLSLYDPHSSDLGGHLTNQFMQKKSPLYMLLKEHTVWSMEHLNRYISDTFWKARGLAKDWVFTTLKVRPLCPPVWE

SEQ ID NO: 3 - DNA, 1214 bp, Homo sapiens
gtctacaccccctcctcacacgcacttcacctgggtcgggattctcaggtcatgaacggtcccagccacctccgggcagggcgggtgaggacggggacggggcgtgtccaactggctgtgggctcttgaaacccgagcatggcacagcacggggcgatgggcgcgtttcgggccctgtgcggcctggcgctgctgtgcgcgctcagcctgggtcagcgccccaccgggggtcccgggtgcggccctgggcgcctcctgcttgggacgggaacggacgcgcgctgctgccgggttcacacgacgcgctgctgccgcgattacccgggcgaggagtgctgttccgagtgggactgcatgtgtgtccagcctgaattccactgcggagacccttgctgcacgacctgccggcaccacccttgtcccccaggccagggggtacagtcccaggggaaattcagttttggcttccagtgtatcgactgtgcctcggggaccttctccgggggccacgaaggccactgcaaaccttggacagactgcacccagttcgggtttctcactgtgttccctgggaacaagacccacaacgctgtgtgcgtcccagggtccccgccggcagagccgcttgggtggctgaccgtcgtcctcctggccgtggccgcctgcgtcctcctcctgacctcggcccagcttggactgcacatctggcagctgaggagtcagtgcatgtggccccgagagacccagctgctgctggaggtgccgccgtcgaccgaagacgccagaagctgccagttccccgaggaagagcggggcgagcgatcggcagaggagaaggggcggctgggagacctgtgggtgtgagcctggccgtcctccggggccaccgaccgcagccagcccctccccaggagctccccaggccgcaggggctctgcgttctgctctgggccgggccctgctcccctggcagcagaagtgggtgcaggaaggtggcagtgaccagcgccctggaccatgcagttcggcggccgcggctgggccctgcaggagggagagagagacacagtcatggcccccttcctcccttgctggccctgatggggtggggtcttaggacgggaggctgtgtccgtgggtgtgcagtgcccagcacgggacccggctgcaggggaccttcaataaacacttgtccagtgaaaaaaaaaaaaaaa

SEQ ID NO: 4 - protein, 241 aa, Homo sapiens
MAQHGAMGAFRALCGLALLCALSLGQRPTGGPGCGPGRLLLGTGTDARCCRVHTTRCCRDYPGEECCSEWDCMCVQPEFHCGDPCCTTCRHHPCPPGQGVQSQGKFSFGFQCIDCASGTFSGGHEGHCKPWTDCTQFGFLTVFPGNKTHNAVCVPGSPPAEPLGWLTVVLLAVAACVLLLTSAQLGLHIWQLRSQCMWPRETQLLLEVPPSTEDARSCQFPEEERGERSAEEKGRLGDLWV

SEQ ID NO: 5 - DNA, 1003 bp, Homo sapiens
gtctacaccccctcctcacacgcacttcacctgggtcgggattctcaggtcatgaacggtcccagccacctccgggcagggcgggtgaggacggggacggggcgtgtccaactggctgtgggctcttgaaacccgagcatggcacagcacggggcgatgggcgcgtttcgggccctgtgcggcctggcgctgctgtgcgcgctcagcctgggtcagcgccccaccgggggtcccgggtgcggccctgggcgcctcctgcttgggacgggaacggacgcgcgctgctgccgggttcacacgacgcgctgctgccgcgattacccgggcgaggagtgctgttccgagtgggactgcatgtgtgtccagcctgaattccactgcggagacccttgctgcacgacctgccggcaccacccttgtcccccaggccagggggtacagtcccaggggaaattcagttttggcttccagtgtatcgactgtgcctcggggaccttctccgggggccacgaaggccactgcaaaccttggacagactgctgctggaggtgccgccgtcgaccgaagacgccagaagctgccagttccccgaggaagagcggggcgagcgatcggcagaggagaaggggcggctgggagacctgtgggtgtgagcctggccgtcctccggggccaccgaccgcagccagcccctccccaggagctccccaggccgcaggggctctgcgttctgctctgggccgggccctgctcccctggcagcagaagtgggtgcaggaaggtggcagtgaccagcgccctggaccatgcagttcggcggccgcggctgggccctgcaggagggagagagagacacagtcatggcccccttcctcccttgctggccctgatggggtggggtcttaggacgggaggctgtgtccgtgggtgtgcagtgcccagcacgggacccggctgcaggggaccttcaataaacacttgtccagtgaaaaaaaaaaaaaaa

SEQ ID NO: 6 - protein, 255 aa, Homo sapiens
MAQHGAMGAFRALCGLALLCALSLGQRPTGGPGCGPGRLLLGTGTDARCCRVHTTRCCRDYPGEECCSEWDCMCVQPEFHCGDPCCTTCRHHPCPPGQGVQSQGKFSFGFQCIDCASGTFSGGHEGHCKPWTDCCWRCRRRPKTPEAASSPRKSGASDRQRRRGGWETCGCEPGRPPGPPTAASPSPGAPQAAGALRSALGRALLPWQQKWVQEGGSDQRPGPCSSAAAAGPCRRERETQSWPPSSLAGPDGVGS

SEQ ID NO: 7 - DNA, 1193 bp, Homo sapiens
gtctacaccccctcctcacacgcacttcacctgggtcgggattctcaggtcatgaacggtcccagccacctccgggcagggcgggtgaggacggggacggggcgtgtccaactggctgtgggctcttgaaacccgagcatggcacagcacggggcgatgggcgcgtttcgggccctgtgcggcctggcgctgctgtgcgcgctcagcctgggtcagcgccccaccgggggtcccgggtgcggccctgggcgcctcctgcttgggacgggaacggacgcgcgctgctgccgggttcacacgacgcgctgctgccgcgattacccgggcgaggagtgctgttccgagtgggactgcatgtgtgtccagcctgaattccactgcggagacccttgctgcacgacctgccggcaccacccttgtcccccaggccagggggtacagtcccaggggaaattcagttttggcttccagtgtatcgactgtgcctcggggaccttctccgggggccacgaaggccactgcaaaccttggacagactgcacccagttcgggtttctcactgtgttccctgggaacaagacccacaacgctgtgtgcgtcccagggtccccgccggcagagccgcttgggtggctgaccgtcgtcctcctggccgtggccgcctgcgtcctcctcctgacctcggcccagcttggactgcacatctggcagctgaggaagacccagctgctgctggaggtgccgccgtcgaccgaagacgccagaagctgccagttccccgaggaagagcggggcgagcgatcggcagaggagaaggggcggctgggagacctgtgggtgtgagcctggccgtcctccggggccaccgaccgcagccagcccctccccaggagctccccaggccgcaggggctctgcgttctgctctgggccgggccctgctcccctggcagcagaagtgggtgcaggaaggtggcagtgaccagcgccctggaccatgcagttcggcggccgcggctgggccctgcaggagggagagagagacacagtcatggcccccttcctcccttgctggccctgatggggtggggtcttaggacgggaggctgtgtccgtgggtgtgcagtgcccagcacgggacccggctgcaggggaccttcaataaacacttgtccagtgaaaaaaaaaaaaaaa

SEQ ID NO: 8 - protein, 234 aa, Homo sapiens
MAQHGAMGAFRALCGLALLCALSLGQRPTGGPGCGPGRLLLGTGTDARCCRVHTTRCCRDYPGEECCSEWDCMCVQPEFHCGDPCCTTCRHHPCPPGQGVQSQGKFSFGFQCIDCASGTFSGGHEGHCKPWTDCTQFGFLTVFPGNKTHNAVCVPGSPPAEPLGWLTVVLLAVAACVLLLTSAQLGLHIWQLRKTQLLLEVPPSTEDARSCQFPEEERGERSAEEKGRLGDLWV

SEQ ID NO: 9 - DNA, 1084 bp, Homo sapiens
cgaggatgtgcgtgggggctcggcggctgggccgcgggccgtgtgcggctctgctcctcctgggcctggggctgagcaccgtgacggggctccactgtgtcggggacacctaccccagcaacgaccggtgctgccacgagtgcaggccaggcaacgggatggtgagccgctgcagccgctcccagaacacggtgtgccgtccgtgcgggccgggcttctacaacgacgtggtcagctccaagccgtgcaagccctgcacgtggtgtaacctcagaagtgggagtgagcggaagcagctgtgcacggccacacaggacacagtctgccgctgccgggcgggcacccagcccctggacagctacaagcctggagttgactgtgccccctgccctccagggcacttctccccaggcgacaaccaggcctgcaagccctggaccaactgcaccttggctgggaagcacaccctgcagccggccagcaatagctcggacgcaatctgtgaggacagggaccccccagccacgcagccccaggagacccagggccccccggccaggcccatcactgtccagcccactgaagcctggcccagaacctcacagggaccctccacccggcccgtggaggtccccgggggccgtgcggttgccgccatcctgggcctgggcctggtgctggggctgctgggccccctggccatcctgctggccctgtacctgctccggagggaccagaggctgccccccgatgcccacaagccccctgggggaggcagtttccggacccccatccaagaggagcaggccgacgcccactccaccctggccaagatctgacctgggcccaccaaggtggacgctgggccccgccaggctggagcccggagggtctgctgggcgagcagggcaggtgcaggccgcctgccccgccacgctcctgggccaactctgcaccgttctaggtgccgatggctgcctccggctctctgcttacgtatgccatgcatacctcctgccccgcgggaccacaataaaaaccttggcagacgggagtctccgaccggcaaaaaaaaaaaaaaaaa

SEQ ID NO: 10 - protein, 277 aa, Homo sapiens
MCVGARRLGRGPCAALLLLGLGLSTVTGLHCVGDTYPSNDRCCHECRPGNGMVSRCSRSQNTVCRPCGPGFYNDVVSSKPCKPCTWCNLRSGSERKQLCTATQDTVCRCRAGTQPLDSYKPGVDCAPCPPGHFSPGDNQACKPWTNCTLAGKHTLQPASNSSDAICEDRDPPATQPQETQGPPARPITVQPTEAWPRTSQGPSTRPVEVPGGRAVAAILGLGLVLGLLGPLAILLALYLLRRDQRLPPDAHKPPGGGSFRTPIQEEQADAHSTLAKI

SEQ ID NO: 11 - DNA, 1985 bp, Homo sapiens
gcaccgcccccgcccgcaagaaagatggcagtggcctgatccgggcccgttggcggcgtcactgacgcttcgctccggtcctcggatcccgagcgcggggaggcagaccgactgtgagctgcttgtccccatcctgcggccgtcctggggacacagagccctccgtggtgcccggggattggattggagccaggacctcacttcctcctctgcccctgcccctgcccctcccagcacctggcccacaccctgcagcccgccccatggtctggccctgggtggcgatggcgtccaggtggggtcccctcattggcctggctccgtgctgcctctggctcctgggggcagtccttctgatggacgcgtctgcacggcctgccaaccactcgtccactcgagagagagtagccaacagggaggagaatgagatcctgcccccagaccacctgaacggggtgaagctggagatggacgggcacctcaatcgcggcttccaccaggaggtcttcctaggcaaggacctgggtggctttgatgaggacgcggagccgcggcggagccggaggaagctgatggtcatcttttccaaggtggatgtgaacactgaccggaagatcagtgccaaggagatgcagcgctggatcatggagaagacggccgagcacttccaggaggccatggaggagagcaagacacacttccgcgccgtggaccctgacggggacggtcacgtgtcttgggacgagtataaggtgaagtttttggcgagtaaaggccatagcgagaaggaggttgccgacgccatcaggctcaacgaggaactcaaagtggacgaggaaacacaggaagtcctggagaacctgaaggaccgctggtaccaggcggacagcccccctgcagacctgctgctgacggaggaggagttcctgtcgttcctccaccccgagcacagccggggaatgctcaggttcatggtgaaggagatcgtccgggacctggaccaggacggtgacaagcagctctctgtgcccgagttcatctccctgcccgtgggcaccgtggagaaccagcagggccaggacattgacgacaactgggtgaaagacagaaaaaaggagtttgaggagctcattgactccaaccacgacggcatcgtgaccgccgaggagctggagagctacatggaccccatgaacgagtacaacgcgctgaacgaggccaagcagatgatcgccgtcgccgacgagaaccagaaccaccacctggagcccgaggaggtgctcaagtacagcgagttcttcacgggcagcaagctggtggactacgcgcgcagcgtgcacgaggagttttgagcgcccggccgcgccccgcgccgccccccacgcaccaccggggcggcctcgcgggtgactccgggctccgtggctgtcccggaccccacctcttccctgccgcccgccaccggccgaccgaccgcggctgccccagttgatgagcggcgtgtcccctctgcagcgcgcaccccggcggggctttggctgtgacgcggtcggggcgcggggctgggctgtggccccgcggcgccgcctcctccctggtccctcgaaatcgtggcatctcacttctgagaacgaaatctcgcttcagtcactctgccgaaggcgctgacggcatcgcggccggaacctctgggcccggcccctcccagggccgccgctccgtgggaaaaaacagctcctccatttccttgaaaactgaacgattattaaaaatagattaaacttcgctggaaatgagtagccaggaagttcaggggagggtgccgggtccttcccgggcctggcgtgtcggagccacccaggtcccgcagctgccgctgagaaaatgcaaatatttgttgtgacaagaatcacatacatttactttaaatatagttgccttttttggtcagcttcaaaaaaaaaaaaaaaaaaaaaaaaaaaaaa

SEQ ID NO: 12 - protein, 362 aa, Homo sapiens
MVWPWVAMASRWGPLIGLAPCCLWLLGAVLLMDASARPANHSSTRERVANREENEILPPDHLNGVKLEMDGHLNRGFHQEVFLGKDLGGFDEDAEPRRSRRKLMVIFSKVDVNTDRKISAKEMQRWIMEKTAEHFQEAMEESKTHFRAVDPDGDGHVSWDEYKVKFLASKGHSEKEVADAIRLNEELKVDEETQEVLENLKDRWYQADSPPADLLLTEEEFLSFLHPEHSRGMLRFMVKEIVRDLDQDGDKQLSVPEFISLPVGTVENQQGQDIDDNWVKDRKKEFEELIDSNHDGIVTAEELESYMDPMNEYNALNEAKQMIAVADENQNHHLEPEEVLKYSEFFTGSKLVDYARSVHEEF

SEQ ID NO: 13 - DNA, 2092 bp, Homo sapiens
ggcgtcccctccgtgaggtcgcgcccgttcgcaccgcccccgcccgcaagaaagatggcagtggcctgatccgggcccgttggcggcgtcactgacgcttcgctccggtcctcggatcccgagcgcggggaggcagaccgactgtgagctgcttgtccccatcctgcggccgtcctggggacacagagccctccgtggtgcccggggattggattggagccaggacctcacttcctcctctgcccctgcccctgcccctcccagcacctggcccacaccctgcagcccgccccatggtctggccctgggtggcgatggcgtccaggtggggtcccctcattggcctggctccgtgctgcctctggctcctgggggcagtccttctgatggacgcgtctgcacggcctgccaaccactcgtccactcgagagagagtagccaacagggaggagaatgagatcctgcccccagaccacctgaacggggtgaagctggagatggacgggcacctcaatcgcggcttccaccaggaggtcttcctaggcaaggacctgggtggctttgatgaggacgcggagccgcggcggagccggaggaagctgatggtcatcttttccaaggtggatgtgaacactgaccggaagatcagtgccaaggagatgcagcgctggatcatggagaagacggccgagcacttccaggaggccatggaggagagcaagacacacttccgcgccgtggaccctgacggggacggtcacgtgtcttgggacgagtataaggtgaagtttttggcgagtaaaggccatagcgagaaggaggttgccgacgccatcaggctcaacgaggaactcaaagtggacgaggaaacacaggaagtcctggagaacctgaaggaccgctggtaccaggcggacagcccccctgcagacctgctgctgacggaggaggagttcctgtcgttcctccaccccgagcacagccggggaatgctcaggttcatggtgaaggagatcgtccgggacctggaccaggacggtgacaagcagctctctgtgcccgagttcatctccctgcccgtgggcaccgtggagaaccagcagggccaggacattgacgacaactgggtgaaagacagaaaaaaggagtttgaggagctcattgactccaaccacgacggcatcgtgaccgccgaggagctggagaacgtgcccacactcccgctgcagccaataggcaccttaaatagccacttcgtgcggctggccgcggagctcggagggggaaaggcgacgctgacctgtgccccgctcgcccgcagagctacatggaccccatgaacgagtacaacgcgctgaacgaggccaagcagatgatcgccgtcgccgacgagaaccagaaccaccacctggagcccgaggaggtgctcaagtacagcgagttcttcacgggcagcaagctggtggactacgcgcgcagcgtgcacgaggagttttgagcgcccggccgcgccccgcgccgccccccacgcaccaccgggggggcctcgcgggtgactccggcctccgtggctgtcccggaccccacctcttctctgccgcccaccaccggccgaccgaccgcggcttccccagttgatgagcggcgtgtcccctctgcagcgcgcaccccggcggggctttggctgtgacgcggtcggggcgcggggctggtctgtggccccgcggcgcgcctcctccctggtccctcgaaatcgtggcatctcacttctgagaacgaaatctcgcttcagtcactctgccgaaggcgctgacggcatcgcggccggaacctctgggcccggcccctcccagggccgccgctccgtgggaaaaaacagctcctccatttccttggaaactgaacgattattaaaaatagataaacttcgctggaaatgagtagccaggaagttcaggggagggtccggggtccttcccggggcctggcgtgtcggaaccacccaggtcccgcagctgcctctgagaaaatccaaatattttttgtgacaagaatcacaaacatttactttaaatataaaaaaaaaaaaaaa

SEQ ID NO: 14 - protein, 348 aa, Homo sapiens
MVWPWVAMASRWGPLIGLAPCCLWLLGAVLLMDASARPANHSSTRERVANREENEILPPDHLNGVKLEMDGHLNRGFHQEVFLGKDLGGFDEDAEPRRSRRKLMVIFSKVDVNTDRKISAKEMQRWIMEKTAEHFQEAMEESKTHFRAVDPDGDGHVSWDEYKVKFLASKGHSEKEVADAIRLNEELKVDEETQEVLENLKDRWYQADSPPADLLLTEEEFLSFLHPEHSRGMLRFMVKEIVRDLDQDGDKQLSVPEFISLPVGTVENQQGQDIDDNWVKDRKKEFEELIDSNHDGIVTAEELENVPTLPLQPIGTLNSHFVRLAAELGGGKATLTCAPLARRATWTP

SEQ ID NO: 15 - DNA, 2793 bp, Homo sapiens
ggcctgggccgccggcccggcgcgggcgccatgaagctgctgcggcgggcgtggcggcggcgggcggcgctaggcctgggcacgctggcgctgtgcggggcggcgctgctctacctggcgcgctgcgcggccgagcccggggaccccagggcgatgtcgggccgcagcccgcctccccccgcgcccgcgcgcgccgccgccttcctggcagtgctggtggccagcgcgccccgcgccgccgagcgccgcagcgtgatccgcagcacgtggcttgcgcggcgcggggccccgggcgacgtgtgggcgcgctttgccgtgggcacggccggcctgggcgccgaggagcggcgcgccctggagcgggagcaggcgcggcacggggacctgctgctgctgcccgcgctgcgcgacgcctacgaaaacctcacggccaaggtgctggccatgctggcctggctggacgagcacgtggccttcgagttcgtgctcaaggcggacgacgactccttcgcgcggctggacgcgctgctggccgagctgcgcgcccgcgagcccgcgcgccgccgccgcctctactggggcttcttctcgggccgcggccgcgtcaagccgggggggcgctggcgcgaggccgcctggcaactctgcgactactacctgccctacgcgctgggcggcggctacgtgctctcggccgacctggtgcactacctgcgcctcagccgcgactacctgcgcgcctggcacagcgaggacgtgtctctgggcgcctggctggcgccggtggacgtccagcgggagcacgacccgcgcttcgacaccgaataccggtcccgcggctgcagcaaccagtacctggtgacgcacaagcagagcctggaggacatgctggagaagcacgcgacgctggcgcgcgagggccgcctgtgcaagcgcgaggtgcagctgcgcctgtcctacgtgtacgactggtccgcgccgccctcgcagtgctgccagagaagggagggcatcccctgagccgccgcggcccggccctccgggacacctgcttcacccggcggcgccttggggcaggtgccgagcgggcgcactacgcccgggccccaaggcccccgtcccgcagccacgcttgtggtcgctgcgtcccggtctgcgtttgggagacccctgggggttgccggggcagcgcgccgtgtccaggtggaggtgcccgttcctggacctcagcgagcctgagccgggcccggccgcacgctgacccccgtgctgtccccgaccggctcacggggctgggctccgatcttccgtgtctcttatcagtggcgtttctcacgtctgcgtctcagatctaacgtggtttcacatcaatccgctttcatgggattttggtctctgtccagtgacttcgtggtaaatgtaactcagtgtttgcttgcgacttatttataaatattgtaagtttgtgtcgatgagtgtaagttggcagtgcgcacgtctcggtttttttacatgatttaaggaaagacttttatgtcagaacttggtgcctgtaccgtcaaccccgctgctgcccgtgtttaaacgcaggagaactttaaaactggccatctatcttttcagtgtacaagtcactgaacccattgtttctttctgaagagactttcctttcaaggcttcccatgggtccgcgccacacagggccggtgctgctttatttcagactctgccccaggttccaggaatccgaaccccggagtgctgacgcggttccccaacttccgccttaagaaaacaggaccagccggcaccaggcccgtctctcacgtactttaacacatccttgaaagcccctcgtttaatgagaaaagcgaacactgcggtccttgccaaagtaaaatgaagctgccccaggacaaggggttaccatgagctccctggagtccgacgcgggttttctctctgggggacctgggtggtccccgctgtggtctttgttgtcccactttgggaccgggtccagtctggggtctagtctcgagcatcagggtcaggctcggggcagggctgggttaggctccgggtcagtcttgccatgggtttgggagcaggtttgggttacttgcgtttgaaggcagcagtggtctcaggaggaagaaacgggggcgggagagagtggtgatctgtggtcagtgggtcagtgacctgcacggtgattctcccacctccaaaaggtaggggtgggactggaggcgtccctaggtcaggccgttgagttcgagctccgatgggccaccttgaatccaggactgaccgcccgtgtgtgcacagtttgttcttggacgaggactcgtgaggatcgagggctggggaccccggtgtgagcaggatggggccctgccctcccgtgggagttgtggactcgagcccaggggctgcccgtcacagcggtgtcccaggtccctgccatccgattttacctgggatgtcttctctggagtttggaattgcttgaggaaccctgcgtgtgcttggagaggccagagggcttgctgagaaccccatggacagtggagagcgggattcgaaccaagggctggactcccacacctctggcctgcgtcgcccagttctttgtggctctgaagaattggccgctgtggaaaagagcaaatgtccgagacccccaacaggaagagtctaaaaatccagtttgcaaccacttctgacctacaaaaaaatggaaatttagtgtttttcagcctaagacattaaatttcatatcagaacaaa

SEQ ID NO: 16 - protein, 329 aa, Homo sapiens
MKLLRRAWRRRAALGLGTLALCGAALLYLARCAAEPGDPRAMSGRSPPPPAPARAAAFLAVLVASAPRAAERRSVIRSTWLARRGAPGDVWARFAVGTAGLGAEERRALEREQARHGDLLLLPALRDAYENLTAKVLAMLAWLDEHVAFEFVLKADDDSFARLDALLAELRAREPARRRRLYWGFFSGRGRVKPGGRWREAAWQLCDYYLPYALGGGYVLSADLVHYLRLSRDYLRAWHSEDVSLGAWLAPVDVQREHDPRFDTEYRSRGCSNQYLVTHKQSLEDMLEKHATLAREGRLCKREVQLRLSYVYDWSAPPSQCCQRREGIP

SEQ ID NO: 17 - DNA, 2267 bp, Homo sapiens
ggttccgccccgcgagcggccatcttggaggctgaggcggcggcggcggcgctgcggcgggttcggtgggcccaatcccggggcggtgcggctgtttcgggcgcgggccccgcttttccgcaccctgctccggcctcgactacggcgagcctgagcgcggcggcggcccacgcgcagcgacagggagagatgagcagcaccagcagtaagagggctccgaccacggcaacccagaggctgaagcaggactaccttcgcattaagaaagacccggtgccttacatctgtgccgagcccctcccttcgaatattctcgagtggcactatgtcgtccgaggcccagagatgaccccttatgaaggtggctattatcatggaaaactaatttttcccagagaatttcctttcaaacctcccagtatctatatgatcactcccaacgggaggtttaagtgcaacaccaggctgtgtctttctatcacggatttccacccggacacgtggaacccggcctggtctgtctccaccatcctgactgggctcctgagcttcatggtggagaagggccccaccctgggcagtatagagacgtcggacttcacgaaaagacaactggcagtgcagagtttagcatttaatttgaaagataaagtcttttgtgaattatttcctgaagtcgtggaggagattaaacaaaaacagaaagcacaagacgaactcagtagcagaccccagactctccccttgccagacgtggttccagacggggagacgcacctcgtccagaacgggattcagctgctcaacgggcatgcgccgggggccgtcccaaacctcgcagggctccagcaggccaaccggcaccacggactcctgggtggcgccctggcgaacttgtttgtgatagttgggtttgcagcctttgcttacacggtcaagtacgtgctgaggagcatcgcgcaggagtgaggcccaggcgccgagacccaaggcgccactgagggcaccgcgcaccagagcgtgacctcggcaggctggacacactgcccagcacaggcagacccaccaggctcctaggtttagcttttaaaaacctgaaaggggaagcaaaaaccaaaatgtgtgactgggctttggaggagactggagcctcagccctgtcctggccacgggccgctggggctggtgtgggtgggccttgtgtgctggatttgtagcttatcttccgtgttgtctttggacctgttttagtaaacccgtttttcattttattagatgtggtcacttagaaatgcaaacttgctgccgaccgcgggctgctcctgcgttcttggagctcctggcgcgtttctcggagctcccggctcctcagcgggtgggaacctcggggcccaggggtggagctggcgtccgcgggtgctggtctggcctggccgtgtggtgatgaggcttagcggggccagtgacggccgtggctcaggatccataagtcggggtttggtctcagcatttacaaatgtgtttacagtcagaatgaaacacattccttctagaaagtgcttgggggtttttgctgccctggaagccaggagcctgctcactccaaccacaagtcgcccttgactgcggcggccgcgagcggggcgggggctgccggtgccctccgcaggccgggcctcctgggcgcccctcggtgctgcaggctggggggccttgggtacctgcagagccttttctctgaattccttatgtccggtgggccagaagcccgtcctcctatgctggtggaaggcggaggaccggagtccctgcagaaggccccgtgcactcgggggcctccctcacatcccgtgccccctgcgctggccttcacagtaggtaatggctccggcccgggtgttcgctgtccacggaacatggcagaggggcaccccggcccggaaagacgccagagccagcaggggctgtttcgggccgcgtggctccccgggtctcggccgtctcccctcttctgcgtctgttccgtgacttcgcctgggtgggatgtaccgcaggtgcatcgcgtcgaggtggggcacggccgccggcaagaaacccaccctgtccggaggcgggcgtgagacaagcccagcccgcacgcgctcatctttcttcgttttttgatcagtttattcagaattgctctataatttaccaattgtatgtatttaacctattcttgtggaaaaaaaaggtctttcattatatctttatttctgaaaaaaaaa

SEQ ID NO: 18 - protein, 259 aa, Homo sapiens
MSSTSSKRAPTTATQRLKQDYLRIKKDPVPYICAEPLPSNILEWHYVVRGPEMTPYEGGYYHGKLIFPREFPFKPPSIYMITPNGRFKCNTRLCLSITDFHPDTWNPAWSVSTILTGLLSFMVEKGPTLGSIETSDFTKRQLAVQSLAFNLKDKVFCELFPEVVEEIKQKQKAQDELSSRPQTLPLPDVVPDGETHLVQNGIQLLNGHAPGAVPNLAGLQQANRHHGLLGGALANLFVIVGFAAFAYTVKYVLRSIAQE

SEQ ID NO: 19 - DNA, 2315 bp, Homo sapiens
ggttccgccccgcgagcggccatcttggaggctgaggcggcggcggcggcgctgcggcgggttcggtgggcccaatcccggggcggtgcggctgtttcgggcgcgggccccgcttttccgcaccctgctccggcctcgactacggcgagcctgagcgcggcggcggcccacgcgcagcgacagggagagatgagcagcaccagcagtaagagggctccgaccacggcaacccagaggctgaagcaggactaccttcgcattaagaaagacccggtgccttacatctgtgccgagcccctcccttcgaatattctcgagtggttcaagcgattctcctggctcagcctcctgagtagctgggattacaggcactatgtcgtccgaggcccagagatgaccccttatgaaggtggctattatcatggaaaactaatttttcccagagaatttcctttcaaacctcccagtatctatatgatcactcccaacgggaggtttaagtgcaacaccaggctgtgtctttctatcacggatttccacccggacacgtggaacccggcctggtctgtctccaccatcctgactgggctcctgagcttcatggtggagaagggccccaccctgggcagtatagagacgtcggacttcacgaaaagacaactggcagtgcagagtttagcatttaatttgaaagataaagtcttttgtgaattatttcctgaagtcgtggaggagattaaacaaaaacagaaagcacaagacgaactcagtagcagaccccagactctccccttgccagacgtggttccagacggggagacgcacctcgtccagaacgggattcagctgctcaacgggcatgcgccgggggccgtcccaaacctcgcagggctccagcaggccaaccggcaccacggactcctgggtggcgccctggcgaacttgtttgtgatagttgggtttgcagcctttgcttacacggtcaagtacgtgctgaggagcatcgcgcaggagtgaggcccaggcgccgagacccaaggcgccactgagggcaccgcgcaccagagcgtgacctcggcaggctggacacactgcccagcacaggcagacccaccaggctcctaggtttagcttttaaaaacctgaaaggggaagcaaaaaccaaaatgtgtgactgggctttggaggagactggagcctcagccctgtcctggccacgggccgctggggctggtgtgggtgggccttgtgtgctggatttgtagcttatcttccgtgttgtctttggacctgttttagtaaacccgtttttcattttattagatgtggtcacttagaaatgcaaacttgctgccgaccgcgggctgctcctgcgttcttggagctcctggcgcgtttctcggagctcccggctcctcagcgggtgggaacctcggggcccaggggtggagctggcgtccgcgggtgctggtctggcctggccgtgtggtgatgaggcttagcggggccagtgacggccgtggctcaggatccataagtcggggtttggtctcagcatttacaaatgtgtttacagtcagaatgaaacacattccttctagaaagtgcttgggggtttttgctgccctggaagccaggagcctgctcactccaaccacaagtcgcccttgactgcggcggccgcgagcggggcgggggctgccggtgccctccgcaggccgggcctcctgggcgcccctcggtgctgcaggctggggggccttgggtacctgcagagccttttctctgaattccttatgtccggtgggccagaagcccgtcctcctatgctggtggaaggcggaggaccggagtccctgcagaaggccccgtgcactcgggggcctccctcacatcccgtgccccctgcgctggccttcacagtaggtaatggctccggcccgggtgttcgctgtccacggaacatggcagaggggcaccccggcccggaaagacgccagagccagcaggggctgtttcgggccgcgtggctccccgggtctcggccgtctcccctcttctgcgtctgttccgtgacttcgcctgggtgggatgtaccgcaggtgcatcgcgtcgaggtggggcacggccgccggcaagaaacccaccctgtccggaggcgggcgtgagacaagcccagcccgcacgcgctcatctttcttcgttttttgatcagtttattcagaattgctctataatttaccaattgtatgtatttaacctattcttgtggaaaaaaaaggtctttcattatatctttatttctgaaaaaaaaa

SEQ ID NO: 20 - protein, 275 aa, Homo sapiens
MSSTSSKRAPTTATQRLKQDYLRIKKDPVPYICAEPLPSNILEWFKRFSWLSLLSSWDYRHYVVRGPEMTPYEGGYYHGKLIFPREFPFKPPSIYMITPNGRFKCNTRLCLSITDFHPDTWNPAWSVSTILTGLLSFMVEKGPTLGSIETSDFTKRQLAVQSLAFNLKDKVFCELFPEVVEEIKQKQKAQDELSSRPQTLPLPDVVPDGETHLVQNGIQLLNGHAPGAVPNLAGLQQANRHHGLLGGALANLFVIVGFAAFAYTVKYVLRSIAQE

SEQ ID NO: 21 - DNA, 2136 bp, Homo sapiens
ggttccgccccgcgagcggccatcttggaggctgaggcggcggcggcggcgctgcggcgggttcggtgggcccaatcccggggcggtgcggctgtttcgggcgcgggccccgcttttccgcaccctgctccggcctcgactacggcgagcctgagcgcggcggcggcccacgcgcagcgacagggagaggcactatgtcgtccgaggcccagagatgaccccttatgaaggtggctattatcatggaaaactaatttttcccagagaatttcctttcaaacctcccagtatctatatgatcactcccaacgggaggtttaagtgcaacaccaggctgtgtctttctatcacggatttccacccggacacgtggaacccggcctggtctgtctccaccatcctgactgggctcctgagcttcatggtggagaagggccccaccctgggcagtatagagacgtcggacttcacgaaaagacaactggcagtgcagagtttagcatttaatttgaaagataaagtcttttgtgaattatttcctgaagtcgtggaggagattaaacaaaaacagaaagcacaagacgaactcagtagcagaccccagactctccccttgccagacgtggttccagacggggagacgcacctcgtccagaacgggattcagctgctcaacgggcatgcgccgggggccgtcccaaacctcgcagggctccagcaggccaaccggcaccacggactcctgggtggcgccctggcgaacttgtttgtgatagttgggtttgcagcctttgcttacacggtcaagtacgtgctgaggagcatcgcgcaggagtgaggcccaggcgccgagacccaaggcgccactgagggcaccgcgcaccagagcgtgacctcggcaggctggacacactgcccagcacaggcagacccaccaggctcctaggtttagcttttaaaaacctgaaaggggaagcaaaaaccaaaatgtgtgactgggctttggaggagactggagcctcagccctgtcctggccacgggccgctggggctggtgtgggtgggccttgtgtgctggatttgtagcttatcttccgtgttgtctttggacctgttttagtaaacccgtttttcattttattagatgtggtcacttagaaatgcaaacttgctgccgaccgcgggctgctcctgcgttcttggagctcctggcgcgtttctcggagctcccggctcctcagcgggtgggaacctcggggcccaggggtggagctggcgtccgcgggtgctggtctggcctggccgtgtggtgatgaggcttagcggggccagtgacggccgtggctcaggatccataagtcggggtttggtctcagcatttacaaatgtgtttacagtcagaatgaaacacattccttctagaaagtgcttgggggtttttgctgccctggaagccaggagcctgctcactccaaccacaagtcgcccttgactgcggcggccgcgagcggggcgggggctgccggtgccctccgcaggccgggcctcctgggcgcccctcggtgctgcaggctggggggccttgggtacctgcagagccttttctctgaattccttatgtccggtgggccagaagcccgtcctcctatgctggtggaaggcggaggaccggagtccctgcagaaggccccgtgcactcgggggcctccctcacatcccgtgccccctgcgctggccttcacagtaggtaatggctccggcccgggtgttcgctgtccacggaacatggcagaggggcaccccggcccggaaagacgccagagccagcaggggctgtttcgggccgcgtggctccccgggtctcggccgtctcccctcttctgcgtctgttccgtgacttcgcctgggtgggatgtaccgcaggtgcatcgcgtcgaggtggggcacggccgccggcaagaaacccaccctgtccggaggcgggcgtgagacaagcccagcccgcacgcgctcatctttcttcgttttttgatcagtttattcagaattgctctataatttaccaattgtatgtatttaacctattcttgtggaaaaaaaaggtctttcattatatctttatttctgaaaaaaaaa

SEQ ID NO: 22 - protein, 207 aa, Homo sapiens
MTPYEGGYYHGKLIFPREFPFKPPSIYMITPNGRFKCNTRLCLSITDFHPDTWNPAWSVSTILTGLLSFMVEKGPTLGSIETSDFTKRQLAVQSLAFNLKDKVFCELFPEVVEEIKQKQKAQDELSSRPQTLPLPDVVPDGETHLVQNGIQLLNGHAPGAVPNLAGLQQANRHHGLLGGALANLFVIVGFAAFAYTVKYVLRSIAQE

SEQ ID NO: 23 - DNA, 2396 bp, Homo sapiens
ggttccgccccgcgagcggccatcttggaggctgaggcggcggcggcggcgctgcggcgggttcggtgggcccaatcccggggcggtgcggctgtttcgggcgcgggccccgcttttccgcaccctgctccggcctcgactacggcgagcctgagcgcggcggcggcccacgcgcagcgacagggagagatgagcagcaccagcagtaagagggctccgaccacggcaacccagaggctgaagcaggactaccttcgcattaagaaagacccggtgccttacatctgtgccgagcccctcccttcgaatattctcgagtggtaaggctccgcgccactgatcgccctgcgctgactgtcgctgccacgcaggcctctgccggcccctgctgggcgagcctggtgccccagtcatggcattggcaaggtgctcctgcaccctcccccggggcactatgtcgtccgaggcccagagatgaccccttatgaaggtggctattatcatggaaaactaatttttcccagagaatttcctttcaaacctcccagtatctatatgatcactcccaacgggaggtttaagtgcaacaccaggctgtgtctttctatcacggatttccacccggacacgtggaacccggcctggtctgtctccaccatcctgactgggctcctgagcttcatggtggagaagggccccaccctgggcagtatagagacgtcggacttcacgaaaagacaactggcagtgcagagtttagcatttaatttgaaagataaagtcttttgtgaattatttcctgaagtcgtggaggagattaaacaaaaacagaaagcacaagacgaactcagtagcagaccccagactctccccttgccagacgtggttccagacggggagacgcacctcgtccagaacgggattcagctgctcaacgggcatgcgccgggggccgtcccaaacctcgcagggctccagcaggccaaccggcaccacggactcctgggtggcgccctggcgaacttgtttgtgatagttgggtttgcagcctttgcttacacggtcaagtacgtgctgaggagcatcgcgcaggagtgaggcccaggcgccgagacccaaggcgccactgagggcaccgcgcaccagagcgtgacctcggcaggctggacacactgcccagcacaggcagacccaccaggctcctaggtttagcttttaaaaacctgaaaggggaagcaaaaaccaaaatgtgtgactgggctttggaggagactggagcctcagccctgtcctggccacgggccgctggggctggtgtgggtgggccttgtgtgctggatttgtagcttatcttccgtgttgtctttggacctgttttagtaaacccgtttttcattttattagatgtggtcacttagaaatgcaaacttgctgccgaccgcgggctgctcctgcgttcttggagctcctggcgcgtttctcggagctcccggctcctcagcgggtgggaacctcggggcccaggggtggagctggcgtccgcgggtgctggtctggcctggccgtgtggtgatgaggcttagcggggccagtgacggccgtggctcaggatccataagtcggggtttggtctcagcatttacaaatgtgtttacagtcagaatgaaacacattccttctagaaagtgcttgggggtttttgctgccctggaagccaggagcctgctcactccaaccacaagtcgcccttgactgcggcggccgcgagcggggcgggggctgccggtgccctccgcaggccgggcctcctgggcgcccctcggtgctgcaggctggggggccttgggtacctgcagagccttttctctgaattccttatgtccggtgggccagaagcccgtcctcctatgctggtggaaggcggaggaccggagtccctgcagaaggccccgtgcactcgggggcctccctcacatcccgtgccccctgcgctggccttcacagtaggtaatggctccggcccgggtgttcgctgtccacggaacatggcagaggggcaccccggcccggaaagacgccagagccagcaggggctgtttcgggccgcgtggctccccgggtctcggccgtctcccctcttctgcgtctgttccgtgacttcgcctgggtgggatgtaccgcaggtgcatcgcgtcgaggtggggcacggccgccggcaagaaacccaccctgtccggaggcgggcgtgagacaagcccagcccgcacgcgctcatctttcttcgttttttgatcagtttattcagaattgctctataatttaccaattgtatgtatttaacctattcttgtggaaaaaaaaggtctttcattatatctttatttctgaaaaaaaaa

SEQ ID NO: 24 - protein, 207 aa, Homo sapiens; identical to SEQ ID NO: 22

SEQ ID NO: 25 - DNA, 2503 bp, Homo sapiens
actcgggaaggccacacagccagtgacgaagctgtgattcacacaggcctgggtgactccagcatggctttcctctccaggacgtcaccggtggcagctgcttccttccagagccggcaggaggccagaggctccatcctgcttcagagctgccagctgcccccgcaatggctgagcaccgaagcatggacgggagaatggaagcagccacacgggggggctctcacctccaggctgcagcccagacgccccccaggccggggccaccatcagcaccaccaccaccacccaaggaggggcaccaggaggggctggtggagctgcccgcctcgttccgggagctgctcaccttcttctgcaccaatgccaccatccacggcgccatccgcctggtctgctcccgcgggaaccgcctcaagacgacgtcctgggggctgctgtccctgggagccctggtcgcgctctgctggcagctggggctcctctttgagcgtcactggcaccgcccggtcctcatggccgtctctgtgcactcggagcgcaagctgctcccgctggtcaccctgtgtgacgggaacccacgtcggccgagtccggtcctccgccatctggagctgctggacgagtttgccagggagaacattgactccctgtacaacgtcaacctcagcaaaggcagagccgccctctccgccactgtcccccgccacgagccccccttccacctggaccgggagatccgtctgcagaggctgagccactcgggcagccgggtcagagtggggttcagactgtgcaacagcacgggcggcgactgcttttaccgaggctacacgtcaggcgtggcggctgtccaggactggtaccacttccactatgtggatatcctggccctgctgcccgcggcatgggaggacagccacgggagccaggacggccacttcgtcctctcctgcagttacgatggcctggactgccaggcccgacagttccggaccttccaccaccccacctacggcagctgctacacggtcgatggcgtctggacagctcagcgccccggcatcacccacggagtcggcctggtcctcagggttgagcagcagcctcacctccctctgctgtccacgctggccggcatcagggtcatggttcacggccgtaaccacacgcccttcctggggcaccacagcttcagcgtccggccagggacggaggccaccatcagcatccgagaggacgaggtgcaccggctcgggagcccctacggccactgcaccgccggcggggaaggcgtggaggtggagctgctacacaacacctcctacaccaggcaggcctgcctggtgtcctgcttccagcagctgatggtggagacctgctcctgtggctactacctccaccctctgccggcgggggctgagtactgcagctctgcccggcaccctgcctggggacactgcttctaccgcctctaccaggacctggagacccaccggctcccctgtacctcccgctgccccaggccctgcagggagtctgcattcaagctctccactgggacctccaggtggccttccgccaagtcagctggatggactctggccacgctaggtgaacaggggctgccgcatcagagccacagacagaggagcagcctggccaaaatcaacatcgtctaccaggagctcaactaccgctcagtggaggaggcgcccgtgtactcggtgccgcagctgctctcggccatgggcagcctctgcagcctgtggtttggggcctccgtcctctccctcctggagctcctggagctgctgctcgatgcttctgccctcaccctggtgctaggcggccgccggctccgcagggcgtggttctcctggcccagagccagccctgcctcaggggcgtccagcatcaagccagaggccagtcagatgcccccgcctgcaggcggcacgtcagatgacccggagcccagcgggcctcatctcccacgggtgatgcttccaggggttctggcgggagtctcagccgaagagagctgggctgggccccagccccttgagactctggacacctgaaccagacctgccagggctgtgcgatctcttggcctggtccttgcagctgtggcagcagcaggctccccagcggcccagggtgggccagaccagcagcccaggaagcagcacacgcggccgtggggaggcaggcaccgggcatgtcggcgcctctggtcaaaccacctacactgcctggggtgggtctcaaggaggcccggggcggaggggggttcccgcgtgcacacgagtgcggctggacgtgccgacacgcggtgatgtacccatgctccgtgtgtctgtgtctgcatgtccacacgtctgatgcacctgtgtacgtgtgtcaagcctagccacctcagctgcagggaggcagaaggcaaggcaggccccacggacacacttgggctgctctgaaataaagctgttgactccacctg

SEQ ID NO: 26 - protein, 638 aa, Homo sapiens
MAEHRSMDGRMEAATRGGSHLQAAAQTPPRPGPPSAPPPPPKEGHQEGLVELPASFRELLTFFCTNATIHGAIRLVCSRGNRLKTTSWGLLSLGALVALCWQLGLLFERHWHRPVLMAVSVHSERKLLPLVTLCDGNPRRPSPVLRHLELLDEFARENIDSLYNVNLSKGRAALSATVPRHEPPFHLDREIRLQRLSHSGSRVRVGFRLCNSTGGDCFYRGYTSGVAAVQDWYHFHYVDILALLPAAWEDSHGSQDGHFVLSCSYDGLDCQARQFRTFHHPTYGSCYTVDGVWTAQRPGITHGVGLVLRVEQQPHLPLLSTLAGIRVMVHGRNHTPFLGHHSFSVRPGTEATISIREDEVHRLGSPYGHCTAGGEGVEVELLHNTSYTRQACLVSCFQQLMVETCSCGYYLHPLPAGAEYCSSARHPAWGHCFYRLYQDLETHRLPCTSRCPRPCRESAFKLSTGTSRWPSAKSAGWTLATLGEQGLPHQSHRQRSSLAKINIVYQELNYRSVEEAPVYSVPQLLSAMGSLCSLWFGASVLSLLELLELLLDASALTLVLGGRRLRRAWFSWPRASPASGASSIKPEASQMPPPAGGTSDDPEPSGPHLPRVMLPGVLAGVSAEESWAGPQPLETLDT

SEQ ID NO: 27 - DNA, 2280 bp, Homo sapiens
atggtggaagccggtaaggcctacgtcagcaccagcaggcttttcgtgagcggcgtccgcgacctgtcccagcagtgccagggcgacaccgtcatctcggaatgtctgcagaggttcgctgacagcctacaggaggtggtgaactaccacatgatcctgtttgaccaggcccagaggtccgtgcggcagcagctccagagctttgtcaaagaggatgtgcggaagttcaaggagacaaagaagcagtttgacaaggtgcgggaggacctggagctgtccctggtgaggaacgcccaggccccgaggcaccggccccacgaggtggaggaagccaccggggccctcaccctcaccaggaagtgcttccgccacctggcactggactatgtgctccagatcaatgttctgcaggccaagaagaagtttgagatcctggactctatgctgtccttcatgcacgcccagtccagcttcttccagcagggctacagcctcctgcaccagctggacccctacatgaagaagctggcagccgagctggaccagctggtgatcgactctgcggtggaaaagcgtgagatggagcgaaagcacgccgccatccagcagcggacgctgctgcaggacttctcctacgatgagtccaaagtggagtttgacgtggacgcgcccagtggggtggtgatggagggctacctcttcaagagggccagcaacgctttcaagacatggaaccggcgctggttctccattcagaacagccagctggtctaccagaagaagctcaaggatgccctcaccgtggtggtggatgacctccgcctgtgctctgtgaagccgtgtgaggacatcgagcggaggttctgcttcgaggtgctgtcacccaccaagagctgcatgctgcaggctgactccgagaagctgcggcaagcctgggtccaggctgtgcaggccagcatcgcctccgcctaccgcgagagccctgacagttgctatagcgagaggctggaccgcacagcatccccgtccacgagcagcatcgactccgccaccgacactcgggagcgtggcgtgaagggcgagagtgtgctgcagcgtgtgcagagtgtggccggcaacagccagtgcggcgactgcggccagccggacccccgctgggccagcatcaacctgggcgtgctgctctgcattgagtgctccggcatccacaggagcctgggtgtccactgctccaaggtgcggtccctgacgctggactcgtgggagcctgagctgctaaagctgatgtgtgagcttggaaacagcgctgtgaatcagatctatgaggcccagtgtgagggtgcaggcagcaggaaacccacagccagcagctcccggcaggacaaggaggcctggatcaaggacaaatacgtggaaaagaagtttctgcggaaggcgcccatggcaccagccctggaggccccaagacgctggagggtgcagaagtgcctgcggccccacagctctccccgcgctcccactgcccgccgcaaggtccggcttgagcccgttctgccctgtgtggccgctctgtcctcagtgggcaccctggatcgtaagttccgccgagactccctcttctgtcccgacgagctggactcgctcttctcctacttcgacgcaggggccgcaggggctggccctcgcaagggtgcagagtcggaggagtccagcggtgaggcagacggggacactgaggccgaggcctggggcctggcggacgtgcgcgagctgcacccggggctcttggcgcaccgcgcagcgcgtgcccgcgaccttcctgcgctggcggcggcgctggcccacggggccgaggtcaactgggcggacgcggaggatgagggcaagacgccgctggtgcaggccgtgctagggggctccttgatcgtctgtgagttcctgctgcaaaacggagcggacgtgaaccaaagagacagccggggccgggcgcccctgcaccacgccacgctgctgggccgcaccggccaggtttgcctgttcctgaagcggggcgcggaccagcacgccctggaccaagagcagcgggacccgttggccatcgcagtgcaggcggccaacgctgacatcgtgacactgctccgtctggcgcgcatggcggaggaaatgcgcgaggccgaggctgcccctggtcccccgggcgccctggcgggcagccccacggagctccagttccgcaggtgtatccaggagttcatcagcctccacctggaagagagctag

SEQ ID NO: 28 - protein, 759 aa, Homo sapiens
MVEAGKAYVSTSRLFVSGVRDLSQQCQGDTVISECLQRFADSLQEVVNYHMILFDQAQRSVRQQLQSFVKEDVRKFKETKKQFDKVREDLELSLVRNAQAPRHRPHEVEEATGALTLTRKCFRHLALDYVLQINVLQAKKKFEILDSMLSFMHAQSSFFQQGYSLLHQLDPYMKKLAAELDQLVIDSAVEKREMERKHAAIQQRTLLQDFSYDESKVEFDVDAPSGVVMEGYLFKRASNAFKTWNRRWFSIQNSQLVYQKKLKDALTVVVDDLRLCSVKPCEDIERRFCFEVLSPTKSCMLQADSEKLRQAWVQAVQASIASAYRESPDSCYSERLDRTASPSTSSIDSATDTRERGVKGESVLQRVQSVAGNSQCGDCGQPDPRWASINLGVLLCIECSGIHRSLGVHCSKVRSLTLDSWEPELLKLMCELGNSAVNQIYEAQCEGAGSRKPTASSSRQDKEAWIKDKYVEKKFLRKAPMAPALEAPRRWRVQKCLRPHSSPRAPTARRKVRLEPVLPCVAALSSVGTLDRKFRRDSLFCPDELDSLFSYFDAGAAGAGPRKGAESEESSGEADGDTEAEAWGLADVRELHPGLLAHRAARARDLPALAAALAHGAEVNWADAEDEGKTPLVQAVLGGSLIVCEFLLQNGADVNQRDSRGRAPLHHATLLGRTGQVCLFLKRGADQHALDQEQRDPLAIAVQAANADIVTLLRLARMAEEMREAEAAPGPPGALAGSPTELQFRRCIQEFISLHLEES

SEQ ID NO: 29 - DNA, 1641 bp, Homo sapiens
aagagaaccctcggcggcaagatggcagcggcgggcgagggcaccccgagctcccgcgggccgcgtcgggacccgcctaggcggccgccccggaacggttatggtgtctacgtatacccaaattccttctttcgatatgaaggagaatggaaagcagggaggaagcacggtcacgggaagttgttatttaaagatggcagttattacgaaggggcgtttgtggacggagagatcacgggagaaggccgccggcactgggcctggtcaggagacaccttctctggacagtttgttctgggagagcctcaaggctacggcgtcatggagtacaaagccggcggatgttatgaaggggaggtctcccacggcatgcgggaaggacacgggtttctggtggaccgggatggacaagtgtaccagggctccttccatgacaacaagaggcacggccctgggcagatgctctttcagaacggtgacaagtacgacggcgactgggtccgggaccggcgtcagggacacggggtgctgcgctgcgccgacggctccacctacaagggacagtggcacagcgacgtcttcagtggactgggcagcatggcccactgctcaggggtcacctattatgggttgtggatcaatggccacccagcagaacaagctacgaggatcgtgatcttgggtccggaggtgatggaagtggcccaagggtctcccttctcggtgaacgttcagctgctgcaggaccacggggaaattgccaagagcgagagcggccgggtcctgcagatctcagcgggcgtcagatacgtgcagctgtcagcctactctgaggtcaactttttcaaagtggacagagacaaccaagagacactcatccagaccccatttgggttcgaatgcatcccttatcctgtgtccagccccgcagctggggtgccggggcccagagctgccaagggaggggcagaagccgacgtgcccctgcccaggggagacctggagctgcatttgggtgccctccatggccaggaggacacccctggtggcctgcttgccaggggacatgcgccccattgtcccggggcctgtcagcgagtggagcagggctgtgccgagttcacagatgtcctcctggggccgcccccgcctgggtaccaccccttcctgttcctggacagcctccacaagaaggcaggcggcagatccagaggcggcctgcaccccagggggacaccacccacggcacaggagcctcctggaggcagcaggcctgaggggagagccacggaggagcaggctgcggcagcacacctaggggagtacgtgctcatgatccgcgacgtgaccaccccgccgttcctggggcgcaggctgcccccggccttcaaacacctgcgggtcgtagcgaagagggctggccagccaccccatgtcctggaagaaggccctgaagcctcaagcagctggcaggccgcccacagctgcaccccagagccgccagcgcctcggtgaggccccgtgtccacaggaggccacctcggtgtgaatggaaggaaacgctgcctctgcttgcgtgactctgctccccgattctccagagccccgtggttgctggcttgaataaaatgctcagtggcg

SEQ ID NO: 30 - protein, 497 aa, Homo sapiens
MAAAGEGTPSSRGPRRDPPRRPPRNGYGVYVYPNSFFRYEGEWKAGRKHGHGKLLFKDGSYYEGAFVDGEITGEGRRHWAWSGDTFSGQFVLGEPQGYGVMEYKAGGCYEGEVSHGMREGHGFLVDRDGQVYQGSFHDNKRHGPGQMLFQNGDKYDGDWVRDRRQGHGVLRCADGSTYKGQWHSDVFSGLGSMAHCSGVTYYGLWINGHPAEQATRIVILGPEVMEVAQGSPFSVNVQLLQDHGEIAKSESGRVLQISAGVRYVQLSAYSEVNFFKVDRDNQETLIQTPFGFECIPYPVSSPAAGVPGPRAAKGGAEADVPLPRGDLELHLGALHGQEDTPGGLLARGHAPHCPGACQRVEQGCAEFTDVLLGPPPPGYHPFLFLDSLHKKAGGRSRGGLHPRGTPPTAQEPPGGSRPEGRATEEQAAAAHLGEYVLMIRDVTTPPFLGRRLPPAFKHLRVVAKRAGQPPHVLEEGPEASSSWQAAHSCTPEPPAPR

SEQ ID NO: 31 - DNA, 1697 bp, Homo sapiens
gtcggacgccgccgcggcgcgctctgcagactccgggtcgccgctccgccgggacgcgttggccggggcgcgcggtgcttggctgcggtgctcacactcatgaggagccggaagctcacaggtgcagtgcggtcttcagcgcgcttgaaagcacgaagttgttcggcagccaggttggcctctgcccaggaagttgctggttccacgtctgccaagacagcatgtctgacttcctcatcccacaaagccacagacaggcgaacgtccaagaagttcaaatgtgacaaaggacatcttgtgaagtcagaattacagaagcttgtccctaagaatgacagcgcttctttgccaaaagtgacacctgagaccccttgtgaaaatgagtttgctgaaggcagtgccttgcttccaggcagcgaggctggcgtttctgtgcagcagggggctgcaagtcttcctctcggtggctgcagagttgtgagtgactctcgcttagcaaagactagagatggcctgtccgtgccaaaacacagtgccgggtccggagcagaagaatccaacagcagctccactgtgcagaagcagaatgagccagggctacagacagaggatgtgcagaagccaccacttcagatggacaacagcgtctttctagatgacgacagcaatcagccaatgcccgtgagccggttctttggaaacgttgagctcatgcaggacctcccacctgcgtcttcatcttgtccttcaatgagcagacgagagttcagaaaaatgcatttcagagccaaagatgatgatgatgacgacgacgatgatgcagaaatgtaggggccatacaaaataatgtccttgagtatttagtaccattaacaatttgacaatttagcacattacaagatttatataaaatgtatctccaagagaatgtcttaatcaaacttcagaactgacccatctaagtcaatagtgcaaagcacccaatacctgtggaggatgtactcatgggaactaaaactcaaaccatctttgaggttgcaaagctgctgtactgtgccaatgtcctttctttttttttttttttttttttccttggagacagagtttctctcttgtcgcccaggctggagtgcaatggcgcaatctcggctcactgcaacctccacctcctgggttcaagtgattctcctgcctcagcctcctgagtagctgggattacaggcatacaccaccacacccagctagtttttgtattattagtagacacgggggtttctccacgttggccaggctggtctcaaactcctgacctcgtgatacgcccgcctcagcctcccaaagtgctgggattacaggcgcgagccaccatgcccggccagtgtcctttcttatacacgtacatacatgatgatggcttgagtcagctgcagggcagtgggcttaatgagagggatctttgtaaagacagctcttcacttcagctcagtagctttggtcataggcaagtttgttttccattatcataatttgatgattcttgtgatgaattcaatgctagttcttaaagaactcttttatttctgtatgtggagctaatgtttaccttggaaattttgcaaaatacatgtaagaaagaaataaaatatattttgaaaataaaaaaaaaaaaaaaaaaaaaaaaaaaaaaaaaaaaaaaa

SEQ ID NO: 32 - protein, 243 aa, Homo sapiens
MRSRKLTGAVRSSARLKARSCSAARLASAQEVAGSTSAKTACLTSSSHKATDRRTSKKFKCDKGHLVKSELQKLVPKNDSASLPKVTPETPCENEFAEGSALLPGSEAGVSVQQGAASLPLGGCRVVSDSRLAKTRDGLSVPKHSAGSGAEESNSSSTVQKQNEPGLQTEDVQKPPLQMDNSVFLDDDSNQPMPVSRFFGNVELMQDLPPASSSCPSMSRREFRKMHFRAKDDDDDDDDDAEM

SEQ ID NO: 33 - DNA, 559 bp, Homo sapiens
ccctgccaccatggaaacagcaatatcagaaagcacagtcctggttagcggcgtgctcgtgccatgtgcctgtcagttctgcaagcatttgttggatgtgaaggttggtgtgatgaccacgctgcccacaacaggcaaaagggtgcggacagctgaggctcctcacttcccgctccaaagctcagaacctcccttccctcctggatccaacagaagcagcggccgctgctgcctgtgcctctcaaacttgtcacccacggatgctgggaaaaatgcacataaaattgacctcgggctgattcctggactcgaccctggactcctccagagaatcgagagcccatcctgatgagctcatgtgtgcaatgaggtaagagcggatggcaccggtggcacctgacctctcgcctctgttcctttcccgtgaaagcctttacaccacagggcaagggccagagggcttccttgctacacagccgggccctgtcacttcccccacatggcacccttcactctcctcaccctgctgggccctgcataaggcatgctgcccaccacc

SEQ ID NO: 34 - protein, 112 aa, Homo sapiens
METAISESTVLVSGVLVPCACQFCKHLLDVKVGVMTTLPTTGKRVRTAEAPHFPLQSSEPPFPPGSNRSSGRCCLCLSNLSPTDAGKNAHKIDLGLIPGLDPGLLQRIESPS

SEQ ID NO: 35 - DNA, 563 bp, Homo sapiens
cggcgtgctcgtgccatgtgcctgtcagttctgcaagcatttgttggatgtgaaggttggtgtgatgaccacgctgcccacaacaggcaaaagggtgcggacagctgaggctcctcacttcccgctccaaagctcagaacctcccttccctcctggatccaacagaagcagcggccgctgctgcctgtgcctctcaaacttgtcacccacggatgctgggaaaaatgcacataaaagggtcctgtctttgtgatgtcagcgtgaagtggaattcgcagaatggctaaagtggagggaagacttaaaatgcattggatgatgatagcagcgtcatttacaatcaccacgacttggaagcagccgagatgtcctttggcagatgattggagaaatgaactgtggcacgtccatgcagaccatgaaatactattcagtgctaaaaatgagtgagctttccatccatgaaaagacatagagaaacctgaaatgcagatcacaaagtgaaaggccaatctggaaaggctacacaccctatgactccaacctgtgacattcccaaagag

SEQ ID NO: 36 - protein, 62 aa, Homo sapiens
MTTLPTTGKRVRTAEAPHFPLQSSEPPFPPGSNRSSGRCCLCLSNLSPTDAGKNAHKRVLSL

SEQ ID NO: 37 - DNA, 563 bp, Homo sapiens
gtgctcgtgccatgtgcctgtcagttctgcaagcatttgttggatgtgaaggttggtgtgatgaccacgctgcccacaacaggcaaaagggtgcggacagctgaggctcctcacttcccgctccaaagctcagaacctcccttccctcctggatccaacagaagcagcggccgctgctgcctgtgcctctcaaacttgtcacccacggatgctgggaaaaatgcacataaaatgactggatggagatgacccaggaaggggccctgttgcccaggaaatgggcttgtcctgaaccacagcttgaaggagagccaccgactgatcaggaatacccaactggactttattccagcaacatacaaagcattactgtgctgggccatggtatattattgggtttcttttattagaacacttggcattaccttcactaatatacactcatcatagtagacattttcactagttatagatgatatgcactattttcccttctgaaacagaaatttgcagcagcactgccaaaggacaatagatttttaaaaatcatagaatgactggag

SEQ ID NO: 38 - protein, 62 aa, Homo sapiens
MTTLPTTGKRVRTAEAPHFPLQSSEPPFPPGSNRSSGRCCLCLSNLSPTDAGKNAHKMTGWR

SEQ ID NO: 39 - DNA, 1809 bp, Homo sapiens
acgccggcgctcccaggccgcgcttcctgcgtccccaacccggtccctgagagggcactgcgccctctccaccactgcgttccctcggctaagaatcccccgaaccccagccccgcgatcgcggcgcccaccgaggaggccgcccgggtggggcgcgggggtcgcgaagcccgcagccccggaccgcccagccgagacggagccggacccgccgcctcccgggcccttccaccgcagctatccgcacgggaggcctcgcgattgctcggaaccatcccgcaggagttcagctgatattttctagtgtggggcgagagattttgtggagcgcatttaaggggtttttgttgtgactgctgccttgtatatatttattttctttcttggaactgggcctcgccctcctcccactgacatgatggcccagtccaaggccaatggctcgcactatgcgctgaccgccatcggcctggggatgctggtccttggggtgatcatggccatgtggaacctggtacccggcttcagcgcggccgagaagccaacagctcagggcagcaacaagaccgaggtgggtggcggcatcctcaagagcaagaccttctctgtggcctacgtgctggtcggggccggggtgatgctgctgctgctttctatctgcctgagtatcagggataagaggaagcagcggcagggcgaggacctggcccatgtccagcacccgacaggcgctgggcctcacgcccaggaggaagacagccaggaggaagaagaggaggatgaggaggctgcctcaaggtactatgttcccagctacgaggaagtgatgaacacaaactactcagaagcaaggggagaggagcagaacccgaggttgagcatctctctcccgtcctatgagtcactgacggggctcgacgagaccacccccacatccaccagggctgacgtggaggccagccctgggaacccccctgacaggcagaactctaagttggccaaacgactgaaaccgctgaaagttcgaaggattaaatctgaaaagcttcacctcaaagactttaggatcaacctcccagacaaaaacgtccctcctccctcgatagagcctttgactcctccaccgcagtatgatgaagtccaggagaaggcccccgacacccggccgcccgactgaatggccccacttgagccacgctccctcctgtctctcacacctttcacccccaagactctaacaaagccacatgagccacagttgagaagcggaggggccagctgtgcatggagccatttggatggcggcgggcgggggggattctctgtatcaggagtgactttgttgccccacacagcctcctgctgcaggtgctttggaaagagatgctgccttggagctggtgaatctgtggaccacattcaagggtgtggcacaggcatcttcccatccttttcactccgaatcgctggcgacacattctcctttccagctaggaaagggttcctcgcggctggtttagattgtggttgtttgttttgcttctactaagactgttttgtttcaaaaaggaaacaaattttgtgtttgctgtctacgctggagtcctgaactgtgggtagaaaacacgacctggctttgtagaaaggacacagggctgttttatgaactaagcggtgaggctcaggtggcggctctcacagagcccctgatgctgttgttctttgagggcttaaggcctgatgaacgtaggcacgtgatgcgtaatagtcttcaatggtacacttaactagtctcttctgtgtaacagc

SEQ ID NO: 40 - protein, 253 aa, Homo sapiens
MMAQSKANGSHYALTAIGLGMLVLGVIMAMWNLVPGFSAAEKPTAQGSNKTEVGGGILKSKTFSVAYVLVGAGVMLLLLSICLSIRDKRKQRQGEDLAHVQHPTGAGPHAQEEDSQEEEEEDEEAASRYYVPSYEEVMNTNYSEARGEEQNPRLSISLPSYESLTGLDETTPTSTRADVEASPGNPPDRQNSKLAKRLKPLKVRRIKSEKLHLKDFRINLPDKNVPPPSIEPLTPPPQYDEVQEKAPDTRPPD

SEQ ID NO: 41 - DNA, 4869 bp, Homo sapiens
cattctgctggctgcgcggtggcggcggctgtgtgtgcgccgcgccttgccgccccccctggccccccgagcccggggcgcgcgctcccgcccgggccgtccgggccccgcggcgccgcggcccgaggccccgggaagcgcagccatggctctgcggaggctgggggccgcgctgctgctgctgccgctgctcgccgccgtggaagaaacgctaatggactccactacagcgactgctgagctgggctggatggtgcatcctccatcagggtgggaagaggtgagtggctacgatgagaacatgaacacgatccgcacgtaccaggtgtgcaacgtgtttgagtcaagccagaacaactggctacggaccaagtttatccggcgccgtggcgcccaccgcatccacgtggagatgaagttttcggtgcgtgactgcagcagcatccccagcgtgcctggctcctgcaaggagaccttcaacctctattactatgaggctgactttgactcggccaccaagaccttccccaactggatggagaatccatgggtgaaggtggataccattgcagccgacgagagcttctcccaggtggacctgggtggccgcgtcatgaaaatcaacaccgaggtgcggagcttcggacctgtgtcccgcagcggcttctacctggccttccaggactatggcggctgcatgtccctcatcgccgtgcgtgtcttctaccgcaagtgcccccgcatcatccagaatggcgccatcttccaggaaaccctgtcgggggctgagagcacatcgctggtggctgcccggggcagctgcatcgccaatgcggaagaggtggatgtacccatcaagctctactgtaacggggacggcgagtggctggtgcccatcgggcgctgcatgtgcaaagcaggcttcgaggccgttgagaatggcaccgtctgccgaggttgtccatctgggactttcaaggccaaccaaggggatgaggcctgtacccactgtcccatcaacagccggaccacttctgaaggggccaccaactgtgtctgccgcaatggctactacagagcagacctggaccccctggacatgccctgcacaaccatcccctccgcgccccaggctgtgatttccagtgtcaatgagacctccctcatgctggagtggacccctccccgcgactccggaggccgagaggacctcgtctacaacatcatctgcaagagctgtggctcgggccggggtgcctgcacccgctgcggggacaatgtacagtacgcaccacgccagctaggcctgaccgagccacgcatttacatcagtgacctgctggcccacacccagtacaccttcgagatccaggctgtgaacggcgttactgaccagagccccttctcgcctcagttcgcctctgtgaacatcaccaccaaccaggcagctccatcggcagtgtccatcatgcatcaggtgagccgcaccgtggacagcattaccctgtcgtggtcccagccggaccagcccaatggcgtgatcctggactatgagctgcagtactatgagaaggagctcagtgagtacaacgccacagccataaaaagccccaccaacacggtcaccgtgcagggcctcaaagccggcgccatctatgtcttccaggtgcgggcacgcaccgtggcaggctacgggcgctacagcggcaagatgtacttccagaccatgacagaagccgagtaccagacaagcatccaggagaagttgccactcatcatcggctcctcggccgctggcctggtcttcctcattgctgtggttgtcatcgccatcgtgtgtaacagaagacgggggtttgagcgtgctgactcggagtacacggacaagctgcaacactacaccagtggccacatgaccccaggcatgaagatctacatcgatcctttcacctacgaggaccccaacgaggcagtgcgggagtttgccaaggaaattgacatctcctgtgtcaaaattgagcaggtgatcggagcaggggagtttggcgaggtctgcagtggccacctgaagctgccaggcaagagagagatctttgtggccatcaagacgctcaagtcgggctacacggagaagcagcgccgggacttcctgagcgaagcctccatcatgggccagttcgaccatcccaacgtcatccacctggagggtgtcgtgaccaagagcacacctgtgatgatcatcaccgagttcatggagaatggctccctggactcctttctccggcaaaacgatgggcagttcacagtcatccagctggtgggcatgcttcggggcatcgcagctggcatgaagtacctggcagacatgaactatgttcaccgtgacctggctgcccgcaacatcctcgtcaacagcaacctggtctgcaaggtgtcggactttgggctctcacgctttctagaggacgatacctcagaccccacctacaccagtgccctgggcggaaagatccccatccgctggacagccccggaagccatccagtaccggaagttcacctcggccagtgatgtgtggagctacggcattgtcatgtgggaggtgatgtcctatggggagcggccctactgggacatgaccaaccaggatgtaatcaatgccattgagcaggactatcggctgccaccgcccatggactgcccgagcgccctgcaccaactcatgctggactgttggcagaaggaccgcaaccaccggcccaagttcggccaaattgtcaacacgctagacaagatgatccgcaatcccaacagcctcaaagccatggcgcccctctcctctggcatcaacctgccgctgctggaccgcacgatccccgactacaccagctttaacacggtggacgagtggctggaggccatcaagatggggcagtacaaggagagcttcgccaatgccggcttcacctcctttgacgtcgtgtctcagatgatgatggaggacattctccgggttggggtcactttggctggccaccagaaaaaaatcctgaacagtatccaggtgatgcgggcgcagatgaaccagattcagtctgtggaggtttgacattcacctgcctcggctcacctcttcctccaagccccgccccctctgccccacgtgccggccctcctggtgctctatccactgcagggccagccactcgccaggaggccacgggccacgggaagaaccaagcggtgccagccacgagacgtcaccaagaaaacatgcaactcaaacgacggaaaaaaaaagggaatgggaaaaaagaaaacagatcctgggagggggcgggaaatacaaggaatattttttaaagaggattctcataaggaaagcaatgactgttcttgcgggggataaaaaagggcttgggagattcatgcgatgtgtccaatcggagacaaaagcagtttctctccaactccctctgggaaggtgacctggccagagccaagaaacactttcagaaaaacaaatgtgaaggggagagacaggggccgcccttggctcctgtccctgctgctcctctaggcctcactcaacaaccaagcgcctggaggacgggacagatggacagacagccaccctgagaacccctctgggaaaatctattcctgccaccactgggcaaacagaagaatttttctgtctttggagagtattttagaaactccaatgaaagacactgtttctcctgttggctcacagggctgaaaggggcttttgtcctcctgggtcagggagaacgcggggaccccagaaaggtcagccttcctgaggatgggcaacccccaggtctgcagctccaggtacatatcacgcgcacagcctggcagcctggccctcctggtgcccactcccgccagcccctgcctcgaggactgatactgcagtgactgccgtcagctccgactgccgctgagaagggttgatcctgcatctgggtttgtttacagcaattcctggactcgggggtattttggtcacagggtggttttggtttagggggtttgtttgttgggttgttttttgttttttggttttttttaatgacaatgaagtgacactttgacatttcctaccttttgaggacttgatccttctccaggaagaaggtgctttctgcttactgacttaggcaatacaccaagggcgagattttatatgcacatttctggatttttttatacggttttcattgacactcttccctcctcccacctgccaccaggcctcaccaaagcccactgccatggggccatctgggccattcagagactggagtgagatttgggtgtggagggggaggcgccaaggtggaggagcttcccactccaggactgttgatgaaagggacagattgaggaggaagtgggctctgaggctgcagggctggaagtccttgcccacttcccactctcctgccccaatctatctagtacttcccaggcaaataggcccctttgaggctcctgagtgccctcagatggtcaaaacccagttttccctctgggagcctaaaccaggctgcatcggaggccaggacccggatcattcactgtgataccctgccctccagagggtgcgctcagagacacgggcaagcatgcctcttcccttccctggagagaaagtgtgtgatttctctcccacctccttccccccaccagacctttgctgggcctaaaggtcttggccatggggacgccctcagtctagggatctggccacagactccctcctgtgaaccaacacagacacccaagcagagcaatcagttagtgaattgaatggaaataaacgctttagttataatatga

SEQ ID NO: 42 - protein, 987 aa, Homo sapiens
MALRRLGAALLLLPLLAAVEETLMDSTTATAELGWMVHPPSGWEEVSGYDENMNTIRTYQVCNVFESSQNNWLRTKFIRRRGAHRIHVEMKFSVRDCSSIPSVPGSCKETFNLYYYEADFDSATKTFPNWMENPWVKVDTIAADESFSQVDLGGRVMKINTEVRSFGPVSRSGFYLAFQDYGGCMSLIAVRVFYRKCPRIIQNGAIFQETLSGAESTSLVAARGSCIANAEEVDVPIKLYCNGDGEWLVPIGRCMCKAGFEAVENGTVCRGCPSGTFKANQGDEACTHCPINSRTTSEGATNCVCRNGYYRADLDPLDMPCTTIPSAPQAVISSVNETSLMLEWTPPRDSGGREDLVYNIICKSCGSGRGACTRCGDNVQYAPRQLGLTEPRIYISDLLAHTQYTFEIQAVNGVTDQSPFSPQFASVNITTNQAAPSAVSIMHQVSRTVDSITLSWSQPDQPNGVILDYELQYYEKELSEYNATAIKSPTNTVTVQGLKAGAIYVFQVRARTVAGYGRYSGKMYFQTMTEAEYQTSIQEKLPLIIGSSAAGLVFLIAVVVIAIVCNRRRGFERADSEYTDKLQHYTSGHMTPGMKIYIDPFTYEDPNEAVREFAKEIDISCVKIEQVIGAGEFGEVCSGHLKLPGKREIFVAIKTLKSGYTEKQRRDFLSEASIMGQFDHPNVIHLEGVVTKSTPVMIITEFMENGSLDSFLRQNDGQFTVIQLVGMLRGIAAGMKYLADMNYVHRDLAARNILVNSNLVCKVSDFGLSRFLEDDTSDPTYTSALGGKIPIRWTAPEAIQYRKFTSASDVWSYGIVMWEVMSYGERPYWDMTNQDVINAIEQDYRLPPPMDCPSALHQLMLDCWQKDRNHRPKFGQIVNTLDKMIRNPNSLKAMAPLSSGINLPLLDRTIPDYTSFNTVDEWLEAIKMGQYKESFANAGFTSFDVVSQMMMEDILRVGVTLAGHQKKILNSIQVMRAQMNQIQSVEV

SEQ ID NO: 43 - DNA, 4866 bp, Homo sapiens
cattctgctggctgcgcggtggcggcggctgtgtgtgcgccgcgccttgccgccccccctggccccccgagcccggggcgcgcgctcccgcccgggccgtccgggccccgcggcgccgcggcccgaggccccgggaagcgcagccatggctctgcggaggctgggggccgcgctgctgctgctgccgctgctcgccgccgtggaagaaacgctaatggactccactacagcgactgctgagctgggctggatggtgcatcctccatcagggtgggaagaggtgagtggctacgatgagaacatgaacacgatccgcacgtaccaggtgtgcaacgtgtttgagtcaagccagaacaactggctacggaccaagtttatccggcgccgtggcgcccaccgcatccacgtggagatgaagttttcggtgcgtgactgcagcagcatccccagcgtgcctggctcctgcaaggagaccttcaacctctattactatgaggctgactttgactcggccaccaagaccttccccaactggatggagaatccatgggtgaaggtggataccattgcagccgacgagagcttctcccaggtggacctgggtggccgcgtcatgaaaatcaacaccgaggtgcggagcttcggacctgtgtcccgcagcggcttctacctggccttccaggactatggcggctgcatgtccctcatcgccgtgcgtgtcttctaccgcaagtgcccccgcatcatccagaatggcgccatcttccaggaaaccctgtcgggggctgagagcacatcgctggtggctgcccggggcagctgcatcgccaatgcggaagaggtggatgtacccatcaagctctactgtaacggggacggcgagtggctggtgcccatcgggcgctgcatgtgcaaagcaggcttcgaggccgttgagaatggcaccgtctgccgaggttgtccatctgggactttcaaggccaaccaaggggatgaggcctgtacccactgtcccatcaacagccggaccacttctgaaggggccaccaactgtgtctgccgcaatggctactacagagcagacctggaccccctggacatgccctgcacaaccatcccctccgcgccccaggctgtgatttccagtgtcaatgagacctccctcatgctggagtggacccctccccgcgactccggaggccgagaggacctcgtctacaacatcatctgcaagagctgtggctcgggccggggtgcctgcacccgctgcggggacaatgtacagtacgcaccacgccagctaggcctgaccgagccacgcatttacatcagtgacctgctggcccacacccagtacaccttcgagatccaggctgtgaacggcgttactgaccagagccccttctcgcctcagttcgcctctgtgaacatcaccaccaaccaggcagctccatcggcagtgtccatcatgcatcaggtgagccgcaccgtggacagcattaccctgtcgtggtcccagccggaccagcccaatggcgtgatcctggactatgagctgcagtactatgagaaggagctcagtgagtacaacgccacagccataaaaagccccaccaacacggtcaccgtgcagggcctcaaagccggcgccatctatgtcttccaggtgcgggcacgcaccgtggcaggctacgggcgctacagcggcaagatgtacttccagaccatgacagaagccgagtaccagacaagcatccaggagaagttgccactcatcatcggctcctcggccgctggcctggtcttcctcattgctgtggttgtcatcgccatcgtgtgtaacagacgggggtttgagcgtgctgactcggagtacacggacaagctgcaacactacaccagtggccacatgaccccaggcatgaagatctacatcgatcctttcacctacgaggaccccaacgaggcagtgcgggagtttgccaaggaaattgacatctcctgtgtcaaaattgagcaggtgatcggagcaggggagtttggcgaggtctgcagtggccacctgaagctgccaggcaagagagagatctttgtggccatcaagacgctcaagtcgggctacacggagaagcagcgccgggacttcctgagcgaagcctccatcatgggccagttcgaccatcccaacgtcatccacctggagggtgtcgtgaccaagagcacacctgtgatgatcatcaccgagttcatggagaatggctccctggactcctttctccggcaaaacgatgggcagttcacagtcatccagctggtgggcatgcttcggggcatcgcagctggcatgaagtacctggcagacatgaactatgttcaccgtgacctggctgcccgcaacatcctcgtcaacagcaacctggtctgcaaggtgtcggactttgggctctcacgctttctagaggacgatacctcagaccccacctacaccagtgccctgggcggaaagatccccatccgctggacagccccggaagccatccagtaccggaagttcacctcggccagtgatgtgtggagctacggcattgtcatgtgggaggtgatgtcctatggggagcggccctactgggacatgaccaaccaggatgtaatcaatgccattgagcaggactatcggctgccaccgcccatggactgcccgagcgccctgcaccaactcatgctggactgttggcagaaggaccgcaaccaccggcccaagttcggccaaattgtcaacacgctagacaagatgatccgcaatcccaacagcctcaaagccatggcgcccctctcctctggcatcaacctgccgctgctggaccgcacgatccccgactacaccagctttaacacggtggacgagtggctggaggccatcaagatggggcagtacaaggagagcttcgccaatgccggcttcacctcctttgacgtcgtgtctcagatgatgatggaggacattctccgggttggggtcactttggctggccaccagaaaaaaatcctgaacagtatccaggtgatgcgggcgcagatgaaccagattcagtctgtggaggtttgacattcacctgcctcggctcacctcttcctccaagccccgccccctctgccccacgtgccggccctcctggtgctctatccactgcagggccagccactcgccaggaggccacgggccacgggaagaaccaagcggtgccagccacgagacgtcaccaagaaaacatgcaactcaaacgacggaaaaaaaaagggaatgggaaaaaagaaaacagatcctgggagggggcgggaaatacaaggaatattttttaaagaggattctcataaggaaagcaatgactgttcttgcgggggataaaaaagggcttgggagattcatgcgatgtgtccaatcggagacaaaagcagtttctctccaactccctctgggaaggtgacctggccagagccaagaaacactttcagaaaaacaaatgtgaaggggagagacaggggccgcccttggctcctgtccctgctgctcctctaggcctcactcaacaaccaagcgcctggaggacgggacagatggacagacagccaccctgagaacccctctgggaaaatctattcctgccaccactgggcaaacagaagaatttttctgtctttggagagtattttagaaactccaatgaaagacactgtttctcctgttggctcacagggctgaaaggggcttttgtcctcctgggtcagggagaacgcggggaccccagaaaggtcagccttcctgaggatgggcaacccccaggtctgcagctccaggtacatatcacgcgcacagcctggcagcctggccctcctggtgcccactcccgccagcccctgcctcgaggactgatactgcagtgactgccgtcagctccgactgccgctgagaagggttgatcctgcatctgggtttgtttacagcaattcctggactcgggggtattttggtcacagggtggttttggtttagggggtttgtttgttgggttgttttttgttttttggttttttttaatgacaatgaagtgacactttgacatttcctaccttttgaggacttgatccttctccaggaagaaggtgctttctgcttactgacttaggcaatacaccaagggcgagattttatatgcacatttctggatttttttatacggttttcattgacactcttccctcctcccacctgccaccaggcctcaccaaagcccactgccatggggccatctgggccattcagagactggagtgagatttgggtgtggagggggaggcgccaaggtggaggagcttcccactccaggactgttgatgaaagggacagattgaggaggaagtgggctctgaggctgcagggctggaagtccttgcccacttcccactctcctgccccaatctatctagtacttcccaggcaaataggcccctttgaggctcctgagtgccctcagatggtcaaaacccagttttccctctgggagcctaaaccaggctgcatcggaggccaggacccggatcattcactgtgataccctgccctccagagggtgcgctcagagacacgggcaagcatgcctcttcccttccctggagagaaagtgtgtgatttctctcccacctccttccccccaccagacctttgctgggcctaaaggtcttggccatggggacgccctcagtctagggatctggccacagactccctcctgtgaaccaacacagacacccaagcagagcaatcagttagtgaattgaatggaaataaacgctttagttataatatga

SEQ ID NO: 44 - protein, 986 aa, Homo sapiens
MALRRLGAALLLLPLLAAVEETLMDSTTATAELGWMVHPPSGWEEVSGYDENMNTIRTYQVCNVFESSQNNWLRTKFIRRRGAHRIHVEMKFSVRDCSSIPSVPGSCKETFNLYYYEADFDSATKTFPNWMENPWVKVDTIAADESFSQVDLGGRVMKINTEVRSFGPVSRSGFYLAFQDYGGCMSLIAVRVFYRKCPRIIQNGAIFQETLSGAESTSLVAARGSCIANAEEVDVPIKLYCNGDGEWLVPIGRCMCKAGFEAVENGTVCRGCPSGTFKANQGDEACTHCPINSRTTSEGATNCVCRNGYYRADLDPLDMPCTTIPSAPQAVISSVNETSLMLEWTPPRDSGGREDLVYNIICKSCGSGRGACTRCGDNVQYAPRQLGLTEPRIYISDLLAHTQYTFEIQAVNGVTDQSPFSPQFASVNITTNQAAPSAVSIMHQVSRTVDSITLSWSQPDQPNGVILDYELQYYEKELSEYNATAIKSPTNTVTVQGLKAGAIYVFQVRARTVAGYGRYSGKMYFQTMTEAEYQTSIQEKLPLIIGSSAAGLVFLIAVVVIAIVCNRRGFERADSEYTDKLQHYTSGHMTPGMKIYIDPFTYEDPNEAVREFAKEIDISCVKIEQVIGAGEFGEVCSGHLKLPGKREIFVAIKTLKSGYTEKQRRDFLSEASIMGQFDHPNVIHLEGVVTKSTPVMIITEFMENGSLDSFLRQNDGQFTVIQLVGMLRGIAAGMKYLADMNYVHRDLAARNILVNSNLVCKVSDFGLSRFLEDDTSDPTYTSALGGKIPIRWTAPEAIQYRKFTSASDVWSYGIVMWEVMSYGERPYWDMTNQDVINAIEQDYRLPPPMDCPSALHQLMLDCWQKDRNHRPKFGQIVNTLDKMIRNPNSLKAMAPLSSGINLPLLDRTIPDYTSFNTVDEWLEAIKMGQYKESFANAGFTSFDVVSQMMMEDILRVGVTLAGHQKKILNSIQVMRAQMNQIQSVEV

SEQ ID NO: 45 - DNA, 9225 bp, Homo sapiens
acttgcagcggcgctcgggagccgggcggctgggccaggcggcgccttcggggctgctgcgcgcccgcgcctagagctgccgccccagggagcccgccacggccgcgccccgggcacgctcggcggcgcccaacgatgaccgctccctggcggcgcctccggagtctggtttgggaatactgggccgggctcctcgtgtgcgccttctggatcccggactcgcgcgggatgccccacgtcatccggatcggaggaatcttcgagtatgcggacggccccaacgcccaggtcatgaatgccgaggagcatgcctttcgattttctgccaacatcatcaacaggaacaggactctgctgcccaacacaaccttgacctatgacatacagaggattcacttccatgacagcttcgaggcgaccaaaaaggcctgtgaccagctggcactgggcgtggtggcgatcttcggcccatcacagggctcctgcaccaatgccgtccagtccatctgcaatgccctggaggtgccccacatccagctgcgttggaagcaccacccgctggacaacaaggacaccttctacgtgaacctctaccccgactacgcctcgctcagccatgccatcctcgacctggtccagtacctcaagtggcggtcagccaccgtggtctatgacgacagtacagggctcatccgactgcaggagctcatcatggccccatcaagatacaacatccgcctgaagatccgtcagctccccatcgactctgacgactcgcgccccttgctcaaggagatgaagcgaggccgggaattccgcattatcttcgactgcagccacactatggcggcccagatcctcaagcaggccatggccatgggcatgatgactgagtactaccacttcatcttcaccactctggatctctacgctttagacctggagccctaccgctactcaggcgtgaacctgacaggattccggattctcaatgtggacaacccacacgtctcggccattgtggagaagtggtccatggagcggctgcaggcagctccccggtccgagtctggcctgctggatggagtgatgatgactgatgcagccttactgtacgacgccgtccatatcgtgtccgtgtgctaccagcgggcaccacagatgaccgtgaactccctgcagtgccatcggcacaaggcctggcgctttggcggccgcttcatgaacttcatcaaggaggctcaatgggaaggattaactggacgaattgttttcaacaaaactagtggcttgcggacggattttgatctggacatcatcagcctgaaagaggatggcctggagaaggttggggtgtggagtcctgccgacgggctcaacatcactgaggttgccaaaggccgaggccctaatgtcaccgactctctgacaaacagatcactcattgtcaccacagtgctggaggagcccttcgtcatgtttcggaaatcagacaggacgctatacgggaatgaccggttcgagggctactgcatcgacctgctaaaggagctggcccacatccttggtttctcctatgagatccggctggtggaggacggcaagtacggggcacaggatgacaagggccagtggaacggcatggtcaaggagctcatcgaccacaaggcagatctggccgtggcccccctgaccatcacccatgttcgagagaaggccatcgacttctccaagcccttcatgacacttggtgtgagcatcctgtatcgaaagcccaatggcaccaaccccagcgtcttctccttcctcaatcccctgtccccagacatctggatgtatgttctcctcgcctacctgggggtcagctgtgtcctcttcgtcatcgccaggttcagcccttatgagtggtacgatgctcacccctgcaaccctggctccgaggtggtggaaaataacttcactctgcttaacagcttctggtttggaatgggatccctgatgcagcaagggtctgagctgatgcccaaagccctgtccacacgcatcattggtggcatctggtggttcttcacgctcatcatcatctcttcctacacggccaacctggctgcctttctgaccgtggagcgcatggaatcacccattgactctgctgatgacctggccaagcaaaccaaaatcgagtatggggctgtcaaggatggggccaccatgaccttcttcaagaaatccaagatctccaccttcgagaagatgtgggccttcatgagcagcaagccatcggcgctggtgaagaacaacgaggagggcatccagagggccctgacggccgactacgcgctgctcatggagtccaccaccatcgagtacgtcacgcagaggaactgcaacctcacccagatcgggggcctcattgactccaagggctacggcatcggcacgcccatgggctccccataccgggacaagatcaccatcgccatcctgcagcttcaggaggaggacaagctgcatatcatgaaggagaagtggtggcggggcagcgggtgtcctgaggaggaaaacaaagaggccagtgccctggggatccagaagatcgggggcatcttcattgtcctggccgccgggctggtcctctctgtgctggtggccgtgggcgagtttgtgtacaagctccgcaaaacagcagagagagagcagcgttccttctgcagcaccgtggccgatgagatccgtttctcccttacctgccagcgtcgagtcaagcacaagcctcagcctcccatgatggtcaagactgacgccgtcatcaacatgcacacattcaatgaccgccggcttcccggcaaggacagcatggcctgcagcacatccttagcccctgtgttcccctaggcacagctggggtggggacctcaggcctgggggctgggcagaggaaagcaaaggagattggaaggaacgtcccctgtccccgcactgggcttggggaccagagctgccacctgcctgttgggccaggagcctcctgcccttacctgccaggaagccagcaggctctcaggccagctgcttgggcttcatcctcctcagatcttctgtgggtttctaaagctgccagccgagatagccaaggccaaaggaagcacatgcctctctcaggccaaactcacctgcccctcaactctcctccagagtcagaagtttctgccgcagccctgcagagggcacagaaaatggaagacagctcttatattgccatttcttccacaagagcccaggcctcctacagcttgaccgtgaggccagagacacaagccttcggcgccttaaggatgttctagcatggctgccaatgggagctcatggtgagggatacccatcccatatgcctgggcagaaggaagacttcatccctctggggctgttcacgtggtcctaatcttctgaacttggcgctgcccctggcagcccctgttctggcagagttgaagacagagctacacaggggaaaagaggagtttggggtatgggagagaagagaatgcacaaacagaggccgccattttggattcttatggacaatgacccagtggttcctaatcctctaggaggtctctaagaatataagtgggggagtggccacagaaaattcttctccactttctagccagaggagagaggaccccctgaatttctcacaaaggatgcccaaagatgcagccggtatttgaagcccagcagaggaaaagcagattccatggaagtcccaccggctcttgtgccaatggatctcactttcctggttagcaagctgttgtctaaaccctgttcacatttggaaacctgggctctttgccatcttctcatcaacaactccccattcctggctggttgaccttggcctcactctgtctttttgaaagaagagttggttgaagtgaaagtcaagttgtccctcctcaaaaaaggagttagtgtcctactacacagactaactttgggctaggtgagggaaaccagaagagaccaaaagaacttctggtctcctggacttaccaaacctagagatgctccccaggaaaagaaagtttccagggacataatatcatagctggcagaggccccaagggtggggaggaagaagctgcctcctggagaattaaccaaagaccccacacagagacatgaggccatcctggccccttgtctgttgtccagagcagctatggcattgtggggcttggggaagacagcagagaagtagcagcaggttgggtaccagccagggggtggacctatgagttccagcttgctgtgatgaatgctctagaggtctgtgactttaagagtcttggaaaagaatgagacatgaaggattaggaacaaagtgtccttaaagagaacatgatgggccagcagggttaccatggccaaggatggaggggcaggttttgaacaggggagggaggttctggggattctggatgagaactggggcataccagccactcccctcccacctctgtcccatgctgcttgggaagcccggttagggaagagcttcatttggatctcaagggctttctcatctgggtgaagggcaatctctagcaaagcaggagaccacagtgggctcatgtgataaacactgtccctcctccagactgtgagctgcaggaccaaaccagcaggttcccagaatcctagcagctctgactggctatgtacattggacgagggagaggagggctagacatacaccaaagccccatgcatgtaatgttaggaaaagccatgctgtcataagcttcagggtacagagggcgtgtgcatgtgtgtctgtgtctttgtgtttgtatgtgtgagcttcgggggctggggcacaggacagatctggacatataacatagtccagggcatgcaataataggtgaatccttggggatctgatgtgtgcatatgcgtgcgtatgtgtatctgagtgaattggggacgagggagacaaatatgtgaagcagcaaggccccatatatgtaaaaacaggagaagccatgtcataatggggccctggtgggtatgcatatgtaagcatgcatgcatgcataggtgtgtgcatgctggtgtgtgtgtgtgcacatgtacactgaatggcataggatggagatcaggatcttacctgcagctagccaaatatgcgtaaaaggagaagccatgtcaccaaggggtccatgtctgagtgcatgtgaacacatgtgtacaggcatgtgtgcacagtggggagcggggggaaggccaggaccagagagtcgtgtgacatgggtcaatgcatgctgtagacaagaagccacgtggagttgaagtttccgagtgtgtgggacacacacatatgttccaggtcacagtggaagcaaagacagacaatcaggaaggccgggcaccagggtctgtttgcacttctgtcatgggagagatcatttgtcacagagaggttccaaggttgcatgggcacacttgccaggagacgggggcacaacccttcaggggctcatgctgctgatgcctttgctgtggacatcatgtcctgtttgaagggaaaactcttttttgtaattcccaggtaacaggattctaatgaaggtatttgccaatttgctgtcagcaaacacaatcattaagcgccgtcttactttgtccagtatagtttcagagcacgtgcctcattcttgctcttgtctcacacatgtgttgtgtgtgtgatgctacatgagcatgttcttcagaggctatgcatatatgtggattgtgacaggaggaagaagaagtggtgagaatttttataaaacgaacaaagaatagtggataaatagaggcagaattcaattcgagaaaccccccaaaatgtaccgactggtctttagactcctgtgtggaagcaggagggcatgctgcctcatctcctctcccaggcaaaccttgcgtcctgatgttcaggtgttgtcggtgtggctgatatttggcttctggccaatatcctgcatttgtcctagagaccagcctagtgttcaaagtgcagtggggaccacagctgcccaagcatgagctctgtctctcccggggcactgaaaatgatgctacatctgtgaggtgggacggagtggggaggtgttttcagtgaggcagatcttgtgtttttttaagtttaggtctgtcctgccagtgggcatggagctgagctggggcaggtgcatgcgtgtgtgtgtatgtgtgtgtatgcatgtgtagtgtgtgtgcacacacgcaggcactgagaggtgatgggaagcatgaaagcttgcttggatggagcagaagaaggaacctgcctgagcagatgctggactgtccctgcgtggtgccacatgccagccctgaacagaagaatgtccccactgcatccccaaatgcaagtgcctcctctccacctgctcaagctggccaagttgaggggcagtggtaagaagacaccaaccccaccgcccctgccgaggccctgggactaaggacagtgagccctcccaatcactctccccttgtcctgctgctggtttctctgctctggacagaagaaaatcctgaaagcgttgtcaatgttcaagtggccccatgctgcaagagtctctcgcgaggggtgacgcccccttggccagtgtgctggactttgagtgtctgaggggtaagagggccaccccctcctcacagccgagactctatctaacctggaagcacactctggctccacccccaacccctgccatgccctaggccctggaagatgggaatcctggcccaggccagggtaaagggccaaacaggttagaagttgctcccctccaccaggcgtgcactcaccaagaacgatcaaaagctccctttctgcctacttttccaggggtactgggtgtggggggtgggtcacagctcctgcttcatcactcagcatgaagttggtccctccctgagccactcccagctacatgcacaaacatctgaaagtaggctggcctctctggctcacatctggagtggtcctgtgtggatacccatctgcaaaggggctagaggtttggacaaacagctgcatggacttatcatctgggatgggcccagcctcatggacagatacaagaaatgagcccaactctgtgggcaggtctctggattagacacatctgaaagttgcaggtcaagtggacacatctggaagtggcccggctgctggctgccatggaagggccgtgccctctgtccccatggcagtttaaatcaggccttcccttcagtcctggatttgccctggagtaaaaatttcagagctgaggtcatacgtgagtcacaaaacttttaggtagaaggttaatgttctgtacaatatatatatgaatgtaaaatatatatatatactgtatatatatatatatatgcacagtgtatatatgacctgtagcccatgtgtatacaaccctttcctgcacgtctgcacacggagtgtacagaacccagccagcacgggtgaggaccagatgagagatgggggctgcagcagcaaagtctgggacggaggtctcagagagccccttggggtggcgaaggccctccacacatcagagctccagaccctgaagaagagggcagagctacatggtgctgccaggtgagtcctgcaccgccagggcctcctgtgggaggggcaggaatggccaacggacctcatctccatccgagcctgtctgaggcaggacagctgggtgtgtctgagaagcaatgtcatgctagtactcagcccctgtgccaatattacattctagttctggggcaattcatcaggagcagaagggctgggaaagagcaggccactccccaggcctgttctcacacctgcctgcagaatcacaggtaggtttcaggctccatctaggataccctagaaggcggggctattctaggtagcaaaagcctctgcctctgattctcacccacatgcagaagcagtcacaacttgcacacaacacagctcacaactagggaaagcacttgttaaagagaatgcccccagggcatggccagcatgccgatacagtgttcccatgcccctgttactgatcctgtcctcctgccttctagaacagtggacctcacatcacctcccagattgtctccattttatggattgaaactctgaggcctccagacatgaagaagcagccatagattcagtcaaatgccagccaagggtttgccttgcctcagacaacctccccagccccatttgacccagagaccagctgtcagggagcgacctcagagccagaggggtgaaagatgagaggcaagaaggtagctcctatcctagcacagcccaggctccatctgtctgcctttctctcccctgcggcatcctggcagggcagttggcagagtgccccctccccaggaggctgcagatctctgtccctggctcacccagatcggtctgttctctgcagttccattcctttagcctctttcgcaggtctgagcatctctggagcatgcaggggaggagatatctgaggtgggcttccgtgcagtcagcagcctgccccagcttcagcctcaggcgtcaggctggtctgcactgaactctgggtctgcctctggggccctgaccaagcacgcctgactccagccccatgaggagcatcctgtcttggttccgtagggatcatgggtcctcttaccactgtgcgccaagcccccagcccacctctgcctgggccgacttcctggttgggcctcccatggtaggggcctcagttcccaggctctgggctgagcccccagggagcaccatgggcctctgagaccctagacctgtcccaccacccagaccagagtgcctggacgccccccactcccactcaacatggttcccacacactggtctctgggccattcaggggatgccctttgtggacatgcagaatttctatgaatatagttttttgtaaacattttgtaacaatttgggtttcatagtaactgtgttacttgccaatcattctaggctgatgtaaataaatttccaaacaaatctgattattttcctttttaagacactgtgatatatcaaagtgcacagtttgctgtatgaagtaatatggttttaaattttaaataaaatgtttctagaaaacagggaaaaaa

SEQ ID NO: 46 - protein, 919 aa, Homo sapiens [sequence omitted]

SEQ ID NO: 47 - DNA, 3382 bp, Homo sapiens
gttgagcgagagagggagcgtggagagctggagcagccgccaccgccgccgccgagggagccccgggacggcagcccctgggcgcagggtgcgctgttctcggagtccgacccagggcgactcacgcccactggtgcgacccggacagcctgggactgacccgccggcccaggcgaggctgcagccagagggctgggaagggatcgcgctcgcggcatccagaggcggccaggcggaggcgagggagcaggttagagggacaaagagctttgcagacgtccccggcgtcctgcgagcgccagcggccgggacgaggcggccgggagcccgggaagagcccgtggatgttctgcgcgcggcctgggagccgccgccgccgccgcctcagcgagaggaggaatgcaccggccgcgccgccgcgggacgcgcccgccgctcctggcgctgctggccgcgctgctgctggccgcacgcggggctgctgcccaagaaacagagctgtcagtcagtgctgaattagtgcctacctcatcatggaacatctcaagtgaactcaacaaagattcttacctgaccctcgatgaaccaatgaataacatcaccacgtctctgggccagacagcagaactgcactgcaaagtctctgggaatccacctcccaccatccgctggttcaaaaatgatgctcctgtggtccaggagccccggaggctctcctttcggtccaccatctatggctctcggctgcggattagaaacctcgacaccacagacacaggctacttccagtgcgtggcaacaaacggcaaggaggtggtttcttccactggagtcttgtttgtcaagtttggcccccctcccactgcaagtccaggatactcagatgagtatgaagaagatggattctgtcagccatacagagggattgcatgtgcaagatttattggcaaccgcaccgtctatatggagtctttgcacatgcaaggggaaatagaaaatcagatcacagctgccttcactatgattggcacttccagtcacttatctgataagtgttctcagttcgccattccttccctgtgccactatgccttcccgtactgcgatgaaacttcatccgtcccaaagccccgtgacttgtgtcgcgatgaatgtgaaatcctggagaatgtcctgtgtcaaacagagtacatttttgcaagatcaaatcccatgattctgatgaggctgaaactgccaaactgtgaagatctcccccagccagagagcccagaagctgcgaactgtatccggattggaattcccatggcagatcctataaataaaaatcacaagtgttataacagcacaggtgtggactaccgggggaccgtcagtgtgaccaaatcagggcgccagtgccagccatggaattcccagtatccccacacacacactttcaccgcccttcgtttcccagagctgaatggaggccattcctactgccgcaacccagggaatcaaaaggaagctccctggtgcttcaccttggatgaaaactttaagtctgatctgtgtgacatcccagcgtgcgattcaaaggattccaaggagaagaataaaatggaaatcctgtacatactagtgccaagtgtggccattcccctggccattgctttactcttcttcttcatttgcgtctgtcggaataaccagaagtcatcgtcggcaccagtccagaggcaaccaaaacacgtcagaggtcaaaatgtagagatgtcaatgctgaatgcatataaacccaagagcaaggctaaagagctacctctttctgctgtacgctttatggaagaattgggtgagtgtgcctttggaaaaatctataaaggccatctctatctcccaggcatggaccatgctcagctggttgctatcaagaccttgaaagactataacaacccccagcaatggacggaatttcaacaagaagcctccctaatggcagaactgcaccaccccaatattgtctgccttctaggtgccgtcactcaggaacaacctgtgtgcatgctttttgagtatattaatcagggggatctccatgagttcctcatcatgagatccccacactctgatgttggctgcagcagtgatgaagatgggactgtgaaatccagcctggaccacggagattttctgcacattgcaattcagattgcagctggcatggaatacctgtctagtcacttctttgtccacaaggaccttgcagctcgcaatattttaatcggagagcaacttcatgtaaagatttcagacttggggctttccagagaaatttactccgctgattactacagggtccagagtaagtccttgctgcccattcgctggatgccccctgaagccatcatgtatggcaaattctcttctgattcagatatctggtcctttggggttgtcttgtgggagattttcagttttggactccagccatattatggattcagtaaccaggaagtgattgagatggtgagaaaacggcagctcttaccatgctctgaagactgcccacccagaatgtacagcctcatgacagagtgctggaatgagattccttctaggagaccaagatttaaagatattcacgtccggcttcggtcctgggagggactctcaagtcacacaagctctactactccttcagggggaaatgccaccacacagacaacctccctcagtgccagcccagtgagtaatctcagtaaccccagatatcctaattacatgttcccgagccagggtattacaccacagggccagattgctggtttcattggcccgccaatacctcagaaccagcgattcattcccatcaatggatacccaatacctcctggatatgcagcgtttccagctgcccactaccagccaacaggtcctcccagagtgattcagcactgcccacctcccaagagtcggtccccaagcagtgccagtgggtcgactagcactggccatgtgactagcttgccctcatcaggatccaatcaggaagcaaatattcctttactaccacacatgtcaattccaaatcatcctggtggaatgggtatcaccgtttttggcaacaaatctcaaaaaccctacaaaattgactcaaagcaagcatctttactaggagacgccaatattcatggacacaccgaatctatgatttctgcagaactgtaaaatgcacaacttttgtaaatgtggtatacaggacaaactagacggccgtagaaaagatttatattcaaatgtttttattaaagtaaggttctcatttagcagacatcgcaacaagtaccttctgtgaagtttcactgtgtcttaccaagcaggacagacactcggccag

SEQ ID NO: 48 - protein, 937 aa, Homo sapiens
MHRPRRRGTRPPLLALLAALLLAARGAAAQETELSVSAELVPTSSWNISSELNKDSYLTLDEPMNNITTSLGQTAELHCKVSGNPPPTIRWFKNDAPVVQEPRRLSFRSTIYGSRLRIRNLDTTDTGYFQCVATNGKEVVSSTGVLFVKFGPPPTASPGYSDEYEEDGFCQPYRGIACARFIGNRTVYMESLHMQGEIENQITAAFTMIGTSSHLSDKCSQFAIPSLCHYAFPYCDETSSVPKPRDLCRDECEILENVLCQTEYIFARSNPMILMRLKLPNCEDLPQPESPEAANCIRIGIPMADPINKNHKCYNSTGVDYRGTVSVTKSGRQCQPWNSQYPHTHTFTALRFPELNGGHSYCRNPGNQKEAPWCFTLDENFKSDLCDIPACDSKDSKEKNKMEILYILVPSVAIPLAIALLFFFICVCRNNQKSSSAPVQRQPKHVRGQNVEMSMLNAYKPKSKAKELPLSAVRFMEELGECAFGKIYKGHLYLPGMDHAQLVAIKTLKDYNNPQQWTEFQQEASLMAELHHPNIVCLLGAVTQEQPVCMLFEYINQGDLHEFLIMRSPHSDVGCSSDEDGTVKSSLDHGDFLHIAIQIAAGMEYLSSHFFVHKDLAARNILIGEQLHVKISDLGLSREIYSADYYRVQSKSLLPIRWMPPEAIMYGKFSSDSDIWSFGVVLWEIFSFGLQPYYGFSNQEVIEMVRKRQLLPCSEDCPPRMYSLMTECWNEIPSRRPRFKDIHVRLRSWEGLSSHTSSTTPSGGNATTQTTSLSASPVSNLSNPRYPNYMFPSQGITPQGQIAGFIGPPIPQNQRFIPINGYPIPPGYAAFPAAHYQPTGPPRVIQHCPPPKSRSPSSASGSTSTGHVTSLPSSGSNQEANIPLLPHMSIPNHPGGMGITVFGNKSQKPYKIDSKQASLLGDANIHGHTESMISAEL

SEQ ID NO: 49 - DNA, 3207 bp, Homo sapiens
gcagcttacaccgcggtccccttatttggatctgcgggaatgtgggctggagaggtcctgccgtggtaccagcctccagcctgcccccaggactgcccctgacccaggcgcgcccgctgctcggtggcaggagggccggcggagcgccatggcctgcatcctgaagagaaagtctgtgattgctgtgagcttcatagcagcgttccttttcctgctggttgtgcgtcttgtaaatgaagtgaatttcccattgctactaaactgctttggacaacctggtacaaagtggataccattctcctacacatacaggcggccccttcgaactcactatggatacataaatgtgaagacacaagagcctttgcaactggactgtgacctttgtgccatagtgtcaaactcaggtcagatggttggccagaaggtgggaaatgagatagatcgatcctcctgcatttggagaatgaacaatgcccccaccaaaggttatgaagaagatgtcggccgcatgaccatgattcgagttgtgtcccataccagcgttcctcttttgctaaaaaaccctgattattttttcaaggaagcgaatactactatttatgttatttggggacctttccgcaatatgaggaaagatggcaatggcatcatttacaacatgttgaaaaagacagttggtatctatccgaatgcccaaatatacgtgaccacagagaagcgcatgagttactgtgatggagtttttaagaaggaaactgggaaggacagagtccagtctggctcatatctcagcacagggtggtttaccttccttctggccatggacgcctgttatggcattcacgtctacgggatgataaatgacacctactgcaagacagaagggtatagaaaagtcccctaccattattatgaacaaggaagagatgagtgtgatgaatattttcttcatgaacatgccccatatgggggtcataggtttatcactgaaaagaaagtgtttgctaaatgggccaagaagcacaggataatatttacacatccaaactggacattgtcttgataatggttttcctgatcttgccgcatcacttaatgtgatccccatactgcaactgtgatgctgatgatgctaatggagatgatggtaatgataaagacaacaacaatgattatcaagttcctgtacactctcagatgtggatggtgactctgctagtaatttaaacttggcatttcatggaggatggttgtgctcatgatgttctttctggaggttcaacactacgtaccgcactttataatttaactggaattgagatgaaggccagtgacatgacaactgtgacctaagaaatgggaagattatctttcaagatagctgcctagaattgttcaacagtgagtaacttccagaagccaaaagagtttggcttcatgaggcaaggtgattgactcaatggcttgttgaatctcagcagttccgccatcttgaagaatgattgattgtcaaacactgacccaagaactgctatcagggtgcaagtatcttactacttagcctaaggatgggaaaatatctcttcctaatataccatctttctacagtatttcctacagctaaagcctcaggccattgcctaattaacaatgaagatttcatggacatcctacacttcaggattacttgactatctcaaacacataaatcaaaatgggccaagtagcaaatcttgatgaatttccactcttaccatccattcttactaccaacagtataactgaacatgtgattagaatgatctatattaatgtttagttatttttggttgagtgctaaatatttcagaaggctacttaacatgtaagataccaacttcaacactgtaataacatatactgtgaaaacattcctaaaaagtaaccaaagggtttgctaactctgcttcaacatccaacaacacaaaactatatgatttttaaaatcatgaaatagagacagcaaagcatatttttacatcaatttgtatcctatcatacttcataatatatatttgtatattcaaatttctattttataggcccaaggtgtgtttctccaaacattacattctcattgccaagtgccagctgttacacatggagaggaaatgattccttatattaaacctgaccagagctttttgccttctagggatttatttttcccatagtgtatcagttgttatgccacaataacaacaataataatgttcttaatgtccaaagtgctttgtcatttagagtcctttaacatctgttataccatgtgatgcccttgaacaccccattgggctattgtctgtgtattctgccctctttagcagatgatctgtaatttggtcattgttctgttatattccagattgctctacttgctaatatttgtatagaatagaatttatgtaaactagtaaccagttgatctctgtgccaaatacattatatcaggattacacaaaaagcatcacaaaggatggtcttggccatatgctagggcccctgtgaaaataagtagttttgagaagtttttctatatacgtatatatacacgtgtggttctatttaggtggggaaaaaatgaaaaagcagggacaacaggaggaaatgaaggcagagaaatatagtttcctttcctaggattgagacaattctatttttcatatactcgttgctcattaaatagtaaagggttgatttgctgcaagagtagctgagaattcaaaaacatccttgcagaatgattcaaaagacaaaagccaggctcaacttatagaatgttttggaaactggaagtaatgatacatttcacttcagaagcacttgtaggtctttactagtgctaagtattatggtgagctatcattaaagtgtgccatcttggataaaggccttttgcctactctcttctgcaattttgacacctcaatattcacacccataaacattactaagccccagttctatcgttggaaggagttgttattcttttgttgttcccttatgcaatttttaattctatgaatgttaagtttttttgagctaatgatagatagaaatgcccactcaaagaaaaataaacagagacaaatgttaaaattgccatacagactgtttttccccctgttgtttcactttaaaataaaaagaaatccttgattaatc

SEQ ID NO: 50 - protein, 305 aa, Homo sapiens
MACILKRKSVIAVSFIAAFLFLLVVRLVNEVNFPLLLNCFGQPGTKWIPFSYTYRRPLRTHYGYINVKTQEPLQLDCDLCAIVSNSGQMVGQKVGNEIDRSSCIWRMNNAPTKGYEEDVGRMTMIRVVSHTSVPLLLKNPDYFFKEANTTIYVIWGPFRNMRKDGNGIIYNMLKKTVGIYPNAQIYVTTEKRMSYCDGVFKKETGKDRVQSGSYLSTGWFTFLLAMDACYGIHVYGMINDTYCKTEGYRKVPYHYYEQGRDECDEYFLHEHAPYGGHRFITEKKVFAKWAKKHRIIFTHPNWTLS

SEQ ID NO: 51 - DNA, 3178 bp, Homo sapiens
gatctcttggagacggcgacccaggcatctggggagccacagaagtcgtactcccttaaaccctgctttgctccccctgtggatgtaaccccttagctggcattttgcatctcaattggcttgtgatggaggcgtctttggggattcagatggatgagccaatggctttttctccccagcgtgaccggtttcaggctgaaggctctttaaaaaaaaacgagcagaattttaaacttgcaggtgttaaaaaagatattgagaagctttatgaagctgtaccacagcttagtaatgtgtttaagattgaggacaaaattggagaaggcactttcagctctgtttatttggccacagcacagttacaagtaggacctgaagagaaaattgctctaaaacacttgattccaacaagtcatcctataagaattgcagctgaacttcagtgcctaacagtggctggggggcaagataatgtcatgggagttaaatactgctttaggaagaatgatcatgtagttattgctatgccatatctggagcatgagtcgtttttggacattctgaattctctttcctttcaagaagtacgggaatatatgcttaatctgttcaaagctttgaaacgcattcatcagtttggtattgttcaccgtgatgttaagcccagcaattttttatataataggcgcctgaaaaagtatgccttggtagactttggtttggcccaaggaacccatgatacgaaaatagagcttcttaaatttgtccagtctgaagctcagcaggaaaggtgttcacaaaacaaatcccacataatcacaggaaacaagattccactgagtggcccagtacctaaggagctggatcagcagtccaccacaaaagcttctgttaaaagaccctacacaaatgcacaaattcagattaaacaaggaaaagacggaaaggagggatctgtaggcctttctgtccagcgctctgtttttggagaaagaaatttcaatatacacagctccatttcacatgagagccctgcagtgaaactcatgaagcagtcaaagactgtggatgtactgtctagaaagttagcaacaaaaaagaaggctatttctacgaaagttatgaatagtgctgtgatgaggaaaactgccagttcttgcccagctagcctgacctgtgactgctatgcaacagataaagtttgtagtatttgcctttcaaggcgtcagcaggttgcccctagggcaggtacaccaggattcagagcaccagaggtcttgacaaagtgccccaatcaaactacagcaattgacatgtggtctgcaggtgtcatatttctttctttgcttagtggacgatatccattttataaagcaagtgatgatttaactgctttggcccaaattatgacaattaggggatccagagaaactatccaagctgctaaaacttttgggaaatcaatattatgtagcaaagaagttccagcacaagacttgagaaaactctgtgagagactcaggggtatggattctagcactcccaagttaacaagtgatatacaagggcatgcttctcatcaaccagctatttcagagaagactgaccataaagcttcttgcctcgttcaaacacctccaggacaatactcagggaattcatttaaaaagggggatagtaatagctgtgagcattgttttgatgagtataataccaatttagaaggctggaatgaggtacctgatgaagcttatgacctgcttgataaacttctagatctaaatccagcttcaagaataacagcagaagaagctttgttgcatccattttttaaagatatgagcttgtgataatggatcttcatttaatgtttactgttatgaggtagaataaaaaagaatactttgtaatagccacaagttcttgtttagagaccagagcaggattaataatttattttaacattttagtgtttggtggcacattctaaaatatagattaagaatacttaaaatgcctgggatagttcttgggactaacaacatgatcttctttgagttaaacctacctaagtagattttaggtgggttcctattaggtcagatttttagcttccctaattacctttcactgacatacagaaaaaggagcagttttagttttaattaattaaaattaacagatgtgatgaggattaaatgaatcaaaagacttaatttgtagattcttttagagttatgagctaggtatagtttggggaaactcaacctggtgctggtgctcttaacaattttgtaaataaagaagataatttccttttctagaggtacatattaggccttttatgaacactaaaacaatgaggaaatgttggtcatggggcaaagtatcacttaaaattgaattcatccatttttaaaaaacacttcatgaaagcattctggtgtgaattgccatttttttcttactggcttctcaattttcttccttctctgcccctacctaaaacattctcctcggaaattacatggtgctgaccacaaagtttctggatgttttattaaatattgtacgtgtttacagttgggaatttaaaataatacatacactggttgataaagggaagctgcaggaccaaggtgaagattgatagtccaaatgcttttcttttttgagttgtatattttttcacaccatcttagatataattaggtagctgctgaaaggaaaagtgaatacagaattgacggtattattggagatttttcctctgcgtagagccatccagatctctgtatcctgttttgactaagtcttaggtgggttgggaagacagataatgaagtaggcaaagagaaaaggacccaagatagaggtttatattcagaaatggtatatatcaatgacagcatatcaaacttcctatgggaaaaagtctggtgggtggtcagctgacagatttcccatttagtagtcatagaatacagaaatagtttagggacatgtattcattttgttattttgagcattgataggtcagtatatctacctaatctgtttggtaagtataggatatataaaccattaccattgatctgtcttatgccataatcttaaaaaaaaattgaatgctcttgaatttgtatattcaataaagttatccttttataaaaaaaaa

SEQ ID NO: 52 - protein, 574 aa, Homo sapiens
MEASLGIQMDEPMAFSPQRDRFQAEGSLKKNEQNFKLAGVKKDIEKLYEAVPQLSNVFKIEDKIGEGTFSSVYLATAQLQVGPEEKIALKHLIPTSHPIRIAAELQCLTVAGGQDNVMGVKYCFRKNDHVVIAMPYLEHESFLDILNSLSFQEVREYMLNLFKALKRIHQFGIVHRDVKPSNFLYNRRLKKYALVDFGLAQGTHDTKIELLKFVQSEAQQERCSQNKSHIITGNKIPLSGPVPKELDQQSTTKASVKRPYTNAQIQIKQGKDGKEGSVGLSVQRSVFGERNFNIHSSISHESPAVKLMKQSKTVDVLSRKLATKKKAISTKVMNSAVMRKTASSCPASLTCDCYATDKVCSICLSRRQQVAPRAGTPGFRAPEVLTKCPNQTTAIDMWSAGVIFLSLLSGRYPFYKASDDLTALAQIMTIRGSRETIQAAKTFGKSILCSKEVPAQDLRKLCERLRGMDSSTPKLTSDIQGHASHQPAISEKTDHKASCLVQTPPGQYSGNSFKKGDSNSCEHCFDEYNTNLEGWNEVPDEAYDLLDKLLDLNPASRITAEEALLHPFFKDMSL

SEQ ID NO: 53 - DNA, 942 bp, Homo sapiens
atgaagctgacccaccgcatgctgcttcgaagcttctgtatcgccaacgtgttctgcgaaaactcgggacaagattaactgcttcgatttcagccctaaaagcgaggtgatcaccttgagcagcaacgacgactccatcgtgctctctgactgccaggagggcaaaccaaaaccctgttcagtaagaaatacggtgtggcctcatcagataaactcctgcggcaaacacagttgtttacagctgtaacaaaatagacgatactattcgttacttgtccttgcatgacaacaaatacatcagatactttcctggacatagcaaaagggtggtggtcttgtccatgtcacctgtggatgacactttcatttttgggtctcttgaataagaccattcgactctgggatctccggtctcccaactgccagggcctcatgcacataaaggggaatccagtttgttcttttgatccagaagggtgaatttttgctgctggtgtcaactctgaaatggtcaaactttatgaccttcgttcttttgataaggggccatttgctacctttaagatgcagtatgatcgaacttgtgagtggacagcacttaaaatcagcaacggtggcaagctcatcctcatttccaccaatgtcagcttcattcgtctcattggtgcattcaaaggagtggtgatacacacatttggcagttatgccaacagcgaagctgtcacactggaggcttcatttactgcagactctcagtttgttatgattggttcagaggatggcaagatccatgtctggaatgaagagagtggtataaaagtagctgggttggatggtaaacacacaggcccaattacctgtttgcaattcaaccccaagtttgtgacttttgccagcgggtgtaccaacatggccttctggttgcccaccattgatgactga

SEQ ID NO: 54 - DNA, 4685 bp, Homo sapiens
cagccgaacaattcgatgacgaggcccaggaagcacgctgaaaccctgggcggcggcaagctgtgcgacctcttctgcggccggcctgggcaggtgtcttcctcgagaggcaggcaggggatcccggacccttatacaggatgctgtgttctttgctcctttgtgaatgtctgttgctggtagctggttatgctcatgatgatgactggattgaccccacagacatgcttaactatgatgctgcttcaggaacaatgagaaaatctcaggcaaaatatggtatttcaggggaaaaggatgtcagtcctgacttgtcatgtgctgatgaaatatcagaatgttatcacaaacttgattctttaacttataagattgatgagtgtgaaaagaaaaagagggaagactatgaaagtcaaagcaatcctgtttttaggagatacttaaataagattttaattgaagctggaaagcttggactttttcatgattttgaaacatggaagtggcgattcgaagattcctttggagtggatccatataatgtgttaatggtacttctttgtctgctctgcatcgtggttttagtggctactgagctgtggacatatgtacgttggtacactcagttgagacgtgttttaatcatcagctttctgttcagtttgggatggaattggatgtatttatataagctagcttttgcacagcatcaggctgaagtcgccaagatggagccattaaacaatgtgtgtgccaaaaagatggactggactggaagtatctgggaatggtttagaagttcatggacctataaggatgacccatgccaaaaatactatgagctcttactagtcaaccctatttggttggtcccaccaacaaaggcacttgcagttacattcaccacatttgtaacggagccattgaagcatattggaaaaggaactggggaatttattaaagcactcatgaaggaaattccagcgctgcttcatcttccagtgctgataattatggcattagccatcctgagtttctgctatggtgctggaaaatcagttcatgtgctgagacatataggcggtcctgagagcgaacctccccaggcacttcggccacgggatagaagacggcaggaggaaattgattatagacctgatggtggagcaggtgatgccgatttccattataggggccaaatgggccccactgagcaaggcccttatgccaaaacgtatgagggtagaagagagattttgagagagagagatgttgacttgagatttcagactggcaacaagagccctgaagtgctccgggcatttgatgtaccagacgcagaggcacgagagcatcccacggtggtacccagtcataaatcacctgttttggatacaaagcccaaggagacaggtggaatcctgggggaaggcacaccgaaagaaagcagtactgaaagcagccagtcggccaagcctgtctctggccaagacacatcagggaatacagaaggttcacccgcagcggaaaaggcccagctcaagtctgaagccgcaggcagcccagaccaaggcagcacatacagccccgcaagaggtgtggctggaccacgtggacaggatccggtcagcagcccctgtggctagaggaacaccagcacaaacgacagcctcaagtctccttcgagctttatatccatttggggatgaagtctactttgacagctagcaaggcgacatgcaactgttgttgaatgatgacagcaattcaggaaagacttaaatatgaaagcaaattgaacacatcgggtgtttgttatcagaaaagagatgagatgagataagacttgtttattgactagccaatatgtcattaaaattaaggtttatattgtgaagcttttttgaaattttacttttttttgagagttttgctctgtcacccaggctggagtgaggtggtacaatctcggctcactgcaacctccacctcccaggttcaagagattctcctgcctcagtctcccgagtagctaggattacagatgtgcatcaccatgcctggctaatttttgtattttttagtagagatggggtttcaccatgttggtcaggctggtctcgaactcctgacctcaagtgacccgcccttgtcggcctcccaaagtgctgggattacaggcatgagccattgtgcccagcctatatagtgtgaagcttttaggaaaatcagaacagggtagacagctgttaaaaacaatgtttaaatggaataatgttgaatgtttacaggctgtaagaactattgtatacacaaaataatacacaaagtttgtactttgtgtacaaatacaaatttgtactttgtgtacaaataatacaaaaagtttgtatacacaaactttttacgttgtggtttggtatattgtcttaactgaattttcttataagaaccccatgaaacttacctgagtttttaaaatgctatccaggacatcataccttatagtatacatgaaacataatgtaatccaggttgtaatttagaactttttttttttttttagctgagcacttaatgtaattaattccaggttatgactcttaaaaaacattggccattagagaaatagttctatttgcccatccaaatcacctgaatgactttttgaaagaataggggtccacatccccagatcccatcccagctgtgcacagtctgaagcaagcagagtgaaacaagttggcaacttgttccaagcgtgggcctttgcagtctgtgatccagtgttactccaggtcccagtctgtcccatacttgtcttttgctacagttagttagttactttgttatcatccccttgtaaactgccttcaatatctgggataaggaagacaaagcttaatgacaactaaggttctagctgacatctttctttcatatttaatttttgtgagttttcatctgttttctgtttgtttatgtgtcctaggttcttgacctaaccacatgggttttgttttttgtttttatattagaacttagaaaagtttgttttacagcagtattatggaacagaagagaccattttaaataatttttttaaacagcccaaaacacacaaaagatacttgttttctagagacagggtcttgctctgtcacccaggctggagtgcagtggcacgatcatagctcagtgcagcctccacctcctgggctcaagtggtcctcctgcctcagcctcttaagcagttgggactacaggtgtgtgccagcatgcttgctgttttttttttttttgagacagagtcttgctctgtcactcaggctggagtccagtggcttggtctcagctcactgcaatctctgcctcccaggggttcaagtgattctcctgcctcagcctcccaagtagctgaaactacaggcgcatgccaccatgcccagctaatttttgtatttttagtagagacagggtttcactatgttggccaggctggtctcaaactcccgacctcaagtgatccgcccgcttcggcctcccaaagtgctgggattacaggtgtgagccactgcgcctggctgctgatttatttttcatagacacgggggtctatgttgcccaggttggtcttgaactcctagcctcaagcgatcctcctgcctcagcctcccaatgtgctgggattacaggaatgagccaccatgcccagcccaagaagtagagtttcttttatactgactttggcctaaaaaaacagattttcatggaggaaaaaaaaacctagatttttagtaagactattttatatacttttttacattgatcaagtacattatttttaccaaacaacattgtttcccactacatccatggttatgtataaaaaaacgccattgtcaattaagatgttaaaaaattatttccataagagtattaaattctaatctatgattcacttaacttcctactttataaacactaggtaaagtaatctcacaagctgccaaagaacacatcccaagcagtaatcacagacgatgaagcaccttacaggacccctccaccctcaaacgcgcatgtccagagaagtattaatgccttaatagactactgaaggttaactatttacatcattctaaaaatattttaagctgtattacagtgctataaattctccttttaaggaaaaaagtaatagattgtttccttaccgtgtttgaaaggaaaaaaaataaatccatagtaactaatggtctgccgattttttccctgaatttttaaactccaacaaagcattattttgcaaaaagtcctttagcccaaagtcagtgtctctgttttgatctctttgtaaaagaactctctgttcatccattctctttccctgggaccgtaaaataaggctgaaaaagtcttcatctggtactgtcggaccctttgtggtagcaggtggtggagcacatctttgatcatctaatctggatccctagaagtttatgagagagattaaaagacatactgtgggaaagaaagcaccaagctatgttaaatctctcagtcacaacaagaaaacgcagttgtaaacttttatttggggcttctcagaaattaatctttgtttttatattgttctctttagttcccagcctgatttctgaaagaaataatctttaaacctg

SEQ ID NO: 55 - protein, 501 aa, Homo sapiens
MLCSLLLCECLLLVAGYAHDDDWIDPTDMLNYDAASGTMRKSQAKYGISGEKDVSPDLSCADEISECYHKLDSLTYKIDECEKKKREDYESQSNPVFRRYLNKILIEAGKLGLFHDFETWKWRFEDSFGVDPYNVLMVLLCLLCIVVLVATELWTYVRWYTQLRRVLIISFLFSLGWNWMYLYKLAFAQHQAEVAKMEPLNNVCAKKMDWTGSIWEWFRSSWTYKDDPCQKYYELLLVNPIWLVPPTKALAVTFTTFVTEPLKHIGKGTGEFIKALMKEIPALLHLPVLIIMALAILSFCYGAGKSVHVLRHIGGPESEPPQALRPRDRRRQEEIDYRPDGGAGDADFHYRGQMGPTEQGPYAKTYEGRREILRERDVDLRFQTGNKSPEVLRAFDVPDAEAREHPTVVPSHKSPVLDTKPKETGGILGEGTPKESSTESSQSAKPVSGQDTSGNTEGSPAAEKAQLKSEAAGSPDQGSTYSPARGVAGPRGQDPVSSPCG

SEQ ID NO: 56 - DNA, 5359 bp, Homo sapiens
ctgggctgatccggggctcggccaagctgaggcggcggcgcccggccgtgcgcccagcttgcaggcgcctggctctcacgatgatgaagaagaagaagtttaagtttaaggtggacttcgagctcgaggagctctcctcagtgcccttcgtcaatggggtcctcttctgcaagatgcggctgctggacggcggcagcttcaccgccgagtcctccagggaggtggtacaagcaaactgtgttcgctggagaaagaagttctcatttatgtgcaaaatgagtgcaagtgctgccacaggcatcctagatccttgtatctacagagtatccgtgaggaaggaattaaaaggtggaaaagcttatgcaaagctgggctttgcagatctaaacctggcagagtttgctggatcaggaaataccactcgccgctgtttactggaaggctatgataccaaaaatacaagacaggataattccattcttaaagttttgatcagtatgcaactgatgtctggtgacccatgttttaaaacgcctccctccacttcaatgtctataccaattgctggtgaatctgaatctttgcaagaagatagaaaaggtggagagactctcaaagtgcatcttggaatagcagatctttcagcaaagagtgcctctgttccagacgaacttggtgcctgtggacattctagaacatcaagctatgcaagtcagcagtcaaaagtatcagggtatagcacgtgtcactcccggtcatctagtttctctgagctctgccacaggagaaatacctcagtgggaagcacatcaacaggagttgaaagtattctagagccatgtgatgaaattgagcagaaaatcgctgagccaaatcttgatacagctgataaagaagatacagcttcagaaaaactcagcagatgcccagtgaaacaagattctgtagaatctcagctgaagcgagttgatgacaccagggtggatgcagatgacattgtagagaaaatattacaaagtcaagacttcagcctagattccagtgcggaagaagaaggactaaggctatttgtgggtcctgggggaagtacaacctttggcagtcatcatcttccaaatagggtggggtctggagcttatgaacaagttgtgatcaaacgctagaagtcaagtcggtgaaaacatttccttgtggatttaagatgtgagtagttgatgtatcaaggcattttattcaagcacttaatagaaaatgaacctcaactatcaagaggaaagccaatgctggtttcttctctggaaggacccaccgccatcctgtaccagccaccaaaggggaacatctacatggcagtctccaggcactgtgccactgtgtgccttggaagcacctggcttctgtggtcactgcacatcataatgaaaagcctgctttttctttcagaacaccccagcggagaaaacagcattatatacatcggagtatcattttaggattcaagtgtaaaaatctgtgatcaagaggctcaatagatttgggctctatggtttggtttttttagtttgagagacagtacatgaatataacttaaaccctatagattttgtcaagatagttgtaattcctgttctggaaatcttccctattacactacctacagcattgtataaagtgtgggtgttcatgctttgggaaaatgttagactacaatttaaacatgtgatgtgcttattcataattctcagtgtatcagtcataaatgaaataacaagtgcatttaagtcagagatacgtgaatggatgtaatgccgttatgcagtatatattgttaattgtcattaatattagatgagctgcagaaccacccccaagcactacataaaagactcaaaataagtttaacacttactgtgttgggcaccctaacagaagagctatcttaactcattgaatattaagatctgctggtttcaggagtcaaaatgtagaaaaagaggagaattgtaatatggtcagaaacagagaagccttttctatgtaaattcagacttatctgaggctaacagttttccgaagtggtggtgggtagcagcatgacagctgcttgccatgactgatgcagactactaggtttccattttagctctctgtaggtactgttttcttccccactgtgtcgaaagtgatttgttttgaagcaagagtagaatataacatctatcaaatatagcttttaaaataagaatacctggtctggatccagttgagcagcacagcagataaaccttagagtttttctgttcttacatgacggtttccatgtggaaagatctaaactttcttggaatcactattagtgaagaaaaatgtagaatctgtataaccagtaattccccaattcttactttcaaagtcatatccaagaaagacaatatgtcagaatagaatgactttggtctaggtgttttcacgttggcaaaaataaggaggaaattatattattttaatatccaaatttaaaggtttggaaaattttgaatagttaatattagaacttatgttgctgttttttatatttcaaggattgagtattctgcattaatccaatactattccaacaaagagattctggaagtttttaaaaaatgataccctgttttatattttgaatgtagagagactctgagagagagaatgttctgagttatactttttattttttaagatttatttttaagaataaaacattgacctgaacattttagcctaaccaagggacttaagtggtaaagacttgcattatgtcttcatgtgaactgatccgttcattatatattatgggaaaaatcaaagaaagttttttatagagatatgaagatattatttagagagatatttattatgacattttttaaaaacatatttttctattttcaaaatattatttctaggctatatttttattggtgctgtgcaaatgattttgcagttttgaaaatgataaaactagattgtaagtggggttcagtgaggacattcatcagacacgtaagaggtgctgcaatcagggtgatgcccatcttactcatccttggctgcccttggtccgacacctctctatacaagactggttctcagtattttaaatggtacagaattctttttaaaaagtagagagattttgaaaagcataaaaatcatgcctttataatcttagcagccatcagatacaccttgatttatgtagtagtaaatataacaaatattttaataaatagaaacactgataaggaagaaaaaagaactaatgtctatgtcttctgtagtcagcaaaagtctggatccattttctattttgtgttccattggcacactttgtgttcaaatttcagtgcagtcctttcaaaatactcgctaagggttgcctaagtgtctgccttactttctgattgtccttttctgagagcatggttaagaacatcttaaccatatagctgttgaaaaaatctgtttattaaataacaagttcacttctgtttatgttttgagtttagaaaatttgacttgaaaatttagattattaataaatttatttttaaatattaaagtcaaatttcaaatcacccagtgttgaagaatttgcagatgtatacaatactttttctaattatgtcttttctatctccatgcctggctttttctaattatatcctagagaaaaagactaatggtatttcaaagctgtgtatttgtgacgagataaagaagagtcttaaacatcttgtttgggagaatgcacaggccagtcaggagacccacctcctcctgtgccctgagctgctgagacccgacagatcatgaaggctagtaaagggcagagaaggccctgagccatcagtttacactcgaattgttgactcccctttgtggtgtttttgaaggctgcttataccaacagctaatgtggattagtgcttatgatcttgaaaaagtcttgaccaagaatcctaaactccaccactcctcccattccagcttaacactatcagaataatatccaaattccagatttttttcttttttacttttttttcttccttttttaagagagacagtgtcttgctcggtcacctaggctggagtgtagtggcgcaatcgttgctcactacagcctcccaactcccaggctcaaatgagcctcccaccttggcctcccaaagtgctaggaccacaggcatgagccactgtgcccagcctagtttcttttctgtatgctttttttacaaaactgtgagccacagaggttgaccacttagccaatttgttgctagaagggagaaaaaaatctccaactagcctccagacaaaacatactcaaattcaaacagcagttagttttaattaacatacagaagtaattttagactttcagatttctatgctgactagaacactttgcaggctgaagctgacattattaccaaatacttcatttaagtacatactctgaagtgtcaggcttccagtatatatagcaacgctctgagagacaaactgggctcatatgacggggttgcattttattttcttaacaggtctttaaattgggcagttctgaaattctgtttggtcagttctagatggtacgtcatgtgaatgcaaccaagcactgtagttgaaattgtgttatgccactactcatatgttgtcttaggtactacgcataatgttaatagctgagatgttaaagaatttgaagtctaaaatataaaagatgaatatacccatattaatcctatgttaagatgctctggaaataaaggccttattcccttacacatgcgatttttgtaagataatatatacacagtatattttaaatgtttgtgtgggtggtctgtgtagttactccccatacaacaaagctgacaaaatttttaatttacacaatgtattctgcattttcaaatgtttatgttgtgtatatagcaaagaaattatcttactgatatgcgttgaccaaatcccatggagaaaagacatctcatttgaggttccccttcctctcatgtgtttgattttttggaaggtgatacagtatgtgggtaaccatgcaaatgtttatgaataactttactgaagtgattccatccgtattctgttctaatacttggagaatgaccttcatatttatatattttatttctttgtttcaactatccagtgataattcaggaaatgtttccttttttttttttttttacaaaaactttttatttgtaaaatgtttgtaataatgtaaaggtgaacatgttcaataaaaatcatatattaaaagtttaaaaaaaaaaaaaaaaaa

SEQ ID NO: 57 - protein, 360 aa, Homo sapiens
MMKKKKFKFKVDFELEELSSVPFVNGVLFCKMRLLDGGSFTAESSREVVQANCVRWRKKFSFMCKMSASAATGILDPCIYRVSVRKELKGGKAYAKLGFADLNLAEFAGSGNTTRRCLLEGYDTKNTRQDNSILKVLISMQLMSGDPCFKTPPSTSMSIPIAGESESLQEDRKGGETLKVHLGIADLSAKSASVPDELGACGHSRTSSYASQQSKVSGYSTCHSRSSSFSELCHRRNTSVGSTSTGVESILEPCDEIEQKIAEPNLDTADKEDTASEKLSRCPVKQDSVESQLKRVDDTRVDADDIVEKILQSQDFSLDSSAEEEGLRLFVGPGGSTTFGSHHLPNRVGSGAYEQVVIKR

SEQ ID NO: 58 - DNA, 1890 bp, Homo sapiens
gtttttaggcctttgccacgcctcgggagcgccacgaactcaacagccgcccaagccgccttccggctcgcggtctgcggacgcgctcggagttgggggccttcgccaacagctgccgtaccgtgccgcgtcgcagccgcacgctagcggggtcaacggcgcggcaggcgcaggggtcctcgccaaggttcggaagaggaccttgaaaatggcttctgggcatgcgccacagcggccgttacgagacgcaaaaccgacgccttggaactgagagcctagagggacggagctcggcgcaccatgaggctcccggggcccaaggccgaccgtgagagcgcacgagctgagtcagtgctgattctctcaaatagagcttgaaggataaatcttcatttttgtttcaacaaaacttcgaaacaaaatggaagaaaataatctacagtgcagtagtgtggttgacggtaattttgaagaagttcccagggagacggcaattcagtttaaacctccactatacagacagcggtaccagttcgttaaaaatttagtggatcaacatgagcctaagaaggttgcagacctgggatgtggtgatacttcactcttaaggctgctaaaagtcaatccatgcattgaattgcttgttggagtagatattaatgaggataaattacgatggagaggggattcgttagctcctttcctgggggattttctgaaacctcgggatctgaatttgaccatcacattgtatcatggctccgttgtggagagagactctcgtttgcttggatttgacttgataacgtgtattgaattaatagaacatttggattcaggtgatctggccagatttcctgaagtggtatttgggtacctgtctccatccatgattgtcatcagcacaccaaactctgaattcaatcccctgtttccatcagtgaccttaagagattcagatcataaatttgagtggaccagaatggagtttcagacctgggctttatatgtggcaaatcgctatgattactctgtggagtttactggtgtcggggaaccaccagctggagctgagaatgttggatactgtacccagataggaatcttccggaaaaatggaggaaaggcaacagaatcatgtctttcagagcagcatgatcagcatgtttataaagctgtttttaccacctcatacccaagcttacagcaggaaaggttctttaaacttgtgttggttaatgaggtgtcccaacaagtggaaagcttaagagtgagccacctgccaaggcggaaagaacaggctggggaacggggtgataagcccaaagacattggtggctcaaaggcccctgtcccatgctttggaccagtcttcacagaggttgagaaggccaagatagagaactctcccacacccttctgtgttggagataaatttttcgtacctctgcagagactccttgcgtatcccaagttgaaccgcttatgtgctaatgaagagatgatgagatcagtcattgctgactcaattcctctgagcagtgatggttctgcagtggtggctgacctgcgtaattattttgatgaacagtttgagttttgaaccatgtttatttcctgaaatttcagggtctcagcgatagttgtgctcacttagaatttagttttttttgtgtaatcctaattcaagtaatgtttttaaagtttcactgcaaaagtctatgttccaagccattggacagacctgcttgagatatggccagactgcagtgagccctgagaaagatatgagggtttaaaacgggtgctttcctttgattttggacttttttgttttctcaagaataaagaagttggatgtggtaatatgttaattttgaaaaaaaaaaa

SEQ ID NO: 59 - protein, 393 aa, Homo sapiens
MEENNLQCSSVVDGNFEEVPRETAIQFKPPLYRQRYQFVKNLVDQHEPKKVADLGCGDTSLLRLLKVNPCIELLVGVDINEDKLRWRGDSLAPFLGDFLKPRDLNLTITLYHGSVVERDSRLLGFDLITCIELIEHLDSGDLARFPEVVFGYLSPSMIVISTPNSEFNPLFPSVTLRDSDHKFEWTRMEFQTWALYVANRYDYSVEFTGVGEPPAGAENVGYCTQIGIFRKNGGKATESCLSEQHDQHVYKAVFTTSYPSLQQERFFKLVLVNEVSQQVESLRVSHLPRRKEQAGERGDKPKDIGGSKAPVPCFGPVFTEVEKAKIENSPTPFCVGDKFFVPLQRLLAYPKLNRLCANEEMMRSVIADSIPLSSDGSAVVADLRNYFDEQFEF

SEQ ID NO: 60 - DNA, 2384 bp, Homo sapiens
agaaggagctttcaattatactgtgatggctttgagcgactcttcagagctgacctgcagtacaactttcagttcctgcaccatctcttccctccagtgtggaactgaatacttgatttcagttttagcaagtaatgatgctggatctagcaaatcatcttcagcaatgaccctgaaaactgttgcttgtgcacccggaagagtgacgatccaagaagatccccctggccacctgtctgtggcttggtccaatgtagatctgggtgactactatgtggtctttgtgaagagtgatgatggcttggaagtacactgcaacacatctctcactcagtgcaacttcttatctgagtgtggcttcacttattttattagtgtttttgcctataacaaggcagggcaaagtcctttgggtgacatattcaattataccacagctccctgttgtcctagtgacattaaccccgtgctggtgtccagtgacagagttgagattgtctggtctcctgtccgtggtgccgaactgtatgaaaccaaggctgtagatgggtacaacatggttgagtgcaatgacactactcctgcgtgcaccctttcggctctagagtgtgacaccaagtacaacatcacagtgtattcattcaatgaagtccgaggcagcaatatgtcatgtactccccagttcataaccacagctccttgcagtcctgaaataaaaaatgtttcaagggatgcattctccatgattaatgtgcactggcgatccactaatgatgatgctacttacacggtgactgcccaaggggagaaaggactgtatcagtgcagcagcacaggagagtcctgcaccatgcggggcttgccctgtggctcagtgttctctgtcactgctgtggccgaaacacaggcaggacggagcctgcccagctacagtgtgcccctggaaacagtgccatgctgtccaaccggtctgacagtaactcaaatcacccagtcagtaatcaacgtgagctggactattgggagagtggctcaaacccatgttgcagttctggagtcacacactggacagtctaagtgtcacactcatcaaaaccactgcctcctagggtgcatcacatgtggcatcaattacacagtgacattaaaagcaattagtgccaccgggttgactgcagattgctcctaccaaagttatttctctggtgcctgctgccctttgggggtgaaattatataggctgggccctaatggcatccggatctactggcaagcctccaggggctctgccaattacagcactgacctctatggctccaaaggcattttcacgtgcaccccgagtgctggcctcagtttctgtgatgtcactgagataccctgtggggatgtatacactgtgatggtctcaccagttgctaaaacaggattgaagcttactttctgtccaaaaaaaatatattcagtaacttgctctggaagtacacttggaatggtgatttatagagggaagagaaatgaagaatgacaaagtgagccccagataaaaacaaaaacttgaccaaagttgtctcatttgttagtgattagagatggaaaagatctactagaatgtagaataaaaatgcctctaggataggaaaagctcctttggcctttagaagaacaactctgactctgcttcctgagggcaaggtcaggtgtgtcctcacctgcacagcagttggagatctgctatgtgaggactctggagagaaatgaatccagaaagtcccctggacggctgctagcctgagttggcacactgtgagaaccctggaaacaagaaagttctgcttagcagaaattctgagatttcacatccacacacaccacagacttcaacacatccacttcatgagtgttttacaacagcacttgtctgcagccccctcaggggctggaaatgttcactcccagaaagtcaagccacccacatgcagacagcacttatcccaagacaaacctccagcaggacttcagtataggttggaaagcagtagctgccagggcaacctgagataacaaacgccctcatcgcaagttaggagcaaagctgagctgcttgcagggttcgctgagccaaagcatcaggtggcgtgacatctatgggagcatctgggaaagcagagctgccagcctgttgctagaagggttgcagttatgctttctgcatgagagaagatgtcaaatggagagcctcaaactgtggccgactgacatgcgtgcatcttttgggggaggaccatccatcttattggccatatcccccactcatattgtaattacttttttcatctttggagggggaaggcaatgaaatataacataaatctctcatacct

SEQ ID NO: 61 - protein, 500 aa, Homo sapiens
MALSDSSELTCSTTFSSCTISSLQCGTEYLISVLASNDAGSSKSSSAMTLKTVACAPGRVTIQEDPPGHLSVAWSNVDLGDYYVVFVKSDDGLEVHCNTSLTQCNFLSECGFTYFISVFAYNKAGQSPLGDIFNYTTAPCCPSDINPVLVSSDRVEIVWSPVRGAELYETKAVDGYNMVECNDTTPACTLSALECDTKYNITVYSFNEVRGSNMSCTPQFITTAPCSPEIKNVSRDAFSMINVHWRSTNDDATYTVTAQGEKGLYQCSSTGESCTMRGLPCGSVFSVTAVAETQAGRSLPSYSVPLETVPCCPTGLTVTQITQSVINVSWTIGRVAQTHVAVLESHTGQSKCHTHQNHCLLGCITCGINYTVTLKAISATGLTADCSYQSYFSGACCPLGVKLYRLGPNGIRIYWQASRGSANYSTDLYGSKGIFTCTPSAGLSFCDVTEIPCGDVYTVMVSPVAKTGLKLTFCPKKIYSVTCSGSTLGMVIYRGKRNEE

SEQ ID NO: 62 - DNA, 1621 bp, Homo sapiens
agctgattcccgggactaggttgcgggagaaagcctgttgcgtggaagataaggcggcgcgggaagtggacacagggtgggctggagatctaactggactctcgctcctgctggctggacatggaggatttggaggaagatgtaaggtttattgtggatgagaccttggactttggggggctgtcaccatctgacagccgtgaggaggaagacataacagtgttggtgactccagagaaaccacttcgacggggcctctcccaccgaagtgacccaaatgcagtggcacctgccccccagggtgtgaggctcagcctaggccccctcagtccagagaagctggaggagatcctcgatgaggccaaccggctggccgctcagctggagcagtgtgccctgcaggatcgggagagcgcaggcgagggcctggggcctcgccgagtgaagcccagtcctcggcgggagacctttgtgctgaaggatagtcctgtccgagacctgctgcccactgtgaactctttgacgcggagcaccccctccccaagcagcctgacgcctcgactccggagtaatgataggaaggggtcagtcagggctctccgggctacatctggaaagaggccctccaacatgaagagggagtcacccacttgcaatctgttccctgcatccaaaagcccagcatcttctcctcttacccgatcgactcccccagtccgggggagagccgggcccagtgggagagcagcagccagtgaggagaccagagcagccaagttgcgggcctgccagccgaatgccactcaccagccggagtgtgccacctggcagaggtgccctacctccggattctctgtcaactcgaaaagggcttccaagaccaagcactgcaggacacagagtgcgggaaagtggacacaaggttcctgtttcccagcgactaaatcttcctgtcatgggtgccactcgcagcaatctgcagccccccaggaaagtggcagtcccaggacctaccaggtaaagagatcaggacagcaagcaagacttcagtagcaaaccactacagtcagtacctggactcgcctctacccagcagaccctgactccagcagattctggcccagggacaggaggaagagatgccaccagggctggtctcccaggagtagagaccatgggaaatggggtggattaggattgagctggagaagacttaaactctctgggttgaaagaagattaggggaaaagaggtcaccttccagcagtgaaatgaacaaatagaagatgagaagtacaggcaagtggtttgtctttatccacccccactgttgtggtcagccccagagaattttatcttcttccttggcattggttcactggacatttccacgtgagcggcctccgtagctaacctccctgccctctgaggagccatcttcctgaatcgcattctctactggactctggcctgcttggagaggtggcagcaggcacctggtcttcagaaattgtttcctgtgaattctgtgactcctaataggccagtttgtgataagcttactctatgagtcttcatttttctaaaataaagtgaatgtatttttatattctctgtaaaa

SEQ ID NO: 63 - protein, 310 aa, Homo sapiens
MEDLEEDVRFIVDETLDFGGLSPSDSREEEDITVLVTPEKPLRRGLSHRSDPNAVAPAPQGVRLSLGPLSPEKLEEILDEANRLAAQLEQCALQDRESAGEGLGPRRVKPSPRRETFVLKDSPVRDLLPTVNSLTRSTPSPSSLTPRLRSNDRKGSVRALRATSGKRPSNMKRESPTCNLFPASKSPASSPLTRSTPPVRGRAGPSGRAAASEETRAAKLRACQPNATHQPECATWQRCPTSGFSVNSKRASKTKHCRTQSAGKWTQGSCFPATKSSCHGCHSQQSAAPQESGSPRTYQVKRSGQQARLQ

SEQ ID NO: 64 - DNA, 1828 bp, Homo sapiens
agctgattcccgggactaggttgcgggagaaagcctgttgcgtggaagataaggcggcgcgggaagtggacacagggtgggctggaggtatctaactggactctcgctcctgctggctggacatggaggatttggaggaagatgtaaggtttattgtggatgagaccttggactttggggggctgtcaccatctgacagccgtgaggaggaagacataacagtgttggtgactccagagaaaccacttcgacggggcctctcccaccgaagtgacccaaatgcagtggcacctgccccccagggtgtgaggctcagcctaggccccctcagtccagagaagctggaggagatcctcgatgaggccaaccggctggccgctcagctggagcagtgtgccctgcaggatcgggagagcgcaggcgagggcctggggcctcgccgagtgaagcccagtcctcggcgggagacctttgtgctgaaggatagtcctgtccgagacctgctgcccactgtgaactctttgacgcggagcaccccctccccaagcagcctgacgcctcgactccggagtaatgataggaaggggtcagtcagggctctccgggctacatctggaaagaggccctccaacatgaagagggagtcacccacttgcaatctgttccctgcatccaaaagcccagcatcttctcctcttacccgatcgactcccccagtccgggggagagccgggcccagtgggagagcagcagccagtgaggagaccagagcagccaagttgcgggtgagtgggagtggggagtttgtgggattgaccctgaaatttctccacccctctccaccaggcccacccacccccatcagatccgtcctggccccacagccttctaccagcaactctcaacgcctgccccggccgcagggagcagctgctaaatcttccagtcaactgcccattccctcggccatccccaggcctgccagccgaatgccactcaccagccggagtgtgccacctggcagaggtgccctacctccggattctctgtcaactcgaaaagggcttccaagaccaagcactgcaggacacagagtgcgggaaagtggacacaaggttcctgtttcccagcgactaaatcttcctgtcatgggtgccactcgcagcaatctgcagccccccaggaaagtggcagtcccaggacctaccaggtaaagagatcaggacagcaagcaagacttcagtagcaaaccactacagtcagtacctggactcgcctctacccagcagaccctgactccagcagattctggcccagggacaggaggaagagatgccaccagggctggtctcccaggagtagagaccatgggaaatggggtggattaggattgagctggagaagacttaaactctctgggttgaaagaagattaggggaaaagaggtcaccttccagcagtgaaatgaacaaatagaagatgagaagtacaggcaagtggtttgtctttatccacccccactgttgtggtcagccccagagaattttatcttcttccttggcattggttcactggacatttccacgtgagcggcctccgtagctaacctccctgccctctgaggagccatcttcctgaatcgcattctctactggactctggcctgcttggagaggtggcagcaggcacctggtcttcagaaattgtttcctgtgaattctgtgactcctaataggccagtttgtgataagcttactctatgagtcttcatttttctaaaataaagtgaatgtatttttatattctctgtaaaaaaaaaaaaaaaaaa

SEQ ID NO: 65 - protein, 363 aa, Homo sapiens
MEDLEEDVRFIVDETLDFGGLSPSDSREEEDITVLVTPEKPLRRGLSHRSDPNAVAPAPQGVRLSLGPLSPEKLEEILDEANRLAAQLEQCALQDRESAGEGLGPRRVKPSPRRETFVLKDSPVRDLLPTVNSLTRSTPSPSSLTPRLRSNDRKGSVRALRATSGKRPSNMKRESPTCNLFPASKSPASSPLTRSTPPVRGRAGPSGRAAASEETRAAKLRVSGSGEFVGLTLKFLHPSPPGPPTPIRSVLAPQPSTSNSQRLPRPQGAAAKSSSQLPIPSAIPRPASRMPLTSRSVPPGRGALPPDSLSTRKGLPRPSTAGHRVRESGHKVPVSQRLNLPVMGATRSNLQPPRKVAVPGPTR

SEQ ID NO: 66 - DNA, 1738 bp, Homo sapiens
agctgattcccgggactaggttgcgggagaaagcctgttgcgtggaagataaggcggcgcgggaagtggacacagggtgggctggaggtatctaactggactctcgctcctgctggctggacatggaggatttggaggaagatgtaaggtttattgtggatgagaccttggactttggggggctgtcaccatctgacagccgtgaggaggaagacataacagtgttggtgactccagagaaaccacttcgacggggcctctcccaccgaagtgacccaaatgcagtggcacctgccccccagggtgtgaggctcagcctaggccccctcagtccagagaagctggaggagatcctcgatgaggccaaccggctggccgctcagctggagcagtgtgccctgcaggatcgggagagcgcaggcgagggcctggggcctcgccgagtgaagcccagtcctcggcgggagacctttgtgctgaaggatagtcctgtccgagacctgctgcccactgtgaactctttgacgcggagcaccccctccccaagcagcctgacgcctcgactccggagtaatgataggaaggggtcagtcagggctctccgggctacatctggaaagaggccctccaacatgaagagggagtcacccacttgcaatctgttccctgcatccaaaagcccagcatcttctcctcttacccgatcgactcccccagtccgggggagagccgggcccagtgggagagcagcagccagcccacccacccccatcagatccgtcctggccccacagccttctaccagcaactctcaacgcctgccccggccgcagggagcagctgctaaatcttccagtcaactgcccattccctcggccatccccaggcctgccagccgaatgccactcaccagccggagtgtgccacctggcagaggtgccctacctccggattctctgtcaactcgaaaagggcttccaagaccaagcactgcaggacacagagtgcgggaaagtggacacaaggttcctgtttcccagcgactaaatcttcctgtcatgggtgccactcgcagcaatctgcagccccccaggaaagtggcagtcccaggacctaccaggtaaagagatcaggacagcaagcaagacttcagtagcaaaccactacagtcagtacctggactcgcctctacccagcagaccctgactccagcagattctggcccagggacaggaggaagagatgccaccagggctggtctcccaggagtagagaccatgggaaatggggtggattaggattgagctggagaagacttaaactctctgggttgaaagaagattaggggaaaagaggtcaccttccagcagtgaaatgaacaaatagaagatgagaagtacaggcaagtggtttgtctttatccacccccactgttgtggtcagccccagagaattttatcttcttccttggcattggttcactggacatttccacgtgagcggcctccgtagctaacctccctgccctctgaggagccatcttcctgaatcgcattctctactggactctggcctgcttggagaggtggcagcaggcacctggtcttcagaaattgtttcctgtgaattctgtgactcctaataggccagtttgtgataagcttactctatgagtcttcatttttctaaaataaagtgaatgtatttttatattctctgtaaaaaaaaaaaaaaaaaa

SEQ ID NO: 67 - protein, 333 aa, Homo sapiens
MEDLEEDVRFIVDETLDFGGLSPSDSREEEDITVLVTPEKPLRRGLSHRSDPNAVAPAPQGVRLSLGPLSPEKLEEILDEANRLAAQLEQCALQDRESAGEGLGPRRVKPSPRRETFVLKDSPVRDLLPTVNSLTRSTPSPSSLTPRLRSNDRKGSVRALRATSGKRPSNMKRESPTCNLFPASKSPASSPLTRSTPPVRGRAGPSGRAAASPPTPIRSVLAPQPSTSNSQRLPRPQGAAAKSSSQLPIPSAIPRPASRMPLTSRSVPPGRGALPPDSLSTRKGLPRPSTAGHRVRESGHKVPVSQRLNLPVMGATRSNLQPPRKVAVPGPTR

SEQ ID NO: 68 - DNA, 1722 bp, Homo sapiens
agctgattcccgggactaggttgcgggagaaagcctgttgcgtggaagataaggcggcgcgggaagtggacacagggtgggctggagatctaactggactctcgctcctgctggctggacatggaggatttggaggaagatgtaaggtttattgtggatgagaccttggactttggggggctgtcaccatctgacagccgtgaggaggaagacataacagtgttggtgactccagagaaaccacttcgacggggcctctcccaccgaagtgacccaaatgcagtggcacctgccccccagggtgtgaggctcagcctaggccccctcagtccagagaagctggaggagatcctcgatgaggccaaccggctggccgctcagctggagcagtgtgccctgcaggatcgggagagcgcaggcgagggcctggggcctcgccgagtgaagcccagtcctcggcgggagacctttgtgctgaaggatagtcctgtccgagacctgctgcccactgtgaactctttgacgcggagcaccccctccccaagcagcctgacgcctcgactccggagtaatgataggaaggggtcagtcagggctctccgggctacatctggaaagaggccctccaacatgaagagggagtcacccacttgcaatctgttccctgcatccaaaagcccagcatcttctcctcttacccgatcgactcccccagtccgggggagagccgggcccagtgggagagcagcagccagcccacccacccccatcagatccgtcctggccccacagccttctaccagcaactctcaacgcctgccccggccgcagggagcagctgctaaatcttccagtcaactgcccattccctcggccatccccaggcctgccagccgaatgccactcaccagccggagtgtgccacctggcagaggtgccctacctccggattctctgtcaactcgaaaagggcttccaagaccaagcactgcaggacacagagtgcgggaaagtggacacaaggttcctgtttcccagcgactaaatcttcctgtcatgggtgccactcgcagcaatctgcagccccccaggaaagtggcagtcccaggacctaccaggtaaagagatcaggacagcaagcaagacttcagtagcaaaccactacagtcagtacctggactcgcctctacccagcagaccctgactccagcagattctggcccagggacaggaggaagagatgccaccagggctggtctcccaggagtagagaccatgggaaatggggtggattaggattgagctggagaagacttaaactctctgggttgaaagaagattaggggaaaagaggtcaccttccagcagtgaaatgaacaaatagaagatgagaagtacaggcaagtggtttgtctttatccacccccactgttgtggtcagccccagagaattttatcttcttccttggcattggttcactggacatttccacgtgagcggcctccgtagctaacctccctgccctctgaggagccatcttcctgaatcgcattctctactggactctggcctgcttggagaggtggcagcaggcacctggtcttcagaaattgtttcctgtgaattctgtgactcctaataggccagtttgtgataagcttactctatgagtcttcatttttctaaaataaagtgaatgtatttttatattctctgtaaaa

SEQ ID NO: 69 - protein, 333 aa, Homo sapiens; identical to SEQ ID NO: 67

SEQ ID NO: 70 - DNA, 1372 bp, Homo sapiens
accagcagtgaaaatctagagctggagctcagcctctgggaaggcccagcatggaggcagccacagctccggaggtggccgcaggatccaagctgaaggtgaaagaagccagcccagcggatgctgaaccaccccaggcttcacctggacagggggctggcagccccactccccagctcctgccccctatagaagagcaccccaagatctggctacctcgggccctgaggcagacctacatccggaaggttggggacacagtgaacctactaatcccattccagggcaagcccaaacctcaagccatctggacacatgatggctgtgccttggacaccaggcgtgtgagtgtgcagaatggggagcaagactccatcctcttcatccgagaagcccaacgtgctgactcaggtcgctaccaactccgcgtgcagctgggtgggctggaggccaccgccaccattgacatcctggtgattgagaggccaggccctcctcagagtattaagctggtggacgtttggggcttcagcgctacactggaatggacaccgccccaagatacggggaatacagcacttctgggatacacggtgcagaaggctgacacaaaatccgggctgtggttcacggtgctggagcactatcaccgcaccagctgcatcgtctctgacctcatcatcggcaactcctatgccttccgtgtctttgctgaaaaccagtgcggactcagtgaaacagcccccatcaccacggacctcgcccacatccagaaagcagctactgtttacaagaccaaggggtttgcccaacgagacttctctgaagccccaaagtttacccagcctctggccaactgcactacagtcaccggctataatacccagctcttctgctgtgtccgcgcctctccccggcccaagatcatctggctgaagaacaagatggatatccaaggcaaccctaagtacagagccctgactcacctgggaatctgctccctagagatccgcaagccgggtccctttgatggaggcatctatacctgcaaggcggtgaaccccctaggggaggcatctgtggactgtcgggtggatgtgaaagttcctaattgaggacacctaagaaggcatcgtactctgacaaagccagtgcccagcaatgaagtgaattcatggcacaggagccagggaccatgacaacggtgccctcagcagcctggtgtcctctggccatttgctgtcatggctacaaagtgctccctcttttcagtgcctccaggaagcccgccagtggtgagactgtgtcctcaaggagcttcggcaccatgtctggtttggattcatctaaataaatatgtggttccccagtg

SEQ ID NO: 71 - protein, 354 aa, Homo sapiens
MEAATAPEVAAGSKLKVKEASPADAEPPQASPGQGAGSPTPQLLPPIEEHPKIWLPRALRQTYIRKVGDTVNLLIPFQGKPKPQAIWTHDGCALDTRRVSVQNGEQDSILFIREAQRADSGRYQLRVQLGGLEATATIDILVIERPGPPQSIKLVDVWGFSATLEWTPPQDTGNTALLGYTVQKADTKSGLWFTVLEHYHRTSCIVSDLIIGNSYAFRVFAENQCGLSETAPITTDLAHIQKAATVYKTKGFAQRDFSEAPKFTQPLANCTTVTGYNTQLFCCVRASPRPKIIWLKNKMDIQGNPKYRALTHLGICSLEIRKPGPFDGGIYTCKAVNPLGEASVDCRVDVKVPN

SEQ ID NO: 72 - DNA, 7018 bp, Homo sapiens
ggcgggcgcgccgggcggcaggtgtcggcgtcggcggcattcggcggcgatggagcggccctggggagctgcggacggcctctcgcgctggccccatggcctcggcctcctcctcctcctgcagctgctgccgccgtcgaccctcagccaggaccggctggacgcgccgccgccgcccgctgcgccgctgccgcgctggtctggccccatcggggtgagctgggggctgcgggcggccgcagccgggggcgcgtttccccgcggcggccgttggcgtcgcagcgcgccgggcgaggacgaggagtgcggccgggtccgggacttcgtcgccaagctggccaacaacacgcaccagcatgtgtttgatgatctcagaggctcagtatccttgtcctgggttggagatagcactggggtcattctagtcttgactaccttccatgtaccactggtaattatgacttttggacagtccaagctatatcgaagtgaggattatgggaagaactttaaggatattacagatctcatcaataacacctttattcggactgaatttggcatggctattggtcctgagaactctggaaaggtggtgttaacagcagaggtgtctggaggaagtcgtggaggaagaatcttcagatcatcagattttgcgaagaattttgtgcaaacagatctcccttttcatcctctcactcagatgatgtatagccctcagaattctgattatcttttagctctcagcactgaaaatggcctgtgggtgtccaagaattttgggggaaaatgggaagaaatccacaaagcagtatgtttggccaaatggggatcagacaacaccatcttctttacaacctatgcaaatggctcctgcaaagctgaccttggggctctggaattatggagaacttcagacttgggaaaaagcttcaaaactattggtgtgaaaatctactcatttggtcttgggggacgtttcctttttgcctctgtgatggctgataaggataccacaagaaggatccacgtttcaacagatcaaggggacacatggagcatggcccagctcccctccgtgggacaggaacagttctattctattctggcagcaaatgatgacatggtattcatgcatgtagatgaacctggagacactgggtttggcacaatctttacctcagatgatcgaggcattgtctattccaagtctttggaccgacatctctacactaccacaggcggagagacggactttaccaacgtgacctccctccgcggcgtctacataacaagcgtgctctccgaagataattctatccagaccatgatcacttttgaccaaggaggaaggtggacgcacctgaggaagcctgaaaacagtgaatgtgatgctacagcaaaaaacaagaatgagtgcagccttcatattcatgcttcctacagcatctcccagaaactgaatgttccaatggccccactctcagagccgaatgccgtaggcattgtcattgctcatggtagcgtgggggatgccatctcagtgatggttccagatgtgtacatctcagatgatgggggttactcctggacaaagatgctggaaggaccccactattacaccatcctggattctggaggcatcattgtggccattgagcacagcagccgtcctatcaatgtgattaagttctccacagacgaaggtcaatgctggcaaacctacacgttcaccagggaccccatctatttcactggcctagcttcagaacctggagctaggtccatgaatatcagcatttggggcttcacagaatctttcctgaccagccagtgggtctcctacaccattgattttaaagatatccttgaaaggaactgtgaagagaaggactataccatatggctggcacactccacagaccctgaagattatgaagatggctgcattttgggctacaaagaacagtttctgcggctacgcaagtcatccgtgtgtcagaatggtcgagactatgttgtgaccaagcagccctccatctgcctctgttccctggaggactttctctgtgattttggctactaccgtccagaaaatgactccaagtgtgtggaacagccagaactgaagggccacgacctggagttttgtctgtacggaagagaagaacacctaacaacaaatgggtaccggaaaattccaggggacaaatgccagggtggggtaaatccagttcgagaagtaaaagacttgaaaaagaaatgcacaagcaactttttgagtccggaaaaacagaattccaagtcaaattctgttccaattatcctggccatcgtgggattgatgctggtcacagtcgtagcaggagtgctcattgtgaagaaatatgtctgtgggggaaggttcctggtgcatcgatactctgtgctgcagcagcatgcagaggccaatggtgtggatggtgtggatgctttggacacagcctcccacactaataaaagtggttatcatgatgactcagatgaggacctcttggaatagctcttcagaggagctggacccagcatggatggtggaaccacagtacctcttacactccctgtggctccaacttcaggaaataaatttcccattgcgagggacccagctctgtttctgctgcttccatcaaagccaaaaggacctacactaaagaaatgcagggtgggggtggggaaccctgagcacttttttacaattggctctgagaaaaagggagacattttaaattctttaacttcttatttctcgtcctgtctctttgcaaagtatgggcttttttgtttttgttttttaagggaaacgaaatggaattcgaagggaccttttcactaaccccacttctgtgtgttctgcatggcgcctgccccagggcatctgccaactccagtatcagctctcacagtgtacttggtaccatccctgggctctgctggcgagacgaaacagctgtagagatgaaaacaggctgcagaggctggcacagcctggccggcttttctccatctggggacagtcctactccaagaacactgcacaccagctcctcacacagatcccacttactctttttttttttttcagagaccacagaccacagtgatttttcttttcccttgtttaattaggcaatacccttgttaattgccctttggcaactaacttaaccatgtgcttcccacacagtacatcaggaaaacttacagggcaatatttttaacttggggcaggaagaagggagcagcagagaattgactagatatagcacctattaaaagagaactcttgcttcttctgagatttttcaagctgtgctttgtgtgtgtgccagtagacttacgcaaggacagggtacaaacttagctggaagtctgcccaggctgaatgatctcttccctagagttgattgtcgggtacacagtgtgaacccccgaagacggaacctcacagtcttccatgttcccttcttaactgtcgtgtggctcgttgctaaatcatgacaatggctgcctatctgctgcttcttaggttgctgttgtacatggaaccaggactagagattttttcagatttatagacttaaaaaattagaattttattaccaggctttccttctcaccccttttttctgactttgccaagtaatttgttgacacgaaaattttggaggaaccaattgaaaacacacttccagtctagatgatgctttgtgtgatacattaagttcttattttggattaaaagaagttttccatttgatacttctctaaattaaataaattatagaatgtagttgggtggattttggggtggccatatagtaatggaaagctgcaataattagttttaatacagcttgaatatttgctatatagaaatatagtatggaaagtttttggtcttaatgtagctactgtgcgggtcacagtttctcccaatgattatgactgggacattctttggtagataccatttgctactagtttattttgtggctagaaagtcagttttgtgtgtttttttttttttttatttgaagtgccaaattaactttagtcagaatgtgagcagatggctaagttctctcctccccagaatggattaacagctgcgtggaaagtgggggagagagtggatggagacttttagagatgttaaaactgcagtagaatgaaatgagtcagggagcttcagttagaaaataaagttgaggcagtttttgtgaagataatatggttagggctggagtgcactagtctttttgcttattcattttgcatggttttaaaattaaaaataattccgaagatacaccagctcacaaatgaaaacgtcagcctctgccccaccctccctcctgcccaaagtgaatttggtactcagaaaagaactgtttataccactcacctttctcccagcatgtactcactgtgggcagatgcaccaatacatggtaatcctcttactcattttaagacgtaggaaactcaatattcttctctaaccatatacgatagggctcttcgcttttaatgatatctgggatttctgtggaacttggcaaattttcagagcaccttcactcacataatgtcatttgaacctcacaatgttcttgggatggagtcagttgttcagggtccccgtgtgtgtgataagcagtgctggctggctgtcttcagaactcttggaaatctttacacatgcgagtgctaaccactttgagcaaggctgccttcttgtagatgacttgctgttctttatgacagggatcagtggcatttgtttcctagcagtatttagcacctttttgccaccttggtgaacagaaaattgtattttcctgtctttcatggctgaaaacaaaagtaatgggaattttaaatacgtttgcagaaactgcccctcccctcattgagggtcactgctcaagagtgcaggagtggactctccactgatgggtctccctccccatcctggtttccaccccgggctggctagctctgttggtttgaagactgacagccagcctggctcattctcattattggctagttagctttctttatcaacctgctcactcacaaatgtgtgccctcagccagagagtaagaaagcccaaatctgttacagcttctaaaaaaatagatttctaatttgtcctactcatgttaggagcattatctttgaaggtaaaacatagtgtatcattgtgtaaactcccaggcttgatgtagcagaagagatcatttctggaggcttcagcaatggaatttagcattataagagagattggacaaaccagtccaaagtggtccgagttcttaaatccaggtagggaactcactcttctttcttctctggacctaattgggcattgggctttagtgagaccacagaccaggcccgtctctcctgtaggcttttaattcaatggcaactctatttcaaagaataaaagcctttggagagttgcggcagttctgggggcgggctcaggagagtccatagatcagccgtaactggaacgtagaatctacgtctgcctctgaatggacttcccacctcctctctcttgctctgatgcttgcctctgggcctctccatgcccaaggtggtctttcatccttgacaggctggtaatgtgctggccacctccagctcctgcatcgagtctgtaaaccagagctggttctcatggccttcgtcacgataccaggatacggaggggagcccagggccatccatacccaccccagggtaacggggctggcctggcattagtcattatttagtttccaggccaaccatccagatagagattccctctttcctttgagcagtgctctcaagagctccgtgcctgtccacaatgacctagagtgcatcctgctcattgtcagtgtagcccctcgcccctatattcatccaggatacttggaagtgctaaaataggaagggattcggctttcaactttgctaccatcttccctgaagcaggaaaatgaacatggacttaaatgttctttgaaaaaaccaaagttttaagatttgctgtgtgatgaagtgacagggagggccggagtcagcaggtgccagactttctgttctgtctgccatgggtttgtccagctcaggtagctctaggagcaccatcctgccctagcagagcccaggccttgccctcatgaagcatcattgaaatagcaggagcatgttgatttcttggttaggttgcattataataacaagagtcagaacattaattcgaaacaacttgcagtatgcatttcttcacaccagtacattcttaagtgtacttgtttataaggaataacataaactaatctgtacctttatatatatgtgtgtgtacatatatacatatataaactgtatagtgtacatggtaatgatttattgctatgccccagatccttaatgtagttctcatcctccgcatgccctcagccacaagcgggtgactgactgttccctgatgatttggcccacctcctgtgtttggacctctagggaggagggttttggtcatactctccttatcctcgtgcacagaaatgctcagggtccccatgtgcctgttgttcagccctctctcttgttccctttctgagcatgtggtccttccccaggctgtgggacagctgccttcccacgaaagtgtaaagcagtattaagatcattactgcatgtgccctaaaaacccaagttttctattcccttaggacagaaaattgcatgtgaggtgggataatcgagtttcagtgacccacgtcagttacacattaaagccagaccccatgataaaattccacaaaatggaaataaaactcaaatttctttagcattgtgtaaataaatctgaatgtgtttaactttgtactggtaattttctgtatatttggaatatttgggttaaaaataaaacagactggactttgttacctgacctac

SEQ ID NO: 73 - protein, 831 aa, Homo sapiens
MERPWGAADGLSRWPHGLGLLLLLQLLPPSTLSQDRLDAPPPPAAPLPRWSGPIGVSWGLRAAAAGGAFPRGGRWRRSAPGEDEECGRVRDFVAKLANNTHQHVFDDLRGSVSLSWVGDSTGVILVLTTFHVPLVIMTFGQSKLYRSEDYGKNFKDITDLINNTFIRTEFGMAIGPENSGKVVLTAEVSGGSRGGRIFRSSDFAKNFVQTDLPFHPLTQMMYSPQNSDYLLALSTENGLWVSKNFGGKWEEIHKAVCLAKWGSDNTIFFTTYANGSCKADLGALELWRTSDLGKSFKTIGVKIYSFGLGGRFLFASVMADKDTTRRIHVSTDQGDTWSMAQLPSVGQEQFYSILAANDDMVFMHVDEPGDTGFGTIFTSDDRGIVYSKSLDRHLYTTTGGETDFTNVTSLRGVYITSVLSEDNSIQTMITFDQGGRWTHLRKPENSECDATAKNKNECSLHIHASYSISQKLNVPMAPLSEPNAVGIVIAHGSVGDAISVMVPDVYISDDGGYSWTKMLEGPHYYTILDSGGIIVAIEHSSRPINVIKFSTDEGQCWQTYTFTRDPIYFTGLASEPGARSMNISIWGFTESFLTSQWVSYTIDFKDILERNCEEKDYTIWLAHSTDPEDYEDGCILGYKEQFLRLRKSSVCQNGRDYVVTKQPSICLCSLEDFLCDFGYYRPENDSKCVEQPELKGHDLEFCLYGREEHLTTNGYRKIPGDKCQGGVNPVREVKDLKKKCTSNFLSPEKQNSKSNSVPIILAIVGLMLVTVVAGVLIVKKYVCGGRFLVHRYSVLQQHAEANGVDGVDALDTASHTNKSGYHDDSDEDLLE

SEQ ID NO: 74 - DNA, 1023 bp, Homo sapiens
gttggctgccggtgagttgggtgccggtggagtcgtgttggtcctcagaatccccgcgtagccgctgcctcctcctaccctcgccatgtttcttacccggtctgagtacgacaggggcgtgaatactttttctcccgaaggaagattatttcaagtggaatatgccattgaggctatcaagcttggttctacagccattgggatccagacatcagagggtgtgtgcctagctgtggagaagagaattacttccccactgatggagcccagcagcattgagaaaattgtagagattgatgctcacataggttgtgccatgagtgggctaattgctgatgctaagactttaattgataaagccagagtggagacacagaaccactggttcacctacaatgagacaatgacagtggagagtgtgacccaagctgtgtccaatctggctttgcagtttggagaagaagatgcagatccaggtgccatgtctcgtccctttggagtagcattattatttggaggagttgatgagaaaggaccccagctgtttcatatggacccatctgggacctttgtacagtgtgatgctcgagcaattggctctgcttcagagggtgcccagagctccttgcaagaagtttaccacaagtctatgactttgaaagaagccatcaagtcttcactcatcatcctcaaacaagtaatggaggagaagctgaatgcaacaaacattgagctagccacagtgcagcctggccagaatttccacatgttcacaaaggaagaacttgaagaggttatcaaggacatttaaggaatcctgatcctcagaacttctctgggacaatttcagttctaataatgtccttaaattttatttccagctcctgttccttggaaaatctccattgtatgtgcattttttaaatgatgtctgtacataaaggcagttctgaaataaagaaaattttaaaataaaaaaaaaaaaaaaaaaaaaaaaaaaaaaaaaaaaaaaaaaaaaaaaaa

SEQ ID NO: 75 - protein, 241 aa, Homo sapiens
MFLTRSEYDRGVNTFSPEGRLFQVEYAIEAIKLGSTAIGIQTSEGVCLAVEKRITSPLMEPSSIEKIVEIDAHIGCAMSGLIADAKTLIDKARVETQNHWFTYNETMTVESVTQAVSNLALQFGEEDADPGAMSRPFGVALLFGGVDEKGPQLFHMDPSGTFVQCDARAIGSASEGAQSSLQEVYHKSMTLKEAIKSSLIILKQVMEEKLNATNIELATVQPGQNFHMFTKEELEEVIKDI

SEQ ID NO: 76 - DNA, 2318 bp, Homo sapiens
gcgtccgcggcggtgatggcggtgcgtgaacgcgcggcggcagcaatggccgctctggagcggcgggtgccgagtctcgatgacttcgcgggacagagctggagctcgtgggtggagcgggccgacctgcccgcggctgacggggctgagctggaggagagtagcaaaaacacgaagaagttggatgccatgaccctcattaaagaagacatgtccatcttcgggcactgccctgcccatgatgacttctacttggttgtgtgtaaccactgcagccaagtggtgaagcctcaagctttccagaagcactgcgaaagaagacatgggcccctcagcaagctttatggccgggccccacccccacctccagcccctgccagctctcagaaatgccatgtagtgaatgggcagggcccagcttgtagggccccaggttccacgaaaacctcctccagggagaagggccaggggtcccggagccgtggccaccagcctcctgagaagacccagaaggacaacctctgccagccagggggcctcaccaaggactcccctggaaaacctcccatggctcccccttctaaagaacctcctggcagagagaacatcgagatcatccccagtgaggggtccagtcactgggctgaaggcagccctcctgaaaaggagcccagtgggaccaggctgccccctaaaacccaccggaagatggctcggaaggagtgcgacctcaacaggcagtgtggggtaataaatccagagaccaaaaagatctgtacccgcctgttgacctgcaagatccactcagtacaccagcgccgggaagtccagggccgggccaaggactttgacgtgctggtggcagagctgaaggccaactcccgcaaaggggagtctcccaaggagaagagcccagggcgcaaggagcaagttctcgagcgcccctcccaggagctcccctcctcagtccaggttgtagcagcggtggctgctcccagcagcaccttctctgttcgtgccaagcagacctacccatactgtgcactgcccaggtcccgggcctcctccgagagtgaattggatgatgaaggcccctgtggtggtgatggggacccaggcctgttccccttccccatgccccggggtgggacccaggcctccagcgaagagagtgaggaggaggggacatctgacgacctccacccaccccctgactgccattatgcaacccggcccccacggccacaggcgttctgcacctttgggagccggctggtgagcccaggatgctatgtgtttagccgccggctggaccggttctgctcagcactcagctccatgctggaacggcacctcagcacacacatgtggaagaagatcccaccggcagctgaacctccagctcaccttgtcaactccccgttatctgctcccctgagcccatcctctacaggcacctgcccccgccttccaggtccaaccctgagacctgcctgcccagcctccatgccccccaccaaggacaaccttgtccccagctaccctgcaggctcccccagcgtggcggctgcctgtagccaggcagagtgcatgggcgggagccaggctatcacctcaccactgcctgccaacacgccatccccgtccttcagcaagctgccgccttccaaggccagcaagtcatccaaaggcaaggacggggtggaggtggaggccccttctcgaaagcggaagttatcccctggccctaccactcttaaacggacctgcatcctggagcccactggaaaagggaaaccctctggctgtaggggcctctcggccaaaactaaaacagccctgagcatggggcttaatgggacaatggggccaagagtgaagcgggcagggcccctggactgtcgtggctcccctcatcagctccccacaccagtcaaggcttctcagctggagaaccggggagcagctggacacccagccaaggccctgccaaccaactgcctctctgaggaggaggtggccaagaagcggaaaaacctggccacttattgccggccagtgaaggccaagcactgtcaggctggtgcccctgctgatgtggcctgctctgtgcgccgcaagaagccaggcccggccctggcctttgaggagaagtgctctacactgaagtcaaaagcccattaacgagaaagtgcctgcccactgcaacggagccgccagcacctcctcccctccagatccgggccccaggctgctgccgctttttataactttatattatttttttttaagaaaaaaagctctttaaaatacctcaa

SEQ ID NO: 77 - protein, 722 aa, Homo sapiens
MAVRERAAAAMAALERRVPSLDDFAGQSWSSWVERADLPAADGAELEESSKNTKKLDAMTLIKEDMSIFGHCPAHDDFYLVVCNHCSQVVKPQAFQKHCERRHGPLSKLYGRAPPPPPAPASSQKCHVVNGQGPACRAPGSTKTSSREKGQGSRSRGHQPPEKTQKDNLCQPGGLTKDSPGKPPMAPPSKEPPGRENIEIIPSEGSSHWAEGSPPEKEPSGTRLPPKTHRKMARKECDLNRQCGVINPETKKICTRLLTCKIHSVHQRREVQGRAKDFDVLVAELKANSRKGESPKEKSPGRKEQVLERPSQELPSSVQVVAAVAAPSSTFSVRAKQTYPYCALPRSRASSESELDDEGPCGGDGDPGLFPFPMPRGGTQASSEESEEEGTSDDLHPPPDCHYATRPPRPQAFCTFGSRLVSPGCYVFSRRLDRFCSALSSMLERHLSTHMWKKIPPAAEPPAHLVNSPLSAPLSPSSTGTCPRLPGPTLRPACPASMPPTKDNLVPSYPAGSPSVAAACSQAECMGGSQAITSPLPANTPSPSFSKLPPSKASKSSKGKDGVEVEAPSRKRKLSPGPTTLKRTCILEPTGKGKPSGCRGLSAKTKTALSMGLNGTMGPRVKRAGPLDCRGSPHQLPTPVKASQLENRGAAGHPAKALPTNCLSEEEVAKKRKNLATYCRPVKAKHCQAGAPADVACSVRRKKPGPALAFEEKCSTLKSKAH

SEQ ID NO: 78 - DNA, 3321 bp, Homo sapiens
gttcgggcagctggagtgtacgggcccgcgggccacggccatgcagcccctggaggtaggtctggttcccgctccagctggggagccgagactgacccgctggctgcggagaggcagtgggatcttggcgcacctggtagctttgggcttcaccatctttctgacagcgctgtcccggccaggaaccagtcttttctcctggcaccctgtattcatggccttggcgttctgcctctgcatggctgaagccatcctactcttctcacctgaacactccctgttcttcttctgctcccgaaaagcacggatccggctccactgggcagggcagaccctagccatcctctgtgcagctctgggcctgggcttcatcatctccagcaggacccgcagtgagctgcctcatctggtgtcctggcacagctgggtgggagccctgacactgctggccactgctgtccaggcactgtgtgggctctgcctcctttgtccccgggcagccagggtctcaagggtggctcgcctcaagctctaccatctgacatgtggactggtggtctacctgatggctacagtaacggtgcttctgggcatgtactcagtatggttccaggcccagatcaaaggtgcggcctggtacctgtgcctggcactgcccgtctatccagccctggtgatcatgcaccagatttccagatcctacttgccgaggaagaaaatggaaatgtgagttcctgcgaacgctgaatctaggtgggacgcttgccttgaacatcatggttcctttggtgatctataagggatctatttaagaagtggtcaggttttcgcacttcttggctggtccagggactgcagaaaccaaagctgctattgttgaggaataattcagtgggtcaaaatggggagatgtactgggtatgagtggaaggtgatggagagcctgatcctgaagcctctacttgatgagagacagagttttgggtggtggtagtgatgtgctggtggtcatttcttgcttgtgtgcctgatgaaaaactgggttcctgtaagttatgaatggcatccagggatatttgggttacttttaagaaagcagtgtgatgtagtggagagagcccatgggtcttatttatgggatatggtcctcttaggctctgttgtacaaccttaggtacattccatatcttaagaccactgtttcttcatctgtgaaatgtttctaaacaatctctaagtcccttccttctctaatatacagcgtctgtcaggtcgatgtctcagaacactctcccagctgtggaccacgtggaccacttagcagactcagggggtagttctttactctccctttactaccctggagggacagctctgcccttgaggcccttcagaaatttgtgctgatttggtccctgtgccagggcacagggggtcaggcactgtggaaagaagggactcaggtgagggtcttctggactctaagacggtaaaggcactaaagtcactttaaagcttttggagaagcaggagggcattggcttaaccaagccgaaggctgctggctgggctgcctagcccagctaagatcttccttcagcccacctcaggatccgggcttgagggctgcagggcctgcgtgcgctccctcccccgaaatcacttctcagggcaaaggagccccaggcatctcatgctttgcccttcttagggctcaggttcttgccttagcacatagcttctgggagcttttttgaagcatttcataagggccaaggaagtggggcagggcttttctgatccaaagaaaacaaagtttctctggttacccctcttcccttgttatctaagctttcctcagttgtcatctcttcccagctctttggtccaagagggggctgagtttggtgtcagctggcaaatgagggctggactctcttccctccagagaccaccccgctccttgctgcagctgaaagtagttccccaggctgccctcggtggtgaggactggatgctagactgctgagctgtggtctgggctcagttgagaagataggatctccctagatcatggcaaggcctgacaacagctgagccaggaaagtgctgctgaggcaagtcgacatagctcacagggaactctgggaagcctggggtgtaggcgctggagctccagttcccaggagcaggggcaggtgttcctagatgttagtgttgtggatgtccttggtcttctgaagattcaggtcctcctctccgggtagcttagaagtaaggaggttggtttgattcaatagtacaagaatggggacagcaagggcagaagtgtcctctccacgtaactcattatgcccctcctgggggagattgcatctccaggacaagcatctaaaggaggcccctgctgtgcagaggggtattgttcctgtctctttcattgtcctccctcctctcaaactctccagtgtggtgtgaactcagaagaaacggttactggggctgcatggagaatttcacctgcggtgattttgatccagggactgcatctcctctttcctcatcacagccagtgctgagaggctccttctacctgccgcagggtaggagggccaggcaaagttcaccagcttgctctaagagcaagcaggcaatgccgtaaagcctgagcctgcctgaggtgctgcctcctcccaggtggtgcggggggtggtgggcgggcgggcaggcgtgctgacagccggcagtttgcgtgggctgtgccatctgatgtctattcccagccctggtaggaagggggagtcatttatattctgcaggaggaaggggccccagctgtcgcctttctgaccagcaggcctggagggcaggggcacagagcagagaggagggcactggtggtctcctgcttagcctggtctgactgcagtgtagggaataggtcaccaggaggagcccttcatcctggcaggccggattgtggagggacttccctccccctcttttccatttctccctccatcaccacctgccctcacatcctggggcagcagctggacagccattagacctcagtgccagggcactcttcctccagctgggatctcagtggctcccagctgcatgggctcctgcttgtgtgttccctcctccgccatcctctgttccccgcacctcccttattctgctcatgtctggggtattcacttggctcctcagcaaggaagcaaacgccttggaggagaagcacatggttgcccttttgtccttgctccctggctagggaaagctgctagtggtcagcctgttttgccttttttt

SEQ ID NO: 79 - protein, 229 aa, Homo sapiens
MQPLEVGLVPAPAGEPRLTRWLRRGSGILAHLVALGFTIFLTALSRPGTSLFSWHPVFMALAFCLCMAEAILLFSPEHSLFFFCSRKARIRLHWAGQTLAILCAALGLGFIISSRTRSELPHLVSWHSWVGALTLLATAVQALCGLCLLCPRAARVSRVARLKLYHLTCGLVVYLMATVTVLLGMYSVWFQAQIKGAAWYLCLALPVYPALVIMHQISRSYLPRKKMEM

SEQ ID NO: 80 - DNA, 2501 bp, Homo sapiens
acgccgctccctccgctgggatcgctgcgcctccggctccccgcaccgatccgcgccaggcctgcggacctggaggcagcgaccgcggtcggtgggctccggcgggctcagcggtcgaggcggtggcagggtgagcggagcggggccccgcaagtccccgggaggcgacggtgccgggcgcgggcccctgcgtaaggtgggcgcagtgacaggccggccggtgaggcgccgccgggagaggccgcgacggagctcccagaccggccatgggctgagacacgtcctcgccgagcagtgacccttccgtaccccaccagaacatgcccgggtgacctcctcccagatcttccttgtggccttcctcgcccactccagtgacactatgcacccccaccgtgacccgagaggcctctggctcctgctgccgtccttgtccctgctgctttttgaggtggccagagctggccgagccgtggttagctgtcctgccgcctgcttgtgcgccagcaacatcctcagctgctccaagcagcagctgcccaatgtgccccattccttgcccagttacacagcactactggacctcagtcacaacaacctgagccgcctgcgggccgagtggacccccacgcgcctgacccaactgcactccctgctgctgagccacaaccacctgaacttcatctcctctgaggccttttccccggtacccaacctgcgctacctggacctctcctccaaccagctgcgtacactggatgagttcctgttcagtgacctgcaagtactggaggtgctgctgctctacaataaccacatcatggcggtggaccggtgcgccttcgatgacatggcccagctgcagaaactctacttgagccagaaccagatctctcgcttccctctggaactggtcaaggaaggagccaagctacccaaactaacgctcctggatctctcttctaacaagctgaagaacttgccattgcctgacctgcagaagctgccggcctggatcaagaatgggctgtacctacataacaaccccctgaactgcgactgtgagctctaccagctgttttcacactggcagtatcggcagctgagctccgtgatggactttcaagaggatctgtactgcatgaactccaagaagctgcacaatgtcttcaacctgagtttcctcaactgtggcgagtacaaggagcgtgcctgggaggcccacctgggtgacaccttgatcatcaagtgtgacaccaagcagcaagggatgaccaaggtgtgggtgacaccaagtaatgaacgggtgctagatgaggtgaccaatggcacagtgagtgtgtctaaggatggcagtcttcttttccagcaggtgcaggtcgaggacggtggtgtgtatacctgctatgccatgggagagactttcaatgagacactgtctgtggaattgaaagtgcacaatttcaccttgcacggacaccatgacaccctcaacacagcctataccaccctagtgggctgtatccttagtgtggtcctggtcctcatatacctatacctcaccccttgccgctgctggtgccggggtgtagagaagccttccagccatcaaggagacagcctcagctcttccatgcttagtaccacacccaaccatgatcctatggctggtggggacaaagatgatggttttgaccggcgggtggctttcctggaacctgctggacctgggcagggtcaaaacggcaagctcaagccaggcaacaccctgccagtgcctgaggccacaggcaagggccaacggaggatgtcggatccagaatcagtcagctcggtcttctctgatacgcccattgtggtgtgagcaggatgggttggtggggagattctgccccaggagaggtaatgcacccctgaaggatatgaggggatggaagagagggctggctgcccaagggaatggattcctcctgacctcaagggaattggtcccaggtacaacagagagcaagaccccaaacagggcgtggctgccacgattttcaaatgggggtatattaatcctcaggcaaatgctacacccgtacccaaagccctgccaattctcagtgtggtagaggaagagaagcatgtctgagttggatgggaatgaggaaggagtgaggggaagaacagattccctaaactttcatgaggtcatccctagctccttaagagaaaaacatttagaaaaaaaaattttttctatctctgcccacccacacctgtgatgttgtgtgtgttgggggagcttccacaggagccacactggggaaaagctgtagtatcttctttgtttagcaagtcaaacttcacagctggggaagttgaaaacctttggaaaatgagtcaggaaaaggctgagacctcaatcggtaacaattccccaaagctgttgtaagactttgcattaaagccttcctttttcctgaaaaaaaaaaaaaaaaaaaaaaaaaaaaaaa

SEQ ID NO: 81 - protein, 493 aa, Homo sapiens
MHPHRDPRGLWLLLPSLSLLLFEVARAGRAVVSCPAACLCASNILSCSKQQLPNVPHSLPSYTALLDLSHNNLSRLRAEWTPTRLTQLHSLLLSHNHLNFISSEAFSPVPNLRYLDLSSNQLRTLDEFLFSDLQVLEVLLLYNNHIMAVDRCAFDDMAQLQKLYLSQNQISRFPLELVKEGAKLPKLTLLDLSSNKLKNLPLPDLQKLPAWIKNGLYLHNNPLNCDCELYQLFSHWQYRQLSSVMDFQEDLYCMNSKKLHNVFNLSFLNCGEYKERAWEAHLGDTLIIKCDTKQQGMTKVWVTPSNERVLDEVTNGTVSVSKDGSLLFQQVQVEDGGVYTCYAMGETFNETLSVELKVHNFTLHGHHDTLNTAYTTLVGCILSVVLVLIYLYLTPCRCWCRGVEKPSSHQGDSLSSSMLSTTPNHDPMAGGDKDDGFDRRVAFLEPAGPGQGQNGKLKPGNTLPVPEATGKGQRRMSDPESVSSVFSDTPIVV

SEQ ID NO: 82 - DNA, 2693 bp, Homo sapiens
ggagagaaatggctgaaagtggaaacccggagcggtttggggcgcttcgcaaagttctccagctcggcgagccggcggtgtgtctaccagaggctgggggccagtccatctggtcctgcccgacgccacttccaccccgcgagctctgggaaaggtctctacgtgacgccaagggccgtcgcggccccggggagagggatcgaaagactcactctgcgaggtgtttacactggaggtgggggacgggaagggactgggcaaagttacctggactcaactaaattcctgcgcttgcttagtgttgacatttgaataggatccgagatgttctgcttttatcccgggcagccctgatatgtcagcaacaggctgaggttccagacctgaaatcgcactgcaagaaaaaggggtttgctgaactaactccaagctggtgtgcctagcgtccgcgcggctgccggcccaagagctggagtcaccatggcggccggagttgcggcctggctgccttttgcccgggctgcggccatcgggtggatgccggtggccaactgccccatgcccctggccccggccgacaagaacaagcggcaggatgagctgattgtcctcaacgtgagtgggcggaggttccagacctggaggaccacgctggagcgctacccggacaccctgctgggcagcacggagaaggagttcttcttcaacgaggacaccaaggagtacttcttcgaccgggaccccgaggtgttccgctgcgtgctcaacttctaccgcacggggaagctgcactacccgcgctacgagtgcatctctgcctacgacgacgagctggccttctacggcatcctcccggagatcatcggggactgctgctacgaggagtacaaggaccgcaagagggagaacgccgagcggctcatggacgacaacgactcggagaacaaccaggagtccatgccctcgctcagcttccgccagaccatgtggcgggccttcgagaacccccacaccagcacgctggccctggtcttctactacgtgactggcttcttcatcgctgtctcggtcatcaccaacgtggtggagacggtgccgtgcggcacggtcccgggcagcaaggagctgccgtgcggggagcgctactcggtggccttcttctgcctggacacggcgtgcgtcatgatcttcaccgtggagtacctcctgcggctcttcgcggctcccagccgctaccgcttcatccgcagcgtcatgagcatcatcgacgtggtggccatcatgccctactacatcggtctggtcatgaccaacaacgaggacgtgtccggcgccttcgtcacgctccgggtcttccgcgtcttcaggatcttcaagttttcccgccactcccagggcctgcggatcctgggctacacactgaagagctgtgcctccgaactgggctttcttctcttctccctcaccatggccatcatcatctttgccactgtgatgttttatgccgagaagggctcctcggccagcaagttcacaagcatccctgcctcgttttggtacaccattgtcaccatgaccacactggggtacggagacatggtgcctaagacgattgcagggaagatcttcggctccatctgctccttgagtggcgtcctggtcattgccctgccagtccctgtgattgtttccaactttagccggatttaccaccagaatcagagagctgataaacgcagggcacaaaagaaggcccgccttgccaggatccgtgtggccaaaacaggcagttcgaatgcatacctgcacagcaagcgcaacgggctcctcaacgaggcgctggagctgacgggcaccccagaagaggagcacatgggcaagaccacctcactcatcgagagccagcatcatcacctgctgcactgcctggaaaaaaccactgggttgtcctatcttgtggatgatcccctgttatctgtacgaacctccaccatcaagaaccacgagtttattgatgagcagatgtttgagcagaactgcatggagagttcaatgcagaactacccatccacaagaagtccctcactgtccagccacccaggcctcactaccacctgctgctcccgtcgtagtaagaagaccacacacctgcccaattctaacctgccagctactcgcctgcgcagcatgcaagagctcagcacgatccacatccagggcagtgagcagccctccctcacaaccagtcgctccagccttaatttgaaagcagacgacggactgagaccaaactgcaaaacatcccagatcaccacagccatcatcagcatccccactcccccagcgctaaccccagagggggaaagtcggccaccccctgccagcccaggccccaacacgaacattccttccatagccagcaatgttgtcaaggtctccgccttgtaaaaccactggacagagggccagagtgggtagtggggaatgaaggggactggcatgttggtgggtggtcactgagaccactccctcccccctttccccactatttctgcctgccccattgtacccctagcactgagacttgtgcctggaaggaaaaagaggtagcaaaggggcacctgaggttcacgctgctagcgtggacatagccctgtgatactgcatctcactggggccagaggaagggaggg

SEQ ID NO: 83 - protein, 655 aa, Homo sapiens
MAAGVAAWLPFARAAAIGWMPVANCPMPLAPADKNKRQDELIVLNVSGRRFQTWRTTLERYPDTLLGSTEKEFFFNEDTKEYFFDRDPEVFRCVLNFYRTGKLHYPRYECISAYDDELAFYGILPEIIGDCCYEEYKDRKRENAERLMDDNDSENNQESMPSLSFRQTMWRAFENPHTSTLALVFYYVTGFFIAVSVITNVVETVPCGTVPGSKELPCGERYSVAFFCLDTACVMIFTVEYLLRLFAAPSRYRFIRSVMSIIDVVAIMPYYIGLVMTNNEDVSGAFVTLRVFRVFRIFKFSRHSQGLRILGYTLKSCASELGFLLFSLTMAIIIFATVMFYAEKGSSASKFTSIPASFWYTIVTMTTLGYGDMVPKTIAGKIFGSICSLSGVLVIALPVPVIVSNFSRIYHQNQRADKRRAQKKARLARIRVAKTGSSNAYLHSKRNGLLNEALELTGTPEEEHMGKTTSLIESQHHHLLHCLEKTTGLSYLVDDPLLSVRTSTIKNHEFIDEQMFEQNCMESSMQNYPSTRSPSLSSHPGLTTTCCSRRSKKTTHLPNSNLPATRLRSMQELSTIHIQGSEQPSLTTSRSSLNLKADDGLRPNCKTSQITTAIISIPTPPALTPEGESRPPPASPGPNTNIPSIASNVVKVSAL

SEQ ID NO: 84 - DNA, 2636 bp, Homo sapiens
ggagagaaatggctgaaagtggaaacccggagcggtttggggcgcttcgcaaagttctccagctcggcgagccggcggtgtgtctaccagaggctgggggccagtccatctggtcctgcccgacgccacttccaccccgcgagctctgggaaaggtctctacgtgacgccaagggccgtcgcggccccggggagagggatcgaaagactcactctgcgaggtgtttacactggaggtgggggacgggaagggactgggcaaagttacctggactcaactaaattcctgcgcttgcttagtgttgacatttgaataggatccgagatgttctgcttttatcccgggcagccctgatatgtcagcaacaggctgaggttccagacctgaaatcgcactgcaagaaaaaggggtttgctgaactaactccaagctggtgtgcctagcgtccgcgcggctgccggcccaagagctggagtcaccatggcggccggagttgcggcctggctgccttttgcccgggctgcggccatcgggtggatgccggtggccaactgccccatgcccctggccccggccgacaagaacaagcggcaggatgagctgattgtcctcaacgtgagtgggcggaggttccagacctggaggaccacgctggagcgctacccggacaccctgctgggcagcacggagaaggagttcttcttcaacgaggacaccaaggagtacttcttcgaccgggaccccgaggtgttccgctgcgtgctcaacttctaccgcacggggaagctgcactacccgcgctacgagtgcatctctgcctacgacgacgagctggccttctacggcatcctcccggagatcatcggggactgctgctacgaggagtacaaggaccgcaagagggagaacgccgagcggctcatggacgacaacgactcggagaacaaccaggagtccatgccctcgctcagcttccgccagaccatgtggcgggccttcgagaacccccacaccagcacgctggccctggtcttctactacgtgactggcttcttcatcgctgtctcggtcatcaccaacgtggtggagacggtgccgtgcggcacggtcccgggcagcaaggagctgccgtgcggggagcgctactcggtggccttcttctgcctggacacggcgtgcgtcatgatcttcaccgtggagtacctcctgcggctcttcgcggctcccagccgctaccgcttcatccgcagcgtcatgagcatcatcgacgtggtggccatcatgccctactacatcggtctggtcatgaccaacaacgaggacgtgtccggcgccttcgtcacgctccgggtcttccgcgtcttcaggatcttcaagttttcccgccactcccagggcctgcggatcctgggctacacactgaagagctgtgcctccgaactgggctttcttctcttctccctcaccatggccatcatcatctttgccactgtgatgttttatgccgagaagggctcctcggccagcaagttcacaagcatccctgcctcgttttggtacaccattgtcaccatgaccacactggggtacggagacatggtgcctaagacgattgcagggaagatcttcggctccatctgctccttgagtggcgtcctggtcattgccctgccagtccctgtgattgtttccaactttagccggatttaccaccagaatcagagagctgataaacgcagggcacaaaagaaggcccgccttgccaggatccgtgtggccaaaacaggcagttcgaatgcatacctgcacagcaagcgcaacgggctcctcaacgaggcgctggagctgacgggcaccccagaagaggagcacatgggcaagaccacctcactcatcgagagccagcatcatcacctgctgcactgcctggaaaaaaccactaaccacgagtttattgatgagcagatgtttgagcagaactgcatggagagttcaatgcagaactacccatccacaagaagtccctcactgtccagccacccaggcctcactaccacctgctgctcccgtcgtagtaagaagaccacacacctgcccaattctaacctgccagctactcgcctgcgcagcatgcaagagctcagcacgatccacatccagggcagtgagcagccctccctcacaaccagtcgctccagccttaatttgaaagcagacgacggactgagaccaaactgcaaaacatcccagatcaccacagccatcatcagcatccccactcccccagcgctaaccccagagggggaaagtcggccaccccctgccagcccaggccccaacacgaacattccttccatagccagcaatgttgtcaaggtctccgccttgtaaaaccactggacagagggccagagtgggtagtggggaatgaaggggactggcatgttggtgggtggtcactgagaccactccctcccccctttccccactatttctgcctgccccattgtacccctagcactgagacttgtgcctggaaggaaaaagaggtagcaaaggggcacctgaggttcacgctgctagcgtggacatagccctgtgatactgcatctcactggggccagaggaagggaggg

SEQ ID NO: 85 - protein, 636 aa, Homo sapiens
MAAGVAAWLPFARAAAIGWMPVANCPMPLAPADKNKRQDELIVLNVSGRRFQTWRTTLERYPDTLLGSTEKEFFFNEDTKEYFFDRDPEVFRCVLNFYRTGKLHYPRYECISAYDDELAFYGILPEIIGDCCYEEYKDRKRENAERLMDDNDSENNQESMPSLSFRQTMWRAFENPHTSTLALVFYYVTGFFIAVSVITNVVETVPCGTVPGSKELPCGERYSVAFFCLDTACVMIFTVEYLLRLFAAPSRYRFIRSVMSIIDVVAIMPYYIGLVMTNNEDVSGAFVTLRVFRVFRIFKFSRHSQGLRILGYTLKSCASELGFLLFSLTMAIIIFATVMFYAEKGSSASKFTSIPASFWYTIVTMTTLGYGDMVPKTIAGKIFGSICSLSGVLVIALPVPVIVSNFSRIYHQNQRADKRRAQKKARLARIRVAKTGSSNAYLHSKRNGLLNEALELTGTPEEEHMGKTTSLIESQHHHLLHCLEKTTNHEFIDEQMFEQNCMESSMQNYPSTRSPSLSSHPGLTTTCCSRRSKKTTHLPNSNLPATRLRSMQELSTIHIQGSEQPSLTTSRSSLNLKADDGLRPNCKTSQITTAIISIPTPPALTPEGESRPPPASPGPNTNIPSIASNVVKVSAL

SEQ ID NO: 86 - DNA, 3438 bp, Homo sapiens
gcagagtctgcagtgcggagggggcgggaagtccaggccccgcactcgatccacgctggctccctacggaggcccacctactcgaggcccaccgactcctactgcaatcagtactatgcgatcgtcctagagagtccattcagctgcacttccgcctcagtatggcatcacagctgcaagtgttttcgcccccatcagtgtcgtcgagtgccttctgcagtgcgaagaaactgaaaatagagccctctggctgggatgtttcaggacagagtagcaacgacaaatattatacccacagcaaaaccctcccagccacacaagggcaagccaactcctctcaccaggtagcaaatttcaacatccctgcttacgaccagggcctcctcctcccagctcctgcagtggagcatattgttgtaacagccgctgatagctcgggcagtgctgctacatcaaccttccaaagcagccagaccctgactcacagaagcaacgtttctttgcttgagccatatcaaaaatgtggattgaaacgaaaaagtgaggaagttgacagcaacggtagtgtgcagatcatagaagaacatccccctctcatgctgcaaaacaggactgtggtgggtgctgctgccacaaccaccactgtgaccacaaagagtagcagttccagcggagaaggggattaccagctggtccagcatgagatcctttgctctatgaccaatagctatgaagtcttggagttcctaggccgggggacatttggacaggtggctaagtgctggaagaggagcaccaaggaaattgtggctattaaaatcttgaagaaccacccctcctatgccagacaaggacagattgaagtgagcatcctttcccgcctaagcagtgaaaatgctgatgagtataattttgtccgttcatacgagtgctttcagcataagaatcacacctgccttgtttttgaaatgttggagcagaacttatatgattttctaaagcaaaacaaatttagcccactgccactcaagtacatcagaccaatcttgcagcaggtggccacagccttgatgaagctcaagagtcttggtctgatccacgctgaccttaagcctgaaaacatcatgctggttgatccagttcgccagccctaccgagtgaaggtcattgactttggttctgctagtcacgtttccaaagctgtgtgctcaacctacttacagtcacgttactacagagctcctgaaattattcttgggttaccattttgtgaagctattgatatgtggtcactgggctgtgtgatagctgagctgttcctgggatggcctctttatcctggtgcttcagaatatgatcagattcgttatatttcacaaacacaaggcttgccagctgaatatcttctcagtgccggaacaaaaacaaccaggtttttcaacagagatcctaatttggggtacccactgtggaggcttaagacacctgaagaacatgaactggagactggaataaaatcaaaagaagctcggaagtacatttttaattgcttagatgacatggctcaggtgaatatgtctacagacctggagggaacagacatgttggcagagaaggcagaccgaagagaatacattgatctgttaaagaaaatgctcacaattgatgcagataagagaattacccctctaaaaactcttaaccatcagtttgtgacaatgactcaccttttggattttccacatagcaatcatgttaagtcttgttttcagaacatggagatctgcaagcggagggttcacatgtatgatacagtgagtcagatcaagagtcccttcactacacatgttgccccaaatacaagcacaaatctaaccatgagcttcagcaatcagctcaatacagtgcacaatcaggccagtgttctagcttccagttctactgcagcagctgctactctttctctggctaattcagatgtctcactactaaactaccagtcagctttgtacccatcatctgctgcaccagttcctggagttgcccagcagggtgtttccttgcagcctggaaccacccagatttgcactcagacagatccattccaacagacatttatagtatgtccacctgcgtttcaaactggactacaagcaacaacaaagcattctggattccctgtgaggatggataatgctgtaccgattgtaccccaggcaccagctgctcagccactacagattcagtcaggagttctcacgcagggaagctgtacaccactaatggtagcaactctccaccctcaagtagccaccatcacaccgcagtatgcggtgccctttactctgagctgcgcagccggccggccggcgctggttgaacagactgccgctgtactgcaggcgtggcctggagggactcagcaaattctcctgccttcaacttggcaacagttgcctggggtagctctacacaactctgtccagcccacagcaatgattccagaggccatggggagtggacagcagctagctgactggaggaatgcccactctcatggcaaccagtacagcactatcatgcagcagccatccttgctgactaaccatgtgacattggccactgctcagcctctgaatgttggtgttgcccatgttgtcagacaacaacaatccagttccctcccttcgaagaagaataagcagtcagctccagtctcttccaagtcctctctagatgttctgccttcccaagtctattctctggttgggagcagtcccctccgcaccacatcttcttataattccttggtccctgtccaagatcagcatcagcccatcatcattccagatactcccagccctcctgtgagtgtcatcactatccgaagtgacactgatgaggaagaggacaacaaatacaagcccagtagctctggactgaagccaaggtctaatgtcatcagttatgtcactgtcaatgattctccagactctgactcttctttgagcagcccttattccactgataccctgagtgctctccgaggcaatagtggatccgttttggaggggcctggcagagttgtggcagatggcactggcacccgcactatcattgtgcctccactgaaaactcagcttggtgactgcactgtagcaacccaggcctcaggtctcctgagcaataagactaagccagtcgcttcagtgagtgggcagtcatctggatgctgtatcacccccacagggtatcgagctcaacgcggggggaccagtgcagcacaaccactcaatcttagccaggtaagtgctatgggctactgccttctgtttgggccctgcactgttgttactttctggagaaccctgcttctggctggatgctgaataaagccaaatgaagccccttttgtgtcaaacaaaaaaaaaaaaaaaa

SEQ ID NO: 87 - protein, 1075 aa, Homo sapiens
MASQLQVFSPPSVSSSAFCSAKKLKIEPSGWDVSGQSSNDKYYTHSKTLPATQGQANSSHQVANFNIPAYDQGLLLPAPAVEHIVVTAADSSGSAATSTFQSSQTLTHRSNVSLLEPYQKCGLKRKSEEVDSNGSVQIIEEHPPLMLQNRTVVGAAATTTTVTTKSSSSSGEGDYQLVQHEILCSMTNSYEVLEFLGRGTFGQVAKCWKRSTKEIVAIKILKNHPSYARQGQIEVSILSRLSSENADEYNFVRSYECFQHKNHTCLVFEMLEQNLYDFLKQNKFSPLPLKYIRPILQQVATALMKLKSLGLIHADLKPENIMLVDPVRQPYRVKVIDFGSASHVSKAVCSTYLQSRYYRAPEIILGLPFCEAIDMWSLGCVIAELFLGWPLYPGASEYDQIRYISQTQGLPAEYLLSAGTKTTRFFNRDPNLGYPLWRLKTPEEHELETGIKSKEARKYIFNCLDDMAQVNMSTDLEGTDMLAEKADRREYIDLLKKMLTIDADKRITPLKTLNHQFVTMTHLLDFPHSNHVKSCFQNMEICKRRVHMYDTVSQIKSPFTTHVAPNTSTNLTMSFSNQLNTVHNQASVLASSSTAAAATLSLANSDVSLLNYQSALYPSSAAPVPGVAQQGVSLQPGTTQICTQTDPFQQTFIVCPPAFQTGLQATTKHSGFPVRMDNAVPIVPQAPAAQPLQIQSGVLTQGSCTPLMVATLHPQVATITPQYAVPFTLSCAAGRPALVEQTAAVLQAWPGGTQQILLPSTWQQLPGVALHNSVQPTAMIPEAMGSGQQLADWRNAHSHGNQYSTIMQQPSLLTNHVTLATAQPLNVGVAHVVRQQQSSSLPSKKNKQSAPVSSKSSLDVLPSQVYSLVGSSPLRTTSSYNSLVPVQDQHQPIIIPDTPSPPVSVITIRSDTDEEEDNKYKPSSSGLKPRSNVISYVTVNDSPDSDSSLSSPYSTDTLSALRGNSGSVLEGPGRVVADGTGTRTIIVPPLKTQLGDCTVATQASGLLSNKTKPVASVSGQSSGCCITPTGYRAQRGGTSAAQPLNLSQVSAMGYCLLFGPCTVVTFWRTLLLAGC

SEQ ID NO: 88 - DNA, 6802 bp, Homo sapiens
agattgtttcacatcaccagtgtatcctcagctcctaacactgtgtctggtacacattgtttgatggttttgatgtttcagattcgttatatttcacaaacacaaggcttgccagctgaatatcttctcagtgccggaacaaaaacaaccaggtttttcaacagagatcctaatttggggtacccactgtggaggcttaagacacctgaagaacatgaactggagactggaataaaatcaaaagaagctcggaagtacatttttaattgcttagatgacatggctcaggtgaatatgtctacagacctggagggaacagacatgttggcagagaaggcagaccgaagagaatacattgatctgttaaagaaaatgctcacaattgatgcagataagagaattacccctctaaaaactcttaaccatcagtttgtgacaatgactcaccttttggattttccacatagcaatcatgttaagtcttgttttcagaacatggagatctgcaagcggagggttcacatgtatgatacagtgagtcagatcaagagtcccttcactacacatgttgccccaaatacaagcacaaatctaaccatgagcttcagcaatcagctcaatacagtgcacaatcaggccagtgttctagcttccagttctactgcagcagctgctactctttctctggctaattcagatgtctcactactaaactaccagtcagctttgtacccatcatctgctgcaccagttcctggagttgcccagcagggtgtttccttgcagcctggaaccacccagatttgcactcagacagatccattccaacagacatttatagtatgtccacctgcgtttcaaactggactacaagcaacaacaaagcattctggattccctgtgaggatggataatgctgtaccgattgtaccccaggcaccagctgctcagccactacagattcagtcaggagttctcacgcagggaagctgtacaccactaatggtagcaactctccaccctcaagtagccaccatcacaccgcagtatgcggtgccctttactctgagctgcgcagccggccggccggcgctggttgaacagactgccgctgtactgcaggcgtggcctggagggactcagcaaattctcctgccttcaacttggcaacagttgcctggggtagctctacacaactctgtccagcccacagcaatgattccagaggccatggggagtggacagcagctagctgactggaggaatgcccactctcatggcaaccagtacagcactatcatgcagcagccatccttgctgactaaccatgtgacattggccactgctcagcctctgaatgttggtgttgcccatgttgtcagacaacaacaatccagttccctcccttcgaagaagaataagcagtcagctccagtctcttccaagtcctctctagatgttctgccttcccaagtctattctctggttgggagcagtcccctccgcaccacatcttcttataattccttggtccctgtccaagatcagcatcagcccatcatcattccagatactcccagccctcctgtgagtgtcatcactatccgaagtgacactgatgaggaagaggacaacaaatacaagcccagtagctctggactgaagccaaggtctaatgtcatcagttatgtcactgtcaatgattctccagactctgactcttctttgagcagcccttattccactgataccctgagtgctctccgaggcaatagtggatccgttttggaggggcctggcagagttgtggcagatggcactggcacccgcactatcattgtgcctccactgaaaactcagcttggtgactgcactgtagcaacccaggcctcaggtctcctgagcaataagactaagccagtcgcttcagtgagtgggcagtcatctggatgctgtatcacccccacagggtatcgagctcaacgcggggggaccagtgcagcacaaccactcaatcttagccagaaccagcagtcatcggcggctccaacctcacaggagagaagcagcaacccagccccccgcaggcagcaggcgtttgtggcccctctctcccaagccccctacaccttccagcatggcagcccgctacactcgacagggcacccacaccttgccccggcccctgctcacctgccaagccaggctcatctgtatacgtatgctgccccgacttctgctgctgcactgggctcaaccagctccattgctcatcttttctccccacagggttcctcaaggcatgctgcagcctataccactcaccctagcactttggtgcaccaggtccctgtcagtgttgggcccagcctcctcacttctgccagcgtggcccctgctcagtaccaacaccagtttgccacccaatcctacattgggtcttcccgaggctcaacaatttacactggatacccgctgagtcctaccaagatcagccagtattcctacttatagttggtgagcatgagggaggaggaatcatggctaccttctcctggccctgcgttcttaatattgggctatggagagatcctcctttaccctcttgaaatttcttagccagcaacttgttctgcaggggcccactgaagcagaaggtttttctctgggggaacctgtctcagtgttgactgcattgttgtagtcttcccaaagtttgccctatttttaaattcattatttttgtgacagtaattttggtacttggaagagttcagatgcccatcttctgcagttaccaaggaagagagattgttctgaagttaccctctgaaaaatattttgtctctctgacttgatttctataaatgcttttaaaaacaagtgaagcccctctttatttcattttgtgttattgtgattgctggtcaggaaaaatgctgatagaaggagttgaaatctgatgacaaaaaaagaaaaattactttttgtttgtttataaactcagacttgcctattttattttaaaagcggcttacacaatctcccttttgtttattggacatttaaacttacagagtttcagttttgttttaatgtcatattatacttaatgggcaattgttatttttgcaaaactggttacgtattactctgtgttactattgagattctctcaattgctcctgtgtttgttataaagtagtgtttaaaaggcagctcaccatttgctggtaacttaatgtgagagaatccatatctgcgtgaaaacaccaagtattctttttaaatgaagcaccatgaattcttttttaaattattttttaaaagtctttctctctctgattcagcttaaatttttttatcgaaaaagccattaaggtggttattattacatggtggtggtggttttattatatgcaaaatctctgtctattatgagatactggcattgatgagctttgcctaaagattagtatgaattttcagtaatacacctctgttttgctcatctctcccttctgttttatgtgatttgtttggggagaaagctaaaaaaacctgaaaccagataagaacatttcttgtgtatagcttttatacttcaaagtagcttcctttgtatgccagcagcaaattgaatgctctcttattaagacttatataataagtgcatgtaggaattgcaaaaaatattttaaaaatttattactgaatttaaaaatattttagaagttttgtaatggtggtgttttaatattttacataattaaatatgtacatattgattagaaaaatataacaagcaatttttcctgctaacccaaaatgttatttgtaatcaaatgtgtagtgattacacttgaattgtgtacttagtgtgtatgtgatcctccagtgttatcccggagatggattgatgtctccattgtatttaaaccaaaatgaactgatacttgttggaatgtatgtgaactaattgcaattatattagagcatattactgtagtgctgaatgagcaggggcattgcctgcaaggagaggagacccttggaattgttttgcacaggtgtgtctggtgaggagtttttcagtgtgtgtctcttccttccctttcttcctccttcccttattgtagtgccttatatgataatgtagtggttaatagagtttacagtgagcttgccttaggatggaccagcaagcccccgtggaccctaagttgttcaccgggatttatcagaacaggattagtagctgtattgtgtaatgcattgttctcagtttccctgccaacattgaaaaataaaaacagcagcttttctcctttaccaccacctctacccctttccattttggattctcggctgagttctcacagaagcattttccccatgtggctctctcactgtgcgttgctaccttgcttctgtgagaattcaggaagcaggtgagaggagtcaagccaatattaaatatgcattcttttaaagtatgtgcaatcacttttagaatgaatttttttttccttttcccatgtggcagtccttcctgcacatagttgacattcctagtaaaatatttgcttgttgaaaaaaacatgttaacagatgtgtttataccaaagagcctgttgtattgcttaccatgtccccatactatgaggagaagttttgtggtgccgctggtgacaaggaactcacagaaaggtttcttagctggtgaagaatatagagaaggaaccaaagcctgttgagtcattgaggcttttgaggtttcttttttaacagcttgtatagtcttggggcccttcaagctgtgaaattgtccttgtactctcagctcctgcatggatctgggtcaagtagaaggtactggggatggggacattcctgcccataaaggatttggggaaagaagattaatcctaaaatacaggtgtgttccatctgaattgaaaatgatatatttgagatataattttaggactggttctgtgtagatagagatggtgtcaaggaggtgcaggatggagatgggagatttcatggagcctggtcagccagctctgtaccaggttgaacaccgaggagctgtcaaagtatttggagtttcttcattgtaaggagtaagggcttccaagatggggcaggtagtccgtacagcctaccaggaacatgttgtgttttctttattttttaaaatcattatattgagttgtgttttcagcactatattggtcaagatagccaagcagtttgtataatttctgtcactagtgtcatacagttttctggtcaacatgtgtgatctttgtgtctcctttttgccaagcacattctgattttcttgttggaacacaggtctagtttctaaaggacaaattttttgttccttgtcttttttctgtaagggacaagatttgttgtttttgtaagaaatgagatgcaggaaagaaaaccaaatcccattcctgcaccccagtccaataagcagataccacttaagataggagtctaaactccacagaaaaggataataccaagagcttgtattgttaccttagtcacttgcctagcagtgtgtggctttaaaaactagagatttttcagtcttagtctgcaaactggcatttccgattttccagcataaaaatccacctgtgtctgctgaatgtgtatgtatgtgctcactgtggctttagattctgtccctggggttagccctgttggccctgacaggaagggaggaagcctggtgaatttagtgagcagctggcctgggtcacagtgacctgacctcaaaccagcttaaggctttaagtcctctctcagaacttggcatttccaacttcttcctttccgggtgagagaagaagcggagaagggttcagtgtagccactctgggctcatagggacacttggtcactccagagtttttaatagctcccaggaggtgatattattttcagtgctcagctgaaataccaaccccaggaataagaactccatttcaaacagttctggccattctgagcctgcttttgtgattgctcatccattgtcctccactagaggggctaagcttgactgcccttagccaggcaagcacagtaatgtgtgttttgttcagcattattatgcaaaaattcactagttgagatggtttgttttaggataggaaatgaaattgcctctcagtgacaggagtggcccgagcctgcttcctattttgattttttttttttttaactgatagatggtgcagcatgtctacatggttgtttgttgctaaactttatataatgtgtggtttcaattcagcttgaaaaataatctcactacatgtagcagtacattatatgtacattatatgtaatgttagtatttctgctttgaatccttgatattgcaatggaattcctactttattaaatgtatttgatatgctagttattgtgtgcgatttaaactttttttgctttctccctttttttggttgtgcgctttcttttacaacaagcctctagaaacagatagtttctgagaattactgagctatgtttgtaatgcagatgtacttagggagtatgtaaaataatcattttaacaaaagaaatagatatttaaaatttaatactaactatgggaaaagggtccattgtgtaaaacatagtttatctttggattcaatgtttgtctttggttttacaaagtagcttgtattttcagtattttctacataatatggtaaaatgtagagcaattgcaatgcatcaataaaatgggtaaattttctga

SEQ ID NO: 89 - protein, 816 aa, Homo sapiens
MVLMFQIRYISQTQGLPAEYLLSAGTKTTRFFNRDPNLGYPLWRLKTPEEHELETGIKSKEARKYIFNCLDDMAQVNMSTDLEGTDMLAEKADRREYIDLLKKMLTIDADKRITPLKTLNHQFVTMTHLLDFPHSNHVKSCFQNMEICKRRVHMYDTVSQIKSPFTTHVAPNTSTNLTMSFSNQLNTVHNQASVLASSSTAAAATLSLANSDVSLLNYQSALYPSSAAPVPGVAQQGVSLQPGTTQICTQTDPFQQTFIVCPPAFQTGLQATTKHSGFPVRMDNAVPIVPQAPAAQPLQIQSGVLTQGSCTPLMVATLHPQVATITPQYAVPFTLSCAAGRPALVEQTAAVLQAWPGGTQQILLPSTWQQLPGVALHNSVQPTAMIPEAMGSGQQLADWRNAHSHGNQYSTIMQQPSLLTNHVTLATAQPLNVGVAHVVRQQQSSSLPSKKNKQSAPVSSKSSLDVLPSQVYSLVGSSPLRTTSSYNSLVPVQDQHQPIIIPDTPSPPVSVITIRSDTDEEEDNKYKPSSSGLKPRSNVISYVTVNDSPDSDSSLSSPYSTDTLSALRGNSGSVLEGPGRVVADGTGTRTIIVPPLKTQLGDCTVATQASGLLSNKTKPVASVSGQSSGCCITPTGYRAQRGGTSAAQPLNLSQNQQSSAAPTSQERSSNPAPRRQQAFVAPLSQAPYTFQHGSPLHSTGHPHLAPAPAHLPSQAHLYTYAAPTSAAALGSTSSIAHLFSPQGSSRHAAAYTTHPSTLVHQVPVSVGPSLLTSASVAPAQYQHQFATQSYIGSSRGSTIYTGYPLSPTKISQYSYL

SEQ ID NO: 90 - DNA, 8082 bp, Homo sapiens
gcagagtctgcagtgcggagggggcgggaagtccaggccccgcactcgatccacgctggctccctacggaggcccacctactcgaggcccaccgactcctactgcaatcagtactatgcgatcgtcctagagagtccattcagctgcacttccgcctcagtatggcatcacagctgcaagtgttttcgcccccatcagtgtcgtcgagtgccttctgcagtgcgaagaaactgaaaatagagccctctggctgggatgtttcaggacagagtagcaacgacaaatattatacccacagcaaaaccctcccagccacacaagggcaagccaactcctctcaccaggtagcaaatttcaacatccctgcttacgaccagggcctcctcctcccagctcctgcagtggagcatattgttgtaacagccgctgatagctcgggcagtgctgctacatcaaccttccaaagcagccagaccctgactcacagaagcaacgtttctttgcttgagccatatcaaaaatgtggattgaaacgaaaaagtgaggaagttgacagcaacggtagtgtgcagatcatagaagaacatccccctctcatgctgcaaaacaggactgtggtgggtgctgctgccacaaccaccactgtgaccacaaagagtagcagttccagcggagaaggggattaccagctggtccagcatgagatcctttgctctatgaccaatagctatgaagtcttggagttcctaggccgggggacatttggacaggtggctaagtgctggaagaggagcaccaaggaaattgtggctattaaaatcttgaagaaccacccctcctatgccagacaaggacagattgaagtgagcatcctttcccgcctaagcagtgaaaatgctgatgagtataattttgtccgttcatacgagtgctttcagcataagaatcacacctgccttgtttttgaaatgttggagcagaacttatatgattttctaaagcaaaacaaatttagcccactgccactcaagtacatcagaccaatcttgcagcaggtggccacagccttgatgaagctcaagagtcttggtctgatccacgctgaccttaagcctgaaaacatcatgctggttgatccagttcgccagccctaccgagtgaaggtcattgactttggttctgctagtcacgtttccaaagctgtgtgctcaacctacttacagtcacgttactacagagctcctgaaattattcttgggttaccattttgtgaagctattgatatgtggtcactgggctgtgtgatagctgagctgttcctgggatggcctctttatcctggtgcttcagaatatgatcagattcgttatatttcacaaacacaaggcttgccagctgaatatcttctcagtgccggaacaaaaacaaccaggtttttcaacagagatcctaatttggggtacccactgtggaggcttaagacacctgaagaacatgaactggagactggaataaaatcaaaagaagctcggaagtacatttttaattgcttagatgacatggctcaggtgaatatgtctacagacctggagggaacagacatgttggcagagaaggcagaccgaagagaatacattgatctgttaaagaaaatgctcacaattgatgcagataagagaattacccctctaaaaactcttaaccatcagtttgtgacaatgactcaccttttggattttccacatagcaatcatgttaagtcttgttttcagaacatggagatctgcaagcggagggttcacatgtatgatacagtgagtcagatcaagagtcccttcactacacatgttgccccaaatacaagcacaaatctaaccatgagcttcagcaatcagctcaatacagtgcacaatcaggccagtgttctagcttccagttctactgcagcagctgctactctttctctggctaattcagatgtctcactactaaactaccagtcagctttgtacccatcatctgctgcaccagttcctggagttgcccagcagggtgtttccttgcagcctggaaccacccagatttgcactcagacagatccattccaacagacatttatagtatgtccacctgcgtttcaaactggactacaagcaacaacaaagcattctggattccctgtgaggatggataatgctgtaccgattgtaccccaggcaccagctgctcagccactacagattcagtcaggagttctcacgcagggaagctgtacaccactaatggtagcaactctccaccctcaagtagccaccatcacaccgcagtatgcggtgccctttactctgagctgcgcagccggccggccggcgctggttgaacagactgccgctgtactgcaggcgtggcctggagggactcagcaaattctcctgccttcaacttggcaacagttgcctggggtagctctacacaactctgtccagcccacagcaatgattccagaggccatggggagtggacagcagctagctgactggaggaatgcccactctcatggcaaccagtacagcactatcatgcagcagccatccttgctgactaaccatgtgacattggccactgctcagcctctgaatgttggtgttgcccatgttgtcagacaacaacaatccagttccctcccttcgaagaagaataagcagtcagctccagtctcttccaagtcctctctagatgttctgccttcccaagtctattctctggttgggagcagtcccctccgcaccacatcttcttataattccttggtccctgtccaagatcagcatcagcccatcatcattccagatactcccagccctcctgtgagtgtcatcactatccgaagtgacactgatgaggaagaggacaacaaatacaagcccagtagctctggactgaagccaaggtctaatgtcatcagttatgtcactgtcaatgattctccagactctgactcttctttgagcagcccttattccactgataccctgagtgctctccgaggcaatagtggatccgttttggaggggcctggcagagttgtggcagatggcactggcacccgcactatcattgtgcctccactgaaaactcagcttggtgactgcactgtagcaacccaggcctcaggtctcctgagcaataagactaagccagtcgcttcagtgagtgggcagtcatctggatgctgtatcacccccacagggtatcgagctcaacgcggggggaccagtgcagcacaaccactcaatcttagccagaaccagcagtcatcggcggctccaacctcacaggagagaagcagcaacccagccccccgcaggcagcaggcgtttgtggcccctctctcccaagccccctacaccttccagcatggcagcccgctacactcgacagggcacccacaccttgccccggcccctgctcacctgccaagccaggctcatctgtatacgtatgctgccccgacttctgctgctgcactgggctcaaccagctccattgctcatcttttctccccacagggttcctcaaggcatgctgcagcctataccactcaccctagcactttggtgcaccaggtccctgtcagtgttgggcccagcctcctcacttctgccagcgtggcccctgctcagtaccaacaccagtttgccacccaatcctacattgggtcttcccgaggctcaacaatttacactggatacccgctgagtcctaccaagatcagccagtattcctacttatagttggtgagcatgagggaggaggaatcatggctaccttctcctggccctgcgttcttaatattgggctatggagagatcctcctttaccctcttgaaatttcttagccagcaacttgttctgcaggggcccactgaagcagaaggtttttctctgggggaacctgtctcagtgttgactgcattgttgtagtcttcccaaagtttgccctatttttaaattcattatttttgtgacagtaattttggtacttggaagagttcagatgcccatcttctgcagttaccaaggaagagagattgttctgaagttaccctctgaaaaatattttgtctctctgacttgatttctataaatgcttttaaaaacaagtgaagcccctctttatttcattttgtgttattgtgattgctggtcaggaaaaatgctgatagaaggagttgaaatctgatgacaaaaaaagaaaaattactttttgtttgtttataaactcagacttgcctattttattttaaaagcggcttacacaatctcccttttgtttattggacatttaaacttacagagtttcagttttgttttaatgtcatattatacttaatgggcaattgttatttttgcaaaactggttacgtattactctgtgttactattgagattctctcaattgctcctgtgtttgttataaagtagtgtttaaaaggcagctcaccatttgctggtaacttaatgtgagagaatccatatctgcgtgaaaacaccaagtattctttttaaatgaagcaccatgaattcttttttaaattattttttaaaagtctttctctctctgattcagcttaaatttttttatcgaaaaagccattaaggtggttattattacatggtggtggtggttttattatatgcaaaatctctgtctattatgagatactggcattgatgagctttgcctaaagattagtatgaattttcagtaatacacctctgttttgctcatctctcccttctgttttatgtgatttgtttggggagaaagctaaaaaaacctgaaaccagataagaacatttcttgtgtatagcttttatacttcaaagtagcttcctttgtatgccagcagcaaattgaatgctctcttattaagacttatataataagtgcatgtaggaattgcaaaaaatattttaaaaatttattactgaatttaaaaatattttagaagttttgtaatggtggtgttttaatattttacataattaaatatgtacatattgattagaaaaatataacaagcaatttttcctgctaacccaaaatgttatttgtaatcaaatgtgtagtgattacacttgaattgtgtacttagtgtgtatgtgatcctccagtgttatcccggagatggattgatgtctccattgtatttaaaccaaaatgaactgatacttgttggaatgtatgtgaactaattgcaattatattagagcatattactgtagtgctgaatgagcaggggcattgcctgcaaggagaggagacccttggaattgttttgcacaggtgtgtctggtgaggagtttttcagtgtgtgtctcttccttccctttcttcctccttcccttattgtagtgccttatatgataatgtagtggttaatagagtttacagtgagcttgccttaggatggaccagcaagcccccgtggaccctaagttgttcaccgggatttatcagaacaggattagtagctgtattgtgtaatgcattgttctcagtttccctgccaacattgaaaaataaaaacagcagcttttctcctttaccaccacctctacccctttccattttggattctcggctgagttctcacagaagcattttccccatgtggctctctcactgtgcgttgctaccttgcttctgtgagaattcaggaagcaggtgagaggagtcaagccaatattaaatatgcattcttttaaagtatgtgcaatcacttttagaatgaatttttttttccttttcccatgtggcagtccttcctgcacatagttgacattcctagtaaaatatttgcttgttgaaaaaaacatgttaacagatgtgtttataccaaagagcctgttgtattgcttaccatgtccccatactatgaggagaagttttgtggtgccgctggtgacaaggaactcacagaaaggtttcttagctggtgaagaatatagagaaggaaccaaagcctgttgagtcattgaggcttttgaggtttcttttttaacagcttgtatagtcttggggcccttcaagctgtgaaattgtccttgtactctcagctcctgcatggatctgggtcaagtagaaggtactggggatggggacattcctgcccataaaggatttggggaaagaagattaatcctaaaatacaggtgtgttccatctgaattgaaaatgatatatttgagatataattttaggactggttctgtgtagatagagatggtgtcaaggaggtgcaggatggagatgggagatttcatggagcctggtcagccagctctgtaccaggttgaacaccgaggagctgtcaaagtatttggagtttcttcattgtaaggagtaagggcttccaagatggggcaggtagtccgtacagcctaccaggaacatgttgtgttttctttattttttaaaatcattatattgagttgtgttttcagcactatattggtcaagatagccaagcagtttgtataatttctgtcactagtgtcatacagttttctggtcaacatgtgtgatctttgtgtctcctttttgccaagcacattctgattttcttgttggaacacaggtctagtttctaaaggacaaattttttgttccttgtcttttttctgtaagggacaagatttgttgtttttgtaagaaatgagatgcaggaaagaaaaccaaatcccattcctgcaccccagtccaataagcagataccacttaagataggagtctaaactccacagaaaaggataataccaagagcttgtattgttaccttagtcacttgcctagcagtgtgtggctttaaaaactagagatttttcagtcttagtctgcaaactggcatttccgattttccagcataaaaatccacctgtgtctgctgaatgtgtatgtatgtgctcactgtggctttagattctgtccctggggttagccctgttggccctgacaggaagggaggaagcctggtgaatttagtgagcagctggcctgggtcacagtgacctgacctcaaaccagcttaaggctttaagtcctctctcagaacttggcatttccaacttcttcctttccgggtgagagaagaagcggagaagggttcagtgtagccactctgggctcatagggacacttggtcactccagagtttttaatagctcccaggaggtgatattattttcagtgctcagctgaaataccaaccccaggaataagaactccatttcaaacagttctggccattctgagcctgcttttgtgattgctcatccattgtcctccactagaggggctaagcttgactgcccttagccaggcaagcacagtaatgtgtgttttgttcagcattattatgcaaaaattcactagttgagatggtttgttttaggataggaaatgaaattgcctctcagtgacaggagtggcccgagcctgcttcctattttgattttttttttttttaactgatagatggtgcagcatgtctacatggttgtttgttgctaaactttatataatgtgtggtttcaattcagcttgaaaaataatctcactacatgtagcagtacattatatgtacattatatgtaatgttagtatttctgctttgaatccttgatattgcaatggaattcctactttattaaatgtatttgatatgctagttattgtgtgcgatttaaactttttttgctttctccctttttttggttgtgcgctttcttttacaacaagcctctagaaacagatagtttctgagaattactgagctatgtttgtaatgcagatgtacttagggagtatgtaaaataatcattttaacaaaagaaatagatatttaaaatttaatactaactatgggaaaagggtccattgtgtaaaacatagtttatctttggattcaatgtttgtctttggttttacaaagtagcttgtattttcagtattttctacataatatggtaaaatgtagagcaattgcaatgcatcaataaaatgggtaaattttctga

SEQ ID NO: 91 - protein, 1210 aa, Homo sapiens
MASQLQVFSPPSVSSSAFCSAKKLKIEPSGWDVSGQSSNDKYYTHSKTLPATQGQANSSHQVANFNIPAYDQGLLLPAPAVEHIVVTAADSSGSAATSTFQSSQTLTHRSNVSLLEPYQKCGLKRKSEEVDSNGSVQIIEEHPPLMLQNRTVVGAAATTTTVTTKSSSSSGEGDYQLVQHEILCSMTNSYEVLEFLGRGTFGQVAKCWKRSTKEIVAIKILKNHPSYARQGQIEVSILSRLSSENADEYNFVRSYECFQHKNHTCLVFEMLEQNLYDFLKQNKFSPLPLKYIRPILQQVATALMKLKSLGLIHADLKPENIMLVDPVRQPYRVKVIDFGSASHVSKAVCSTYLQSRYYRAPEIILGLPFCEAIDMWSLGCVIAELFLGWPLYPGASEYDQIRYISQTQGLPAEYLLSAGTKTTRFFNRDPNLGYPLWRLKTPEEHELETGIKSKEARKYIFNCLDDMAQVNMSTDLEGTDMLAEKADRREYIDLLKKMLTIDADKRITPLKTLNHQFVTMTHLLDFPHSNHVKSCFQNMEICKRRVHMYDTVSQIKSPFTTHVAPNTSTNLTMSFSNQLNTVHNQASVLASSSTAAAATLSLANSDVSLLNYQSALYPSSAAPVPGVAQQGVSLQPGTTQICTQTDPFQQTFIVCPPAFQTGLQATTKHSGFPVRMDNAVPIVPQAPAAQPLQIQSGVLTQGSCTPLMVATLHPQVATITPQYAVPFTLSCAAGRPALVEQTAAVLQAWPGGTQQILLPSTWQQLPGVALHNSVQPTAMIPEAMGSGQQLADWRNAHSHGNQYSTIMQQPSLLTNHVTLATAQPLNVGVAHVVRQQQSSSLPSKKNKQSAPVSSKSSLDVLPSQVYSLVGSSPLRTTSSYNSLVPVQDQHQPIIIPDTPSPPVSVITIRSDTDEEEDNKYKPSSSGLKPRSNVISYVTVNDSPDSDSSLSSPYSTDTLSALRGNSGSVLEGPGRVVADGTGTRTIIVPPLKTQLGDCTVATQASGLLSNKTKPVASVSGQSSGCCITPTGYRAQRGGTSAAQPLNLSQNQQSSAAPTSQERSSNPAPRRQQAFVAPLSQAPYTFQHGSPLHSTGHPHLAPAPAHLPSQAHLYTYAAPTSAAALGSTSSIAHLFSPQGSSRHAAAYTTHPSTLVHQVPVSVGPSLLTSASVAPAQYQHQFATQSYIGSSRGSTIYTGYPLSPTKISQYSYL

SEQ ID NO: 92 - DNA, 6993 bp, Homo sapiens
atagtaggcaatatttatgtgtcatttattattattgctattagtgttacctattattttctttttgaacccacttattgcctaattagtcatagtttgacaattgcccttgtattccaccatgtcaaatataaatttacatagatgaagctcctgaaattattcttgggttaccattttgtgaagctattgatatgtggtcactgggctgtgtgatagctgagctgttcctgggatggcctctttatcctggtgcttcagaatatgatcagattcgttatatttcacaaacacaaggcttgccagctgaatatcttctcagtgccggaacaaaaacaaccaggtttttcaacagagatcctaatttggggtacccactgtggaggcttaagacacctgaagaacatgaactggagactggaataaaatcaaaagaagctcggaagtacatttttaattgcttagatgacatggctcaggtgaatatgtctacagacctggagggaacagacatgttggcagagaaggcagaccgaagagaatacattgatctgttaaagaaaatgctcacaattgatgcagataagagaattacccctctaaaaactcttaaccatcagtttgtgacaatgactcaccttttggattttccacatagcaatcatgttaagtcttgttttcagaacatggagatctgcaagcggagggttcacatgtatgatacagtgagtcagatcaagagtcccttcactacacatgttgccccaaatacaagcacaaatctaaccatgagcttcagcaatcagctcaatacagtgcacaatcaggccagtgttctagcttccagttctactgcagcagctgctactctttctctggctaattcagatgtctcactactaaactaccagtcagctttgtacccatcatctgctgcaccagttcctggagttgcccagcagggtgtttccttgcagcctggaaccacccagatttgcactcagacagatccattccaacagacatttatagtatgtccacctgcgtttcaaactggactacaagcaacaacaaagcattctggattccctgtgaggatggataatgctgtaccgattgtaccccaggcaccagctgctcagccactacagattcagtcaggagttctcacgcagggaagctgtacaccactaatggtagcaactctccaccctcaagtagccaccatcacaccgcagtatgcggtgccctttactctgagctgcgcagccggccggccggcgctggttgaacagactgccgctgtactgcaggcgtggcctggagggactcagcaaattctcctgccttcaacttggcaacagttgcctggggtagctctacacaactctgtccagcccacagcaatgattccagaggccatggggagtggacagcagctagctgactggaggaatgcccactctcatggcaaccagtacagcactatcatgcagcagccatccttgctgactaaccatgtgacattggccactgctcagcctctgaatgttggtgttgcccatgttgtcagacaacaacaatccagttccctcccttcgaagaagaataagcagtcagctccagtctcttccaagtcctctctagatgttctgccttcccaagtctattctctggttgggagcagtcccctccgcaccacatcttcttataattccttggtccctgtccaagatcagcatcagcccatcatcattccagatactcccagccctcctgtgagtgtcatcactatccgaagtgacactgatgaggaagaggacaacaaatacaagcccagtagctctggactgaagccaaggtctaatgtcatcagttatgtcactgtcaatgattctccagactctgactcttctttgagcagcccttattccactgataccctgagtgctctccgaggcaatagtggatccgttttggaggggcctggcagagttgtggcagatggcactggcacccgcactatcattgtgcctccactgaaaactcagcttggtgactgcactgtagcaacccaggcctcaggtctcctgagcaataagactaagccagtcgcttcagtgagtgggcagtcatctggatgctgtatcacccccacagggtatcgagctcaacgcggggggaccagtgcagcacaaccactcaatcttagccagaaccagcagtcatcggcggctccaacctcacaggagagaagcagcaacccagccccccgcaggcagcaggcgtttgtggcccctctctcccaagccccctacaccttccagcatggcagcccgctacactcgacagggcacccacaccttgccccggcccctgctcacctgccaagccaggctcatctgtatacgtatgctgccccgacttctgctgctgcactgggctcaaccagctccattgctcatcttttctccccacagggttcctcaaggcatgctgcagcctataccactcaccctagcactttggtgcaccaggtccctgtcagtgttgggcccagcctcctcacttctgccagcgtggcccctgctcagtaccaacaccagtttgccacccaatcctacattgggtcttcccgaggctcaacaatttacactggatacccgctgagtcctaccaagatcagccagtattcctacttatagttggtgagcatgagggaggaggaatcatggctaccttctcctggccctgcgttcttaatattgggctatggagagatcctcctttaccctcttgaaatttcttagccagcaacttgttctgcaggggcccactgaagcagaaggtttttctctgggggaacctgtctcagtgttgactgcattgttgtagtcttcccaaagtttgccctatttttaaattcattatttttgtgacagtaattttggtacttggaagagttcagatgcccatcttctgcagttaccaaggaagagagattgttctgaagttaccctctgaaaaatattttgtctctctgacttgatttctataaatgcttttaaaaacaagtgaagcccctctttatttcattttgtgttattgtgattgctggtcaggaaaaatgctgatagaaggagttgaaatctgatgacaaaaaaagaaaaattactttttgtttgtttataaactcagacttgcctattttattttaaaagcggcttacacaatctcccttttgtttattggacatttaaacttacagagtttcagttttgttttaatgtcatattatacttaatgggcaattgttatttttgcaaaactggttacgtattactctgtgttactattgagattctctcaattgctcctgtgtttgttataaagtagtgtttaaaaggcagctcaccatttgctggtaacttaatgtgagagaatccatatctgcgtgaaaacaccaagtattctttttaaatgaagcaccatgaattcttttttaaattattttttaaaagtctttctctctctgattcagcttaaatttttttatcgaaaaagccattaaggtggttattattacatggtggtggtggttttattatatgcaaaatctctgtctattatgagatactggcattgatgagctttgcctaaagattagtatgaattttcagtaatacacctctgttttgctcatctctcccttctgttttatgtgatttgtttggggagaaagctaaaaaaacctgaaaccagataagaacatttcttgtgtatagcttttatacttcaaagtagcttcctttgtatgccagcagcaaattgaatgctctcttattaagacttatataataagtgcatgtaggaattgcaaaaaatattttaaaaatttattactgaatttaaaaatattttagaagttttgtaatggtggtgttttaatattttacataattaaatatgtacatattgattagaaaaatataacaagcaatttttcctgctaacccaaaatgttatttgtaatcaaatgtgtagtgattacacttgaattgtgtacttagtgtgtatgtgatcctccagtgttatcccggagatggattgatgtctccattgtatttaaaccaaaatgaactgatacttgttggaatgtatgtgaactaattgcaattatattagagcatattactgtagtgctgaatgagcaggggcattgcctgcaaggagaggagacccttggaattgttttgcacaggtgtgtctggtgaggagtttttcagtgtgtgtctcttccttccctttcttcctccttcccttattgtagtgccttatatgataatgtagtggttaatagagtttacagtgagcttgccttaggatggaccagcaagcccccgtggaccctaagttgttcaccgggatttatcagaacaggattagtagctgtattgtgtaatgcattgttctcagtttccctgccaacattgaaaaataaaaacagcagcttttctcctttaccaccacctctacccctttccattttggattctcggctgagttctcacagaagcattttccccatgtggctctctcactgtgcgttgctaccttgcttctgtgagaattcaggaagcaggtgagaggagtcaagccaatattaaatatgcattcttttaaagtatgtgcaatcacttttagaatgaatttttttttccttttcccatgtggcagtccttcctgcacatagttgacattcctagtaaaatatttgcttgttgaaaaaaacatgttaacagatgtgtttataccaaagagcctgttgtattgcttaccatgtccccatactatgaggagaagttttgtggtgccgctggtgacaaggaactcacagaaaggtttcttagctggtgaagaatatagagaaggaaccaaagcctgttgagtcattgaggcttttgaggtttcttttttaacagcttgtatagtcttggggcccttcaagctgtgaaattgtccttgtactctcagctcctgcatggatctgggtcaagtagaaggtactggggatggggacattcctgcccataaaggatttggggaaagaagattaatcctaaaatacaggtgtgttccatctgaattgaaaatgatatatttgagatataattttaggactggttctgtgtagatagagatggtgtcaaggaggtgcaggatggagatgggagatttcatggagcctggtcagccagctctgtaccaggttgaacaccgaggagctgtcaaagtatttggagtttcttcattgtaaggagtaagggcttccaagatggggcaggtagtccgtacagcctaccaggaacatgttgtgttttctttattttttaaaatcattatattgagttgtgttttcagcactatattggtcaagatagccaagcagtttgtataatttctgtcactagtgtcatacagttttctggtcaacatgtgtgatctttgtgtctcctttttgccaagcacattctgattttcttgttggaacacaggtctagtttctaaaggacaaattttttgttccttgtcttttttctgtaagggacaagatttgttgtttttgtaagaaatgagatgcaggaaagaaaaccaaatcccattcctgcaccccagtccaataagcagataccacttaagataggagtctaaactccacagaaaaggataataccaagagcttgtattgttaccttagtcacttgcctagcagtgtgtggctttaaaaactagagatttttcagtcttagtctgcaaactggcatttccgattttccagcataaaaatccacctgtgtctgctgaatgtgtatgtatgtgctcactgtggctttagattctgtccctggggttagccctgttggccctgacaggaagggaggaagcctggtgaatttagtgagcagctggcctgggtcacagtgacctgacctcaaaccagcttaaggctttaagtcctctctcagaacttggcatttccaacttcttcctttccgggtgagagaagaagcggagaagggttcagtgtagccactctgggctcatagggacacttggtcactccagagtttttaatagctcccaggaggtgatattattttcagtgctcagctgaaataccaaccccaggaataagaactccatttcaaacagttctggccattctgagcctgcttttgtgattgctcatccattgtcctccactagaggggctaagcttgactgcccttagccaggcaagcacagtaatgtgtgttttgttcagcattattatgcaaaaattcactagttgagatggtttgttttaggataggaaatgaaattgcctctcagtgacaggagtggcccgagcctgcttcctattttgattttttttttttttaactgatagatggtgcagcatgtctacatggttgtttgttgctaaactttatataatgtgtggtttcaattcagcttgaaaaataatctcactacatgtagcagtacattatatgtacattatatgtaatgttagtatttctgctttgaatccttgatattgcaatggaattcctactttattaaatgtatttgatatgctagttattgtgtgcgatttaaactttttttgctttctccctttttttggttgtgcgctttcttttacaacaagcctctagaaacagatagtttctgagaattactgagctatgtttgtaatgcagatgtacttagggagtatgtaaaataatcattttaacaaaagaaatagatatttaaaatttaatactaactatgggaaaagggtccattgtgtaaaacatagtttatctttggattcaatgtttgtctttggttttacaaagtagcttgtattttcagtattttctacataatatggtaaaatgtagagcaattgcaatgcatcaataaaatgggtaaattttctga

SEQ ID NO: 93 - protein, 836 aa, Homo sapiens
MWSLGCVIAELFLGWPLYPGASEYDQIRYISQTQGLPAEYLLSAGTKTTRFFNRDPNLGYPLWRLKTPEEHELETGIKSKEARKYIFNCLDDMAQVNMSTDLEGTDMLAEKADRREYIDLLKKMLTIDADKRITPLKTLNHQFVTMTHLLDFPHSNHVKSCFQNMEICKRRVHMYDTVSQIKSPFTTHVAPNTSTNLTMSFSNQLNTVHNQASVLASSSTAAAATLSLANSDVSLLNYQSALYPSSAAPVPGVAQQGVSLQPGTTQICTQTDPFQQTFIVCPPAFQTGLQATTKHSGFPVRMDNAVPIVPQAPAAQPLQIQSGVLTQGSCTPLMVATLHPQVATITPQYAVPFTLSCAAGRPALVEQTAAVLQAWPGGTQQILLPSTWQQLPGVALHNSVQPTAMIPEAMGSGQQLADWRNAHSHGNQYSTIMQQPSLLTNHVTLATAQPLNVGVAHVVRQQQSSSLPSKKNKQSAPVSSKSSLDVLPSQVYSLVGSSPLRTTSSYNSLVPVQDQHQPIIIPDTPSPPVSVITIRSDTDEEEDNKYKPSSSGLKPRSNVISYVTVNDSPDSDSSLSSPYSTDTLSALRGNSGSVLEGPGRVVADGTGTRTIIVPPLKTQLGDCTVATQASGLLSNKTKPVASVSGQSSGCCITPTGYRAQRGGTSAAQPLNLSQNQQSSAAPTSQERSSNPAPRRQQAFVAPLSQAPYTFQHGSPLHSTGHPHLAPAPAHLPSQAHLYTYAAPTSAAALGSTSSIAHLFSPQGSSRHAAAYTTHPSTLVHQVPVSVGPSLLTSASVAPAQYQHQFATQSYIGSSRGSTIYTGYPLSPTKISQYSYL

SEQ ID NO: 94 - DNA, 1852 bp, Homo sapiens
caggagagaaggcaccgcccccaccccgcctccaaagctaaccctcgggcttgaggggaagaggctgactgtacgttccttctactctggcaccactctccaggctgccatggggcccagcacccctctcctcatcttgttccttttgtcatggtcgggacccctccaaggacagcagcaccaccttgtggagtacatggaacgccgactagctgctttagaggaacggctggcccagtgccaggaccagagtagtcggcatgctgctgagctgcgggacttcaagaacaagatgctgccactgctggaggtggcagagaaggagcgggaggcactcagaactgaggccgacaccatctccgggagagtggatcgtctggagcgggaggtagactatctggagacccagaacccagctctgccctgtgtagagtttgatgagaaggtgactggaggccctgggaccaaaggcaagggaagaaggaatgagaagtacgatatggtgacagactgtggctacacaatctctcaagtgagatcaatgaagattctgaagcgatttggtggcccagctggtctatggaccaaggatccactggggcaaacagagaagatctacgtgttagatgggacacagaatgacacagcctttgtcttcccaaggctgcgtgacttcacccttgccatggctgcccggaaagcttcccgagtccgggtgcccttcccctgggtaggcacagggcagctggtatatggtggctttctttattttgctcggaggcctcctggaagacctggtggaggtggtgagatggagaacactttgcagctaatcaaattccacctggcaaaccgaacagtggtggacagctcagtattcccagcagaggggctgatccccccctacggcttgacagcagacacctacatcgacctggcagctgatgaggaaggtctttgggctgtctatgccacccgggaggatgacaggcacttgtgtctggccaagttagatccacagacactggacacagagcagcagtgggacacaccatgtcccagagagaatgctgaggctgcctttgtcatctgtgggaccctctatgtcgtctataacacccgtcctgccagtcgggcccgcatccagtgctcctttgatgccagcggcaccctgacccctgaacgggcagcactcccttattttccccgcagatatggtgcccatgccagcctccgctataacccccgagaacgccagctctatgcctgggatgatggctaccagattgtctataagctggagatgaggaagaaagaggaggaggtttgaggagctagccttgttttttgcatctttctcactcccatacatttatattatatccccactaaatttcttgttcctcattcttcaaatgtgggccagttgtggctcaaatcctctatatttttagccaatggcaatcaaattctttcagctcctttgtttcatacggaactccagatcctgagtaatccttttagagcccgaagagtcaaaaccctcaatgttccctcctgctctcctgccccatgtcaacaaatttcaggctaaggatgccccagacccagggctctaaccttgtatgcgggcaggcccagggagcaggcagcagtgttcttcccctcagagtgacttggggagggagaaataggaggagacgtccagctctgtcctctcttcctcactcctcccttcagtgtcctgaggaacaggactttctccacattgttttgtattgcaacattttgcattaaaaggaaaatccactgctaaaaaaaaaaaaaaaaaaaaaaaaaaaaaaaaaaaaaa

SEQ ID NO: 95 - protein, 406 aa, Homo sapiens
MGPSTPLLILFLLSWSGPLQGQQHHLVEYMERRLAALEERLAQCQDQSSRHAAELRDFKNKMLPLLEVAEKEREALRTEADTISGRVDRLEREVDYLETQNPALPCVEFDEKVTGGPGTKGKGRRNEKYDMVTDCGYTISQVRSMKILKRFGGPAGLWTKDPLGQTEKIYVLDGTQNDTAFVFPRLRDFTLAMAARKASRVRVPFPWVGTGQLVYGGFLYFARRPPGRPGGGGEMENTLQLIKFHLANRTVVDSSVFPAEGLIPPYGLTADTYIDLAADEEGLWAVYATREDDRHLCLAKLDPQTLDTEQQWDTPCPRENAEAAFVICGTLYVVYNTRPASRARIQCSFDASGTLTPERAALPYFPRRYGAHASLRYNPRERQLYAWDDGYQIVYKLEMRKKEEEV

SEQ ID NO: 96 - DNA, 6160 bp, Homo sapiens
ctcgcgaggagagcggagcaggcgcgcggcccaggcggaggagcgccgactctggagcagccggagctggaagaggaggaggaggagaggcggcggggaaggaggaggagggggagagtcgctcccgccgggcgagcatggggcgcctggcctcgaggccgctgctgctggcgctcctgtcgttggctctttgccgagggcgtgtggtgagagtccccacagcgaccctggttcgagtggtgggcactgagctggtcatcccctgcaacgtcagtgactatgatggccccagcgagcaaaactttgactggagcttctcatctttggggagcagctttgtggagcttgcaagcacctgggaggtggggttcccagcccagctgtaccaggagcggctgcagaggggcgagatcctgttaaggcggactgccaacgacgccgtggagctccacataaagaacgtccagccttcagaccaaggccactacaaatgttcaacccccagcacagatgccactgtccagggaaactatgaggacacagtgcaggttaaagtgctggccgactccctgcacgtgggccccagcgcgcggcccccgccgagcctgagcctgcgggagggggagcccttcgagctgcgctgcactgccgcctccgcctcgccgctgcacacgcacctggcgctgctgtgggaggtgcaccgcggcccggccaggcggagcgtcctcgccctgacccacgagggcaggttccacccgggcctggggtacgagcagcgctaccacagtggggacgtgcgcctcgacaccgtgggcagcgacgcctaccgcctctcagtgtcccgggctctgtctgccgaccagggctcctacaggtgtatcgtcagcgagtggatcgccgagcagggcaactggcaggaaatccaagaaaaggccgtggaagttgccaccgtggtgatccagccatcagttctgcgagcagctgtgcccaagaatgtgtctgtggctgaaggaaaggaactggacctgacctgtaacatcacaacagaccgagccgatgacgtccggcccgaggtgacgtggtccttcagcaggatgcctgacagcaccctacctggctcccgcgtgttggcgcggcttgaccgtgattccctggtgcacagctcgcctcatgttgctttgagtcatgtggatgcacgctcctaccatttactggttcgggatgttagcaaagaaaactctggctactattactgccacgtgtccctgtgggcacccggacacaacaggagctggcacaaagtggcagaggccgtgtcttccccagctggtgtgggtgtgacctggctagaaccagactaccaggtgtacctgaatgcttccaaggtccccgggtttgcggatgaccccacagagctggcatgccgggtggtggacacgaagagtggggaggcgaatgtccgattcacggtttcgtggtactacaggatgaaccggcgcagcgacaatgtggtgaccagcgagctgcttgcagtcatggacggggactggacgctaaaatatggagagaggagcaagcagcgggcccaggatggagactttattttttctaaggaacatacagacacgttcaatttccggatccaaaggactacagaggaagacagaggcaattattactgtgttgtgtctgcctggaccaaacagcggaacaacagctgggtgaaaagcaaggatgtcttctccaagcctgttaacatattttgggcattagaagattccgtgcttgtggtgaaggcgaggcagccaaagcctttctttgctgccggaaatacatttgagatgacttgcaaagtatcttccaagaatattaagtcgccacgctactctgttctcatcatggctgagaagcctgtcggcgacctctccagtcccaatgaaacgaagtacatcatctctctggaccaggattctgtggtgaagctggagaattggacagatgcatcacgggtggatggcgttgttttagaaaaagtgcaggaggatgagttccgctatcgaatgtaccagactcaggtctcagacgcagggctgtaccgctgcatggtgacagcctggtctcctgtcaggggcagcctttggcgagaagcagcaaccagtctctccaatcctattgagatagacttccaaacctcaggtcctatatttaatgcttctgtgcattcagacacaccatcagtaattcggggagatctgatcaaattgttctgtatcatcactgtcgagggagcagcactggatccagatgacatggcctttgatgtgtcctggtttgcggtgcactcttttggcctggacaaggctcctgtgctcctgtcttccctggatcggaagggcatcgtgaccacctcccggagggactggaagagcgacctcagcctggagcgcgtgagtgtgctggaattcttgctgcaagtgcatggctccgaggaccaggactttggcaactactactgttccgtgactccatgggtgaagtcaccaacaggttcctggcagaaggaggcagagatccactccaagcccgtttttataactgtgaagatggatgtgctgaacgccttcaagtatcccttgctgatcggcgtcggtctgtccacggtcatcgggctcctgtcctgtctcatcgggtactgcagctcccactggtgttgtaagaaggaggttcaggagacacggcgcgagcgccgcaggctcatgtcgatggagatggactaggctggcccgggaggggagtgacagagggacgttctaggagcaattggggcaagaagaggacagtgatattttaaaacaaagtgtgttacactaaaaaccagtcctctctaatctcaggtgggacttggcgctctctcttttctgcatgtcaagttctgagcgcggacatgtttaccagcacacggctcttcttcccacggcactttctgatgtaacaatcgagtgtgtgttttcccaactgcagctttttaatggttaaccttcatctaattttttttctcccactggtttatagatcctctgacttgtgtgtgtttatagcttttgtttcgcggggttgtggtgaggaaggggtgatggcatgcggagttctttatcttcagtgagaatgtgcctgcccgcctgagagccagcttccgcgttggaggcacgtgttcagagagctgctgagcgccaccctctacccggctgacagacaacacagacctgtgccgaaggctaatttgtggcttttacgaccctaccccaccccctgttttcaggggtttagactacatttgaaatccaaacttggagtatataacttcttattgagcccaactgctttttttttttttttttttgcttctctgccccttttccatttcttttgtatttgttttctgtgagagcactgaaatggcagccctggaatctacaatttggctctccactgagcaccttatcttgccaccttagccttaagaatgaatatgaagaaaaatacacagccacctctgtccagggcagtaagaagggctgcaaggaaggggaggatggggacaaggaaaggatcagatacctgctccagtagttgtgaggccactgtgtctcaggggactccaggaggagcagaagagggatcccacgaagttattcttacgcagctggggccaggagggtcagagtggtgccaggtgcaagttaggctaaagaagccaccactattcctctctcttgcccattgtggggggcaaaggcattggtcaccaagagtcttgcagggggacccacagatatgccatgtccttcacacgtgcttgggctccttaacctgaaggcaaattgctacttgcaagactgactgacttcaaggaatcagaaattacctagaagcaccatgttttttctatgaccttttcagtccttcaggtcattttaaggtccactgcagggggttagtgagaaagggtatactttgtggtatgttttgctttcctaatagggacatgaaggaaacccagcaatttgctgttatgtgaatggcctgtagagcagagtcaagagcggtgtgctttgcccgactgctcccatcaggaataggagagtagacagagatcttccacatcccaggcttctgctgctgctttaaaagctctgtccttggagcctcccgctccctgaagtgtctcgccccctgcacagcactggcctttcggaagcatcccagtagggttttctgaggctcgctggtgactcatgccctaattgcaatcctctgcttttatcttgactttgaaggatctaacactgctctctcttccaaaggggaaaaaaagattcatttgttttgagcaataaactaatacaaaatgatggccattcatgtgcagctctttgtcaccatgggccggatgagttgtgctcctcctggctcaccatttccccctgctcccccacagccggttctgcacttatcaccgagtcgcccctggaagcagattcccattgagttttccccaccaaggggaccatgcacatggtagaaacattagattctgcattgacagtagcctttccttggcccgggcctgtggtgggaagacgggcaacaagtataccccaccagggcctgagtgactagaggaagaggacgaggccttgttggcactagatttgggtattttctgcatgtcataacatatcctaactgctatttcagaagaggcagcttgtaggtgattgtacaagtgagaattaaagagagaacagatatttaaacaggtgctgtattagtaacagccagtgccctttcagcccttgcatctattaaaaggagattcaggattttattggcacaggcccttcttagtaggaagaaagggtgcttagctttggacctgaccgggtgtgtgtaaaaccatggactgagtcacagcagacactcgatggtggtaaatgtgatgggtgcttacacactgtaccttttcctttcatactgatgctgcagttcagggctggagttgttaaggcattgacctccacccacctgccccatgtccactgggctgcccaagctgcatgtcacctgagggctggcaggaaggggcgagaaatcccagggcattgtaccaaggacctagttccttctagggatataaatttccaggaatgtgtatttttaatgtggtgagatgcactcttttgttgtaccaaatagggctccccaccccacccctgcgacaagtgctcttctagaacaggttcctaccagcagcactggtgtgaatgaaagagagacccagccgcgtctcacacaggtggaattgcacttcttaacaaaaaggaactttataaaagtttgggattttttttcctaatcataaaaatagccccagaaagagcctaagctatgttcagatagaagcctcgaaattcctgtaaattgtttactttatgatgtttacatacacgtttcactttgaaaaaaaatgcaaatcgactttttaacaactgttgagatgtttcatgggacagtagaactctgactcaccaactgggctaaattttaatttaaaaatgtatttatttgagtgtctttccccccctcaccctcaccatctgaggggctccctgagatcttggtagaggaggcccctcctgcccagaccttcgtttgtttccccggtggcccttgcttcttgctttgcagactgcctgcagccatgattttgtcactgacatctgtgagccaaagactgagcctttttggcaggaataataagcaatactacacaacttgctactttcagaaaacttttttttagcttcaccgatgacaacagaggaagaagggaactgggatttgggtaagttctcctccactgtttgaccaaattctcagtgataaatatgtgtgcagatccctagaagagaaaacgctgactttctttttaagtgtggcacataaggatctgcagaattttccgtagacaaagaaaggatcttgtgtatttttgtccatatccaatgttatatgaactaattgtattgttttatactgtgaccacaaatattatgcaatgcaccatttgttttttatttcattaaaggaagtttaattt

SEQ ID NO: 97 - protein, 879 aa, Homo sapiens
MGRLASRPLLLALLSLALCRGRVVRVPTATLVRVVGTELVIPCNVSDYDGPSEQNFDWSFSSLGSSFVELASTWEVGFPAQLYQERLQRGEILLRRTANDAVELHIKNVQPSDQGHYKCSTPSTDATVQGNYEDTVQVKVLADSLHVGPSARPPPSLSLREGEPFELRCTAASASPLHTHLALLWEVHRGPARRSVLALTHEGRFHPGLGYEQRYHSGDVRLDTVGSDAYRLSVSRALSADQGSYRCIVSEWIAEQGNWQEIQEKAVEVATVVIQPSVLRAAVPKNVSVAEGKELDLTCNITTDRADDVRPEVTWSFSRMPDSTLPGSRVLARLDRDSLVHSSPHVALSHVDARSYHLLVRDVSKENSGYYYCHVSLWAPGHNRSWHKVAEAVSSPAGVGVTWLEPDYQVYLNASKVPGFADDPTELACRVVDTKSGEANVRFTVSWYYRMNRRSDNVVTSELLAVMDGDWTLKYGERSKQRAQDGDFIFSKEHTDTFNFRIQRTTEEDRGNYYCVVSAWTKQRNNSWVKSKDVFSKPVNIFWALEDSVLVVKARQPKPFFAAGNTFEMTCKVSSKNIKSPRYSVLIMAEKPVGDLSSPNETKYIISLDQDSVVKLENWTDASRVDGVVLEKVQEDEFRYRMYQTQVSDAGLYRCMVTAWSPVRGSLWREAATSLSNPIEIDFQTSGPIFNASVHSDTPSVIRGDLIKLFCIITVEGAALDPDDMAFDVSWFAVHSFGLDKAPVLLSSLDRKGIVTTSRRDWKSDLSLERVSVLEFLLQVHGSEDQDFGNYYCSVTPWVKSPTGSWQKEAEIHSKPVFITVKMDVLNAFKYPLLIGVGLSTVIGLLSCLIGYCSSHWCCKKEVQETRRERRRLMSMEMD

SEQ ID NO: 98 - DNA, 2605 bp, Homo sapiens
gtgagtcaccaaggaaggcagcggcagctccactcagccagtacccagatacgctgggaaccttccccagccatggcttccctggggcagatcctcttctggagcataattagcatcatcattattctggctggagcaattgcactcatcattggctttggtatttcagggagacactccatcacagtcactactgtcgcctcagctgggaacattggggaggatggaatcctgagctgcacttttgaacctgacatcaaactttctgatatcgtgatacaatggctgaaggaaggtgttttaggcttggtccatgagttcaaagaaggcaaagatgagctgtcggagcaggatgaaatgttcagaggccggacagcagtgtttgctgatcaagtgatagttggcaatgcctctttgcggctgaaaaacgtgcaactcacagatgctggcacctacaaatgttatatcatcacttctaaaggcaaggggaatgctaaccttgagtataaaactggagccttcagcatgccggaagtgaatgtggactataatgccagctcagagaccttgcggtgtgaggctccccgatggttcccccagcccacagtggtctgggcatcccaagttgaccagggagccaacttctcggaagtctccaataccagctttgagctgaactctgagaatgtgaccatgaaggttgtgtctgtgctctacaatgttacgatcaacaacacatactcctgtatgattgaaaatgacattgccaaagcaacaggggatatcaaagtgacagaatcggagatcaaaaggcggagtcacctacagctgctaaactcaaaggcttctctgtgtgtctcttctttctttgccatcagctgggcacttctgcctctcagcccttacctgatgctaaaataatgtgcctcggccacaaaaaagcatgcaaagtcattgttacaacagggatctacagaactatttcaccaccagatatgacctagttttatatttctgggaggaaatgaattcatatctagaagtctggagtgagcaaacaagagcaagaaacaaaaagaagccaaaagcagaaggctccaatatgaacaagataaatctatcttcaaagacatattagaagttgggaaaataattcatgtgaactagacaagtgtgttaagagtgataagtaaaatgcacgtggagacaagtgcatccccagatctcagggacctccccctgcctgtcacctggggagtgagaggacaggatagtgcatgttctttgtctctgaatttttagttatatgtgctgtaatgttgctctgaggaagcccctggaaagtctatcccaacatatccacatcttatattccacaaattaagctgtagtatgtaccctaagacgctgctaattgactgccacttcgcaactcaggggcggctgcattttagtaatgggtcaaatgattcactttttatgatgcttccaaaggtgccttggcttctcttcccaactgacaaatgccaaagttgagaaaaatgatcataattttagcataaacagagcagtcggcgacaccgattttataaataaactgagcaccttctttttaaacaaacaaatgcgggtttatttctcagatgatgttcatccgtgaatggtccagggaaggacctttcaccttgtctatatggcattatgtcatcacaagctctgaggcttctcctttccatcctgcgtggacagctaagacctcagttttcaatagcatctagagcagtgggactcagctggggtgatttcgccccccatctccgggggaatgtctgaagacaattttggttacctcaatgagggagtggaggaggatacagtgctactaccaactagtggatagaggccagggatgctgctcaacctcctaccatgtacaggacgtctccccattacaactacccaatccgaagtgtcaactgtgtcagggctaagaaaccctggttttgagtagaaaagggcctggaaagaggggagccaacaaatctgtctgcttcctcacattagtcattggcaaataagcattctgtctctttggctgctgcctcagcacagagagccagaactctatcgggcaccaggataacatctctcagtgaacagagttgacaaggcctatgggaaatgcctgatgggattatcttcagcttgttgagcttctaagtttctttcccttcattctaccctgcaagccaagttctgtaagagaaatgcctgagttctagctcaggttttcttactctgaatttagatctccagaccctgcctggccacaattcaaattaaggcaacaaacatataccttccatgaagcacacacagacttttgaaagcaaggacaatgactgcttgaattgaggccttgaggaatgaagctttgaaggaaaagaatactttgtttccagcccccttcccacactcttcatgtgttaaccactgccttcctggaccttggagccacggtgactgtattacatgttgttatagaaaactgattttagagttctgatcgttcaagagaatgattaaatatacatttcctacacca

SEQ ID NO: 99 - protein, 282 aa, Homo sapiens
MASLGQILFWSIISIIIILAGAIALIIGFGISGRHSITVTTVASAGNIGEDGILSCTFEPDIKLSDIVIQWLKEGVLGLVHEFKEGKDELSEQDEMFRGRTAVFADQVIVGNASLRLKNVQLTDAGTYKCYIITSKGKGNANLEYKTGAFSMPEVNVDYNASSETLRCEAPRWFPQPTVVWASQVDQGANFSEVSNTSFELNSENVTMKVVSVLYNVTINNTYSCMIENDIAKATGDIKVTESEIKRRSHLQLLNSKASLCVSSFFAISWALLPLSPYLMLK

SEQ ID NO: 100 - DNA, 5388 bp, Homo sapiens
gcaacagcggcggcggccgcggcggctggccggactcaggtgtttcggacgctattgcccttcgcgccagccgtcgagtgggcagcagcgggactcagccgggcgccaggttcctgccaggcagcgccgggaagcgcgggcggccgagaactccttcctgctacttcgcccagcgccgctgcttcggcttcccagcgaagtgggagaccttcctccctgtttgcagacgtccgtgggagacccttattttttccaccgctaaggttaagagattctggaatagaagcgtcgaaggagatcaagtgaaccttctacaactcctcggatgtcgccagtctccctttcggggcggaagactacgtttgagcatctcactgaggtgcaggaatggaagaacccaccttgcagcttttctgcagtgtggcttgcctgatctacccctaggaatgaagaggaggcttgtaataatccgatgaagtacagatgttgaagaggatatcgcaggacctaaacttgtgatcgtttgggggaggtcacacacgtttctgagtgggaatggatgggcgtgaatgacgtgccctcttaaaaagcacaacagtcctttaagaggagcaaaattgagttttcccattttggccaagattttgaagacagttcaatgtattctacatttgacataagatgagaactttctaaagtattctctccaagagcgtaaacgatgactaccccagccctgctgcccctctctggacgtaggataccacctctgaacctggggccgccttccttcccacatcacagggctaccttgagactttctgagaagtttattcttctccttattcttagtgccttcatcactctgtgttttggggcattctttttccttccagactcttcaaaacacaaacgctttgatttgggtttagaagatgtgttaattccacatgtagatgccggtaaaggggctaaaaaccccggagtcttcctgatccatggacccgatgaacatagacacagggaagaggaagaacgtctgagaaataaaattcgagctgatcatgagaaggccttggaagaagcaaaagaaaaattaagaaagtcaagagaggaaattcgagcagaaattcagacagagaaaaataaggtagtccaagaaatgaagataaaagagaacaagccactgccaccagtccctattcccaaccttgtaggaatacgtggtggagacccagaagataatgacataagagagaaaagggaaaaaattaaagagatgatgaaacatgcttgggataactataggacatatgggtggggacataatgaactcagacctattgcaaggaaaggacactcccctaacatatttggaagttcacaaatgggtgctaccatagtagatgctttggataccctttatatcatgggacttcatgatgaattcctagatgggcaaagatggattgaagacaaccttgatttcagtgtgaattcagaggtgtctgtgtttgaagtcaacattcgatttattggaggcctacttgcagcatattacctatcaggagaggagatattcaagattaaagcagtgcaattggctgagaaactccttcctgcctttaacacacctactgggattccttgggcaatggtgaatttgaaaagtggagtagggcgaaactggggctgggcatctgcaggtagcagcattctggctgaatttggtacactacatatggagttcatccacctcagctacttgacaggggacctgacttactacaaaaaggttatgcacattcggaaactacttcagaaaatggatcgtccaaatggtctttatccaaattatttgaaccccagaacagggcgctggggtcagtatcatacatctgtcggtggcctgggagacagtttttatgaatacttactgaaagcatggttgatgtcagataaaacagaccatgaggcaagaaagatgtatgatgatgctattgaggctatagaaaaacatcttattaagaagtctcgtggaggtcttacctttattggagaatggaagaatgggcacttggaaaaaaagatggggcatttggcctgctttgctgggggaatgtttgcactaggagcagatggttccagagcagataaagctggtcattatttagagctaggggcagaaattgcacgtacttgtcatgagtcatatgacagaactgcattaaagctaggtcctgaatcattcaagtttgatggtgcagtggaggctgtggctgtccggcaggctgaaaagtattatatcctccgtccagaagtaattgaaacctattggtacctatggcgattcactcacgatccaagatacaggcagtggggctgggaagcagcactggccattgaaaagtattgccgagttaatggtgggttttctggagtcaaagatgtatattcctctactcctacacatgatgatgtacagcagagcttttttcttgctgaaacattaaaatatttgtatctgctgttctccggtgatgaccttttacctttagaccactgggtgtttaatacagaggctcaccctctgcctgtgttacatttagccaacaccacactttcaggtaatcctgctgttcgatgaaagcagttccagaaggaccattctcacctgtgttttgtttacatggaccactacagaaattagtttgaaggggcggcttttgaaaacctggacctctatgtcaacatgacagggtgaaactattccccctaagactgttcaacttgtagatacatcaactttgaaattattccattttatacctgaccaaaacatgttctgatatgtgtaggacagagacctggatgtgctttgatcgttaatgaggtggtcacatgagaaatgatacctgttactactgtattgtttttagagtcctgaagtctggaggctagacttcctgaaagcaagtcaagaatatagagcaccttgcaggagttcaagatggcctttggaaccaattatgtatttgtttcctcctacagtggagcagcattcaaatcaaatatttacatattgcttatcactttttctccattttaataatggaatgaactaaaataaacaagaacaaaagaatagtataattatatcagtaacaagaagactcaaaaaagaaacaggagtacctatccctatctgaattttcaagttccccattggatgaccagactggcaaccatttcaaatcccagtctatttcattgaaatttcttggttaagtttaattttctctgggggcatgatctcacaaagaatactcaagtctttttcttcttatggaatcatcgaaactgctatttatcataatcaccacttatgagcctgggtttgggattttgtgcatgtagttcagtctagtgttggtagcatgacagaaagtggggaaaatgccgcagtttgttgccttgaaacctaagagcaatccttggttttgttgctacattatttttccagaccaacacatctaccaagtaaattttattcactttaatttcataataaagttagtagagtcactcaacttacaactttatttatgtggcttggcaaaaatcactataaggcagctctaaatttgccttgataagctaaataaattacttttataacttactaaagcagaacaaacagtgaaactttctaaaatattctatctggaatagggacaggggatcttttatttataatctcatcagatgagtgagttgttcacagatattttatgtttttttaattttctccaagaatatttatagaattccaaagaatcagaatagtttcaaaataattttcagtgataaaagagtgttgtaattaatcatattacactaaaattgggatacatctaaggaactttatcttactatcagtaggttttgcattgatatttctttttaaataaactactagttctttatattttgacaaaaagaacttaaattttatcaggaactgtaagataaatatctagtgcttataaattttctgtccttaaatttatgtgacagtgcaagatacttttgctcttttcatttaatataggcatcttccattgacattaataaaacttagaaacagtataattagtataacatttactctgaatttgaagatttcctgaaacaaagtttgtacaagaagcccaccttggaattctgaaggcttattttcttgtttgataagcttttcttttaaacttaggttttaagttggggaaagacttaattaactaatatagtattttctaaggttgatcatcttataccacgaatcgttaattttgacagttctactgatccgtaaatgataaccactgcaaattttttcagtataaaatttttcactgcaaaaaaatttcagtagaaaataaggatgcagggccagttacaatagtccttaagagagttaaattatagcacatgttttgacattgtaatatcttttactacttgaacatttaaatttctaaatgagaaaggtatatatattactgtaactgtagaagggaaaagggaaagtatttggttctaaaaaatgttagccttcctcgtaaaagtagcacaagcccacttatgaatcactgagaaaaagtgaaaaacttgagttggcaaagatgcagagcagcagtgcagatggcaatgaactctctgaattctcttttaccttatttagaagaatgcagagtaaagggaccttcttggttctgcaggaacttctcaagggatgaggagacagaacccctacttccaagtgctctatttgtattacccagatgactgaagcttaagagaaggcagggaagtatacaagcagagccagttctggtacaaacaaagaatttgacagggacaatggaagggtcttcttcaccactccttaccttctatgtgatggaaagactagagcttataaaagtacttccatttttttattctcctgaataccaaaggcaattaaagtcagctacaaatgacttgccagtgtcatgttttatttttgttatagatttttaaattatttccttcaagatcaattcttatcccatataatgcttagcttccaagaatattctttactttcttctgtcttttacagctctttgcattttgtagaccttaatactcaggttaaatattcattgcatttataagatcttctgcaaaaagcccagaaatggtccttttcaggtgcctcttcaaagagctgacaccttaccttgtgcctttggcacaaatgtgcagaatagatacatcagttggtgcataatcgaaaaaaataggaattttgaacactgttcttccttctacatttatttctct

SEQ ID NO: 101 - protein, 641 aa, Homo sapiens
MTTPALLPLSGRRIPPLNLGPPSFPHHRATLRLSEKFILLLILSAFITLCFGAFFFLPDSSKHKRFDLGLEDVLIPHVDAGKGAKNPGVFLIHGPDEHRHREEEERLRNKIRADHEKALEEAKEKLRKSREEIRAEIQTEKNKVVQEMKIKENKPLPPVPIPNLVGIRGGDPEDNDIREKREKIKEMMKHAWDNYRTYGWGHNELRPIARKGHSPNIFGSSQMGATIVDALDTLYIMGLHDEFLDGQRWIEDNLDFSVNSEVSVFEVNIRFIGGLLAAYYLSGEEIFKIKAVQLAEKLLPAFNTPTGIPWAMVNLKSGVGRNWGWASAGSSILAEFGTLHMEFIHLSYLTGDLTYYKKVMHIRKLLQKMDRPNGLYPNYLNPRTGRWGQYHTSVGGLGDSFYEYLLKAWLMSDKTDHEARKMYDDAIEAIEKHLIKKSRGGLTFIGEWKNGHLEKKMGHLACFAGGMFALGADGSRADKAGHYLELGAEIARTCHESYDRTALKLGPESFKFDGAVEAVAVRQAEKYYILRPEVIETYWYLWRFTHDPRYRQWGWEAALAIEKYCRVNGGFSGVKDVYSSTPTHDDVQQSFFLAETLKYLYLLFSGDDLLPLDHWVFNTEAHPLPVLHLANTTLSGNPAVR

SEQ ID NO: 102 - DNA, 510 bp, Homo sapiens
atggtgacgaatttcaagtggttgtggcagtatcgctttcccgccctttacattacagctgaacgtggccacttggcagaagcagctggccacctggtgtttgttggttctgtccatctgctgcctgcacagacagtcaagcatgatggttatggatgctcaggagatcctgctcttcagcaacatcaagctgtggaagcttcctgtgggatcaatccaggttgtattagaggaactgaggaagaatgggaacttacagtggctggataagagcaagtctagtttcctaatcatgtggcggaggccagaagaatggggaaaactcatctatcagtgggtctccaggagtggccagaacaactccgtacttagcctgtatgagctgaccaatggggaagacatagagaatgaggtgttccacggactaaaggaggccttctgtgggctctgcaggcccttcagtaggaacataaggctgagatcatcaccatctcactcggagaccagtga

SEQ ID NO: 103 - DNA, 969 bp, Homo sapiens
atgttgacagctctaatcactaagttttatgtgagggtgaagttgagggcctgagtcaacggatttggctgtattgggtgtctggtcaccagggctacttttaactctggtaaagtggatattatcgccatcgatgaccccttcatttagctcaactacaaggcctacatgttccagtatgattccacccatggcgaattccatggcactgtcaaggctgagaatgggaagcttgtcattaatggaaagctagatcctaccaaaatcaaatagggcgatactggcactgagtacattgtggagtccatcagtgtcttcactaccatggagaaggttggggcttgctttcagaggggagccaaaagggccatcatctctgccccagctgctaacgtccccaggtttctgatggatgtgagccatgagaagtatgacaacaggttcaagatcatcagcaatgactcctgtaccaccaactgtttagcacccctgtccaaggtcatccatgacaattttggtatcgtggaaggactcgtgatcatggtgcacaccatcactgccagccagaagactttggatagcccctctgggaagctgtggcatgacgatcacaggtctctccagaatatcatccccgcatctactggtgctgccaaggctgtgggtgaggtcatccttgcccaaatgcaaggaccctataaatccccaatggaataaatcctctggaagcactttcctttcttatggcactctgcacatttactgtgcacagcacctaacatgtctcatatttcatctcccccactggaccactaaactgggagcagaaatggaaaattggaagtattagtcctgggtccagcctgcagacttgttttgttagtttgcatgcttttccccccacaaagtttaatttatttaaaaaattataacctatgataaacatacagaaaatttgagaaaatggta

SEQ ID NO: 104 - DNA, 1394 bp, Homo sapiens
atgacaggctggagctgccttgtgacaggagcaggagggtttctgggtcagaggatcatctgcctgttagtggaggagacagagctgaaggagatcagggccttggacaggccttcagaccaggattgagggaggaattttctaaactccagaacaagatcaagctgacagtgctggaaggagacattctggatgagccattcctgaagagagcctgccaggacgtgtcggtcgtcatccacaccgcctgtatcattgatgtcttcggagtcactcacagacagtctatcatgaatgtcaatgtgaaagcatgctctttctgggcgggtacccagctcctgttggaggcctgtgtccaagctactgtgccagtcttcatctacaccagtaccctccagttagccgggcccaactcctacaaggaaatcattgagaatgcccatgaagaagactttctggaaaacacatggtctgctccatatccatacagcaaaaagcttgctgagaaggctgtgctggcagctaatgggtggactctgaaaaatggtgataccttgtacacttgtgccttaagacccatgtatatctatggggaaggaagcccatttcttactgccaatataaatgaggccctgaacaacaatgggatcctgtcgagtgtcagcaagttctccacagccaacccagtctatgttggcaacgtggcctgggcccacattctggccttgagggccttgcgggaccccaagaaggccccaagtgtcctaggacagttctactatatctcagatgacacgcctcaccaaagttatgataaccttaattacatcctgagcaaagagttcggcccctgccttgattccagatgaagccttcttttattcctgatgtactggattggcttcctgctgggaatagtgagcctcctgctcaggccagtttgcacctatcaaccgcccttcgactgccacacagtgacattgtcaaatagcatgttcaccttctcttacaagaaggctcagcgagatctggcatataagccactttacagctgggaggaagccaagcagaaaaccatggagtgagttggttcccttgtggaccggcacaaggagaacctgaagtccaagactcagtgctttaaggatgacagagatgtgcatgtgggtattgttaggagatgtcatcaagctccatcctcctggcttcatacagaatgtgacaagggcataagcccaggtcctgctgcctccctttcacacaatgcccaacttattgtcttcctcgtgtcatcaaaacctgcccattccctgacccaaccagaagctttctgtcctaatcatataccagaggacagacaatgtgatttgctttttccaaatctcagtggctga

SEQ ID NO: 105 - DNA, 993 bp, Homo sapiens
atggtgaaaatgaaggcctaagtcaatggatttggctttattgggtgctgggtcaccagggctacttataactctgataaagtgaatattctcaccatcaatcaccccttcatagagctcaactacatggtctacatgttccagtatgagtccacctatgacaaattccatggcaccatcaaggctgagaacaagaagcttgtcatcagtggaaatcccaccaccatcatccaaaagctagatcccaccaaaatcaaatagggtgattctggaactgagtacatcatagagtccactggtgtcttcactaccatggaaaaggctggagatcacttgcaaggttgagctaaaagagtcatcatttctgccccctctgctgatacccccatgtttataatgggtatgaaccatgagaagtatgaaaacagcctcaagaacatcagcaatgcctcctgtaccaccaactgtatagcacctctagccaagatgattcatgacaactttggaatagtggaatgacccatgaccacagtcagcgctatcgctgctacccagaagactgtgaatgccccttcgtgaaactggcatcatggccgcagagatctcatctttgcatctactggcgccgtcaaggctgtgggcaatgagatccatgggctgaacgggaagctcactggcatggccttccatgtacccaccaccaatatgttggtcatggacctaacctgccatctggaaaaacctgccaaatataacatcaagaaggtggtgaagcagacatcagaggatcccctcaagggcatcctgtgctacactgagcactaggttgtctacttcagcttaaccattgacacccactcttccacctttgatcctggggctgtcattgccctcagtgaccactttctcaagctcattttctggtatgacaatgaatttggttatagcaacaaagtggtgaacctcatggcccacacggcctccaaggagtaa

SEQ ID NO: 106 - DNA, 1117 bp, Homo sapiens
ttggccatgatgggctggagctgccttgtgacaggagcaggagggtttccgggtcagaggattgtcaacctcttggtgaaggagaaggagctaaaggagatcagggccttggacaaggccttcagatcaggattgagggagaaattttctaagctccagaacaagaccaagatgacagtgctagaaggagacattctggatcagtcatgcctgaagagagcctgccaggacatctcggtagtcatccacaccgcctctatcattgacatcttcggtgtcactcacagagagtctatcatgaacttcaacgtgaaaggtacccaacagctgttggaggcctgtgtccaagctagtgtgctagtcttcatccataccagcagcatacaggtagcctggcccaactcctacaaagagattttccagaatcgacacaaacaagagcatctggaaaacacatggtctgctccatatccatacagcaaaaacttgctgagaaggctgtgctggtggctaatgtgtggactctgaaaaatgctggcatgttgtacacttgtgccttaagctcaatgcatatctatggggaaggaagcccatttcttactgacaatataaataaggccttgaaaaacaatgcgatcctgtcaactgttggaaagttctccacaaccaacccagtctatgtgggctgggcccacattctggccttgaggccctgtggggccccaagaaggtcccaagtgtctgaggacagttctactacatctcagatgacacgcctcaccaaagctatgataaccttaattacgccctgagcaaagagttcggcctctgccttgattccagatggaggcttcctttagccctgaggtactgaattggcttcctgctggaaatagtgagcttcctgctcaggtcaatttatacctattgacctcccttcaactgccacacagtgacattgtccaacagcatggtcaccttctcttacaagaaggctcagcgagatctggcgtataagccaatttacagctgggaggaagcccagcagaaaaccatggagtgggttggttcccttgtggactggaacaaggagaccctaaagtccaagactcagtga

SEQ ID NO: 107 - DNA, 1006 bp, Homo sapiens
atggtgaaggtgaagcctggagtcaatggatttggccatatttaggctcctggtcacaagggctgctctgaactctggtaaagtggatattgtggccatcaatgaccccttcattgaccttaacttcatgccctacatgttccagtataattccacccatggcaaattccatggcactcccaaggctgagaacgggaagcttgtcatcaatggaaattccatcaccatcttctaggagctagatctcaccaaaatcaaatatggtaatgctggcactgagtacaccatggagtccactggtgtcttcaccaccatggagaaggctggggctcactttcaggggtgagccacaagggtcatcatctctgcccccgctgctgacatccccacgtttgtgatgggtgtgaagcatcagaactatgacaacagcctcaagatcatcagcaatacatcctgtatcaccaactgcttagcactcctggccaaggtcatccatgacaactttgttgttatgggaagactcatgaccatagtccatgccatcactgccacccagaaaactgtggatagctccttcaggaaactggcataatggacatggggttctccagaacatcatcactacatctgctgtcactgccaagcctaagggcaaagtcatccctcagctgaacaggaagctcaatggcatggccttccgtgtccccaccactaatgtgttggtcatgaatctgacctgccatcagaaaatacctgccaaatatgatgacatcaagaaggtggtgaagcagaattggaaggctccctcaagggcatcctgggctacaatgagcaccaggttgtctcctccaactttatcagcatcatgcacttttccaccttcgatgctgggactggcattgccctcaatgaccactttatcaagctcatttcctggtatgacaatgaatttgactacaacaacagggtggtgaacctcattgcccacatggccttcaaagaataa

SEQ ID NO: 108 - DNA, 1689 bp, Homo sapiens
aggaaatgaggtgagaagtacgtccactcttctgtccagcttttaacaatctaactaatgccctctccagggtcaccctagaatcagatctgctccccagcatcttctgtttcctggtgagtgattcctgctactttggatggccatgacgggctggagctgccttgtgacaggagcaggagggtttctgggacagaggatcatccgcctcttggtgaaggagaaggagctgaaggagatcagggtcttggacaaggccttcggaccagaattgagagaggaattttctaaactccagaacaagaccaagctgacagtgctggaaggagacattctggatgagccattcctgaagagagcctgccaggacgtctcggtcatcatccacaccgcctgtatcattgatgtcttcggtgtcactcacagagagtctatcatgaatgtcaatgtgaaaggtacccagctcctgttagaggcctgtgtccaagctagtgtgccagtcttcatctacaccagtagcatagaggtagccgggcccaactcctacaaggaaatcatccagaatggccatgaagaagagcctctggaaaacacatggcccgctccatacccacacagcaaaaagcttgctgagaaggctgtactggcggctaacgggtggaatctgaaaaacggcggcaccctgtacacttgtgccttacgacccatgtatatctatggggaaggaagccgattcctttctgctagtataaacgaggccctgaacaacaatgggatcctgtcaagtgttggaaagttctccactgttaacccagtctatgttggcaatgtggcctgggcccacattctggccttgagggccctgcaggaccccaagaaggccccaagcatccgaggacagttctactatatctcagatgacacgcctcaccaaagctatgataaccttaattacaccctgagcaaagagttcggcctccgccttgattccagatggagctttcctttatccctgatgtattggattggcttcctgctggaaatagtgagcttcctactcaggccaatttacacctatcgaccgcccttcaaccgccacatagtcacattgtcaaatagcgtattcaccttctcttataagaaggctcagcgagatctggcgtataagccactctacagctgggaggaagccaagcagaaaacggtggagtgggttggttcccttgtggaccggcacaaggagaccctgaagtccaagactcagtgatttaaggatgacagagatgtgcatgtgggtattgttaggagatgtcatcaagctccaccctcctggcctcatacagaaagtgacaagggcacaagctcaggtcctgctgcctccctttcatacaatggccaacttattgtattcctcatgtcatcaaaacctgcgcagtcattggcccaacaagaaggtttctgtcctaatcatataccagaggaaagaccatgtggtttgctgttaccaaatctcagtagctgattctgaacaatttagggactcttttaacttgagggtcgttttgactactagagctccatttctactcttaaatgagaaaggatttcctttctttttaatcttccattccttcacatagtttgataaaaagatcaataaatgtttgaatgtttaatgtgaaaaaaaaa

SEQ ID NO: 109 - protein, 373 aa, Homo sapiens
MTGWSCLVTGAGGFLGQRIIRLLVKEKELKEIRVLDKAFGPELREEFSKLQNKTKLTVLEGDILDEPFLKRACQDVSVIIHTACIIDVFGVTHRESIMNVNVKGTQLLLEACVQASVPVFIYTSSIEVAGPNSYKEIIQNGHEEEPLENTWPAPYPHSKKLAEKAVLAANGWNLKNGGTLYTCALRPMYIYGEGSRFLSASINEALNNNGILSSVGKFSTVNPVYVGNVAWAHILALRALQDPKKAPSIRGQFYYISDDTPHQSYDNLNYTLSKEFGLRLDSRWSFPLSLMYWIGFLLEIVSFLLRPIYTYRPPFNRHIVTLSNSVFTFSYKKAQRDLAYKPLYSWEEAKQKTVEWVGSLVDRHKETLKSKTQ

SEQ ID NO: 110 - DNA, 1281 bp, Homo sapiens
atgctatttctgcttctcccgttcgacagacagccacattttcttgtgcagcgccagtggcattcccaaggcaccacagtgaaggtgaagcctggagtcaattggtttggctatattgggtgcctggcctccagggctgcttttaactctgttaaagtggatactgttgccatcaatgaccccatcattgacctcgactacgtggtctacatgttccagtatgattccatccatggcaaattccatgacaccgtcaaagctgaaaacgggaagcttgtcatgaatacaaatttaaccaccattttccaaaagctagatcccaccaaaatcaaatagggtgatgctggccttgagtacatcatagagtccaccgacatcttcaccaccatagagaaggctggggctcgcttgcaggagggatccaaaagggtcattatctctgcccctctgctgacgcccccatatctgagacgcgcatgaaccatgagaagtatgacaacaacctcaagatcatcagcaatgtcacctgcaccactaactgcttagcacccctggccaagttcatccatgacaactttggtgtcatggaaggacttatggcgacagtccacacatcgctgccacccagaagactgtggatagcccctccaggaaactatgccatgagagtcgcggggctctccataatgccattcctgcatctcctggcactgtcaaggctatgggaaatgtcatccctgagttgaacaggaggcttactggcatgacgtttcatgtcctcactgccaacatgttatttgtggacctgacttgcctatgtaaatcctgccaaaaatgatgacatcaagaaagtgttgaagcagcatcggagttccccttcgagggcatcttgggctgcactgagaaccagcttgtctcctctgactttaactgcgacacccactcttccacctttgatcctgggactggcattgccctcaatgaccactttctcaagctcattttctggtatgacaatgaatttggctatagcaaaagggtgatcgacctcattgcccacagggccttcaaagagtaagatccctggaccaccagccccagcgagagcatgagaggaaaacagaggccctcagcttctggggagtccctgccacactcagtgccccaccacaatgagaatctcccctcctcacagtttccatgcagaccctctgaagagggagaggcctagggagccccaccttgttgtgtaccatcaataaattcttctgcgttcagcca

SEQ ID NO: 111 - DNA, 1175 bp, Homo sapiens
ttagccatgatgggctggaacttccttgtgacaggagcaggaatgtttctggatcagagaatcatccatctcttggtgaaggagaaggagctgaaggagatcagggctttggaaaaggccttcagaccagaattgaggaaggaattttcaaagctccaaaacaagaccaagctaacagtgttggaaggagacattctgaatgagtcatgccttaaaagagcctgccaggacatcttggtcatcatccacactgcctctatcattgacgtcttcggtgtcactcacagacagtctatcatgaaagccaatgtgaaaggtacccaacttctgttgggaacctgtgtccaagctagtatgccaggcttcatccacaccagcatcatagaagtatccaggcccaactcctgcaatgagatcatccagaatggccacgaataagagcctttggaaaacatatggcctgctccatacccatagagcaaaaagcttgctgaggaggccgtgctggcagctaatgggtgaacactgaaaaatagcgtatcttgtacatttgtgccttaagactcatgtatatctatgaggaaggaagccctatactttctgccactacaaatgaggccccattacaatgggatcctgtcaagtgtcagcaagttatccacatcaacacagtctatgttggcaatgtggcctgggcccacattctggtcttgtggtccctgcaggaccccaagaaggccctaagcatccgaggacagttctactatatctcagatgacatgtcttaccaaagctatgactaccttagttacaccctgaacaaagaatttggcctctgccttgattccagatggagccttcctctagccctgatatgctggattggcttcctgctggaaatagtgagattcctgctcaggccaatttatacctgtcaactccccttcaatcgctacaggagatatcatcaagcttcatcctcctggcttcatacagaaggtgacaagggcacaagcccagatcctgctgcctccctttcacacaatggccaacttattgtcttcctcgtgtcatcaaaacctgtgcagtcactggcccaaccagaagctttctgtgctaaccatataccaaaggacagacaatgtgatttgccgttaccaaatatcagtggctaa

SEQ ID NO: 112 - DNA, 872 bp, Homo sapiens
atggtaagggtgaaggccagagtcaatggatttgtccctattgggtacctggtcaccaggggtacttataactctggtaaagtggatattgtcaccatcaatgaccccttcattgagctcaactacatggtctacatgttccagtatgattccacctatgacaaattccatggcaccatcaaggctgagaacaggaagcttttcataaatagaaatcccaccaccatcctccaaaaagctaaaagggtcattatctctggcttttctgctcatacccccatgttcgtgatgggtgtgaaccatgagaaatatgacaacagcctcatgatcatcagcaatgcaactgtgaccaagatcatccatgacaactctgatatggtggaaggactcatgaccacagtcaatgctatcattgccaccctgaagactgtggatgacccctctgtgaaaatgtggcaagaaaactgcagggctcaaaggaacatcatctttgcatctcctggaactgtcaaggctgtaagcgagtatatcaataagctgcacaggaaactcagtggcatggcattccatgtacctaccaccatcatgttggtcatggacctgacctaccatctggaaaaacctgccaaatatgataacatcaagaaggtggtgaagcaggcatcagagggtccccataagggcatcctttgctacactgagaaccaggttgtctccagcttaaccactgacacccactcttctaccttggatcctggaactggcattgccctcaatgaccatttgttaagctcattttctgatatgaaaatgaatttggctacagcaacagggtggggaacctcatggctcacatggcctccaaggagtaa

SEQ ID NO: 113 - DNA, 1183 bp, Homo sapiens
atggtaagggtgaaggccagagtcaatggatttggccccattggttgcctggttaccaaggctacttataactggtaaagtggatattgtcaccatcaatgaccccttcatagtctacaaattccatactacatggtctatgtattccagtatgattccacccgtggtgaattccatggcaccgtaaaggctgagaacaggaagcttgtcatcaatggaaatcccaccacgatcgacaatgctggcaccaagtacatcatagactccagtgtcgtcttcactaccatggagaagtgtgtggctcatttgtaggggccagttaaatggatcatcatctctaacccctctgctgacagccccatgtttgtgatgggtatgaaccatgagaaatataacaacagcctcaagatcatcaacagtgtttcttgtaccaccaactgcttagcatctctggccaagatcatccatgacaactccgatttagtggaaggactcatgaccacagtaaatgctatgattgccacccagaagactgtggacggcccctctgtgaaactgtggcatgacagctgcagggctcaaaggaacatcatccttgcatctactggcactctcaaggctgtgggcaagtatatcaatgagctgcatgggaagatcactagcatggcattccaggtccccaccacgaacatgttggtcatgaacctgacctgccctcaggaaaagcatgccaaatatgataacatcaagcaggtggtgaagcagcatcagaaggcccccataagggcatcctgtgcaacactgagaaccaggttgcctcctccagcttaaccattgacacccactcttccaccttcaatcctgggactggcattgccctcagtgaccactttgttaagctcattttctcatatgataatgaatttgggtacagcaacaggatggtgaacctcatggctcacatagcctccaaggagtaagacctctgggccaccagccccgcgagagcatgagaggaaaagagaggccctcagctgctggggagtccctgccacactcagtcccccaccacactgagattctcccctccatgcagtttccatgcagaccccctgaagagggaggggcctagggaaccccaccttgtcgtgtaccaccaataaagtcccctgtctatgctcag

SEQ ID NO: 114 - DNA, 3459 bp, Homo sapiens
ctcaatcagctttatgcagagaagaagcttactgagctcactgctggtgctggtgtaggcaagtgctgctttggcaatctgggctgacctggcttgtctcctcagaactccttctccaaccctggagcaggcttccatgctgctgtgggcgtccttgctggcctttgctccagtctgtggacaatctgcagctgcacacaaacctgtgatttccgtccatcctccatggaccacattcttcaaaggagagagagtgactctgacttgcaatggatttcagttctatgcaacagagaaaacaacatggtatcatcggcactactggggagaaaagttgaccctgaccccaggaaacaccctcgaggttcgggaatctggactgtacagatgccaggcccggggctccccacgaagtaaccctgtgcgcttgctcttttcttcagactccttaatcctgcaggcaccatattctgtgtttgaaggtgacacattggttctgagatgccacagaagaaggaaagagaaattgactgctgtgaaatatacttggaatggaaacattctttccatttctaataaaagctgggatcttcttatcccacaagcaagttcaaataacaatggcaattatcgatgcattggatatggagatgagaatgatgtatttagatcaaatttcaaaataattaaaattcaagaactatttccacatccagagctgaaagctacagactctcagcctacagaggggaattctgtaaacctgagctgtgaaacacagcttcctccagagcggtcagacaccccacttcacttcaacttcttcagagatggcgaggtcatcctgtcagactggagcacgtacccggaactccagctcccaaccgtctggagagaaaactcaggatcctattggtgtggtgctgaaacagtgaggggtaacatccacaagcacagtccctcgctacagatccatgtgcagcggatccctgtgtctggggtgctcctggagacccagccctcagggggccaggctgttgaaggggagatgctggtccttgtctgctccgtggctgaaggcacaggggataccacattctcctggcaccgagaggacatgcaggagagtctggggaggaaaactcagcgttccctgagagcagagctggagctccctgccatcagacagagccatgcagggggatactactgtacagcagacaacagctacggccctgtccagagcatggtgctgaatgtcactgtgagagagaccccaggcaacagagatggccttgtcgccgcgggagccactggagggctgctcagtgctcttctcctggctgtggccctgctgtttcactgctggcgtcggaggaagtcaggagttggtttcttgggagacgaaaccaggctccctcccgctccaggcccaggagagtcctcccattccatctgccctgcccaggtggagcttcagtcgttgtatgttgatgtacaccccaaaaagggagatttggtatactctgagatccagactactcagctgggagaagaagaggaagctaatacctccaggacacttctagaggataaggatgtctcagttgtctactctgaggtaaagacacaacacccagataactcagctggaaagatcagctctaaggatgaagaaagttaagagaatgaaaagttacgggaacgtcctactcatgtgatttctcccttgtccaaagtcccaggcccagtgcagtccttgcggcacctggaatgatcaactcattccagctttctaattcttctcatgcatatgcattcactcccaggaatactcattcgtctactctgatgttgggatggaatggcctctgaaagacttcactaaaatgaccaggatccacagttaagagaagaccctgtagtatttgctgtgggcctgacctaatgcattccctagggtctgctttagagaagggggataaagagagagaaggactgttatgaaaaacagaagcacaaattttggtgaattgggatttgcagagatgaaaaagactgggtgacctggatctctgcttaatacatctacaaccattgtctcactggagactcacttgcatcagtttgtttaactgtgagtggctgcacaggcactgtgcaaacaatgaaaagccccttcacttctgcctgcacagcttacactgtcaggattcagttgcagattaaagaacccatctggaatggtttacagagagaggaatttaaaagaggacatcagaagagctggagatgcaagctctaggctgcgcttccaaaagcaaatgataattatgttaatgtcattagtgacaaagatttgcaacattagagaaaagagacacaaatataaaattaaaaacttaagtaccaactctccaaaactaaatttgaacttaaaatattagtataaactcataataaactctgcctttaaaaaaagataaatatttcctacgtctgttcactgaaataattaccaaccccttagcaataagcactccttgcagagaggttttattctctaaataccattcccttctcaaaggaaataaggttgcttttcttgtaggaactgtgtctttgagttactaattagtttatatgagaataattcttgcaataaatgaagaaggaataaaagaaataggaagccacaaatttgtatggatatttcatgatacacctactggttaaataattgacaaaaaccagcagccaaatattagaggtctcctgatggaagtgtacaataccacctacaaattatccatgccccaagtgttaaaactgaatccattcaagtctttctaactgaatacttgttttatagaaaatgcatggagaaaaggaatttgtttaaataacattatgggattgcaaccagcaaaacataaactgagaaaaagttctatagggcaaatcacctggcttctataacaaataaatgggaaaaaaatgaaataaaaagaagagagggaggaagaaagggagagagaagaaaagaaaaatgaagaaaagtaattagaatattttcaacataaagaaaagacgaatatttaaggtgacagatatcccaactacgctgatttgatctttacaaattatatgagtgtatgaatttgtcacatgtatcacccccaaaaaaagagaaaaagaaaaatagaagacatataaattaaatgagacgagacatgtcgaccaaaaggaatgtgtgggtcttgtttggatcctgactcaaattaagaaaaaataaaactacctacgaaatactaagaaaaatttgtatactaatattaagaaattgttgtgtgttttggatataagtgatagtttattgtagtgatgtttttataaaagcaaaaggatattcactttcagcgcttatactgaagtattagattaaagcttattaacgta

SEQ ID NO: 115 - protein, 515 aa, Homo sapiens
MLLWASLLAFAPVCGQSAAAHKPVISVHPPWTTFFKGERVTLTCNGFQFYATEKTTWYHRHYWGEKLTLTPGNTLEVRESGLYRCQARGSPRSNPVRLLFSSDSLILQAPYSVFEGDTLVLRCHRRRKEKLTAVKYTWNGNILSISNKSWDLLIPQASSNNNGNYRCIGYGDENDVFRSNFKIIKIQELFPHPELKATDSQPTEGNSVNLSCETQLPPERSDTPLHFNFFRDGEVILSDWSTYPELQLPTVWRENSGSYWCGAETVRGNIHKHSPSLQIHVQRIPVSGVLLETQPSGGQAVEGEMLVLVCSVAEGTGDTTFSWHREDMQESLGRKTQRSLRAELELPAIRQSHAGGYYCTADNSYGPVQSMVLNVTVRETPGNRDGLVAAGATGGLLSALLLAVALLFHCWRRRKSGVGFLGDETRLPPAPGPGESSHSICPAQVELQSLYVDVHPKKGDLVYSEIQTTQLGEEEEANTSRTLLEDKDVSVVYSEVKTQHPDNSAGKISSKDEES

SEQ ID NO: 116 - DNA, 3019 bp, Homo sapiens
agtgaaggggtttcccatatgaaaaatacagaaagaattatttgaatactagcaaatacacaacttgatatttctagagaacccaggcacagtcttggagacattactcctgagagactgcagctgatggaagatgagccccaacttctaaaaatgtatcactaccgggattgagatacaaacagcatttaggaaggtctcatctgagtagcagcttcctgccctccttcttggagataagtcgggcttttggtgagacagactttcccaaccctctgcccggccggtgcccatgcttctgtggctgctgctgctgatcctgactcctggaagagaacaatcaggggtggccccaaaagctgtacttctcctcaatcctccatggtccacagccttcaaaggagaaaaagtggctctcatatgcagcagcatatcacattccctagcccagggagacacatattggtatcacgatgagaagttgttgaaaataaaacatgacaagatccaaattacagagcctggaaattaccaatgtaagacccgaggatcctccctcagtgatgccgtgcatgtggaattttcacctgactggctgatcctgcaggctttacatcctgtctttgaaggagacaatgtcattctgagatgtcaggggaaagacaacaaaaacactcatcaaaaggtttactacaaggatggaaaacagcttcctaatagttataatttagagaagatcacagtgaattcagtctccagggataatagcaaatatcattgtactgcttataggaagttttacatacttgacattgaagtaacttcaaaacccctaaatatccaagttcaagagctgtttctacatcctgtgctgagagccagctcttccacgcccatagaggggagtcccatgaccctgacctgtgagacccagctctctccacagaggccagatgtccagctgcaattctccctcttcagagatagccagaccctcggattgggctggagcaggtcccccagactccagatccctgccatgtggactgaagactcagggtcttactggtgtgaggtggagacagtgactcacagcatcaaaaaaaggagcctgagatctcagatacgtgtacagagagtccctgtgtctaatgtgaatctagagatccggcccaccggagggcagctgattgaaggagaaaatatggtccttatttgctcagtagcccagggttcagggactgtcacattctcctggcacaaagaaggaagagtaagaagcctgggtagaaagacccagcgttccctgttggcagagctgcatgttctcaccgtgaaggagagtgatgcagggagatactactgtgcagctgataacgttcacagccccatcctcagcacgtggattcgagtcaccgtgagaattccggtatctcaccctgtcctcaccttcagggctcccagggcccacactgtggtgggggacctgctggagcttcactgtgagtccctgagaggctctcccccgatcctgtaccgattttatcatgaggatgtcaccctggggaacagctcagccccctctggaggaggagcctccttcaacctctctctgactgcagaacattctggaaactactcctgtgatgcagacaatggcctgggggcccagcacagtcatggagtgagtctcagggtcacagttccggtgtctcgccccgtcctcaccctcagggctcccggggcccaggctgtggtgggggacctgctggagcttcactgtgagtccctgagaggctccttcccgatcctgtactggttttatcacgaggatgacaccttggggaacatctcggcccactctggaggaggggcatccttcaacctctctctgactacagaacattctggaaactactcatgtgaggctgacaatggcctgggggcccagcacagtaaagtggtgacactcaatgttacaggaacttccaggaacagaacaggccttaccgctgcgggaatcacggggctggtgctcagcatcctcgtccttgctgctgctgctgctctgctgcattacgccagggcccgaaggaaaccaggaggactttctgccactggaacatctagtcacagtcctagtgagtgtcaggagccttcctcgtccaggccttccaggatagaccctcaagagcccactcactctaaaccactagccccaatggagctggagccaatgtacagcaatgtaaatcctggagatagcaacccgatttattcccagatctggagcatccagcatacaaaagaaaactcagctaattgtccaatgatgcatcaagagcatgaggaacttacagtcctctattcagaactgaagaagacacacccagacgactctgcaggggaggctagcagcagaggcagggcccatgaagaagatgatgaagaaaactatgagaatgtaccacgtgtattactggcctcagaccactagccccttacccagagtggcccacaggaaacagcctgcaccatttttttttctgttctctccaaccacacatcatccatctctccagactctgcctcctacgaggctgggctgcagggtatgtgaggctgagcaaaaggtctgcaaatctcccctgtgcctgatctgtgtgttccccaggaagagagcaggcagcctctgagcaagcactgtgttattttcacagtggagacacgtggcaaggcaggagggccctcagctcctagggctgtcgaatagaggaggagagagaaatggtctagccagggttacaagggcacaatcatgaccatttgatccaagtgtgatcgaaagctgttaatgtgctctctgtataaacaatttgctccaaatattttgtttcccttttttgtgtggctggtagtggcattgctgatgttttggtgtatatgctgtatccttgctaccatattgggaacagccaaaagaagttatagaacaagaatttaaggtgactctatctga

SEQ ID NO: 117 - protein, 734 aa, Homo sapiens
MLLWLLLLILTPGREQSGVAPKAVLLLNPPWSTAFKGEKVALICSSISHSLAQGDTYWYHDEKLLKIKHDKIQITEPGNYQCKTRGSSLSDAVHVEFSPDWLILQALHPVFEGDNVILRCQGKDNKNTHQKVYYKDGKQLPNSYNLEKITVNSVSRDNSKYHCTAYRKFYILDIEVTSKPLNIQVQELFLHPVLRASSSTPIEGSPMTLTCETQLSPQRPDVQLQFSLFRDSQTLGLGWSRSPRLQIPAMWTEDSGSYWCEVETVTHSIKKRSLRSQIRVQRVPVSNVNLEIRPTGGQLIEGENMVLICSVAQGSGTVTFSWHKEGRVRSLGRKTQRSLLAELHVLTVKESDAGRYYCAADNVHSPILSTWIRVTVRIPVSHPVLTFRAPRAHTVVGDLLELHCESLRGSPPILYRFYHEDVTLGNSSAPSGGGASFNLSLTAEHSGNYSCDADNGLGAQHSHGVSLRVTVPVSRPVLTLRAPGAQAVVGDLLELHCESLRGSFPILYWFYHEDDTLGNISAHSGGGASFNLSLTTEHSGNYSCEADNGLGAQHSKVVTLNVTGTSRNRTGLTAAGITGLVLSILVLAAAAALLHYARARRKPGGLSATGTSSHSPSECQEPSSSRPSRIDPQEPTHSKPLAPMELEPMYSNVNPGDSNPIYSQIWSIQHTKENSANCPMMHQEHEELTVLYSELKKTHPDDSAGEASSRGRAHEEDDEENYENVPRVLLASDH

SEQ ID NO: 118 - DNA, 773 bp, Homo sapiens
atggctgtccctcccatgtacactgatcttgacaaatgtaccagggatgtcttcaccaagcggtatagattaggattaataaagcttcatttgaaaacaaaatatgggaatagactggatgttacaagctcaggctcagccaatcctgaggccatcaaagtgacaggtagtctggaaaccaagaacagatggatcaaatgtggcctgacatttacagagaagtggaacactgacaagacattaggtgcagagttactggagaagatgagctttttacatggactaaagttgacctgtgattcagcctcctcacctaacactgggggcaaaatgctaaaatcaagacagggtacaagtgagagtacatcaacctgggctgcaacgtggattttgacatctccaggactttcatccaaggtgctctcatgctgagttacaaggactggctggctggataccaaatacattttgagatcaaagagtcccaggtgacctaaaatgactttttgtggttggcttcaagactgatgaattccagcatcacactaatataaatgacagtgtttggcacctccacttaccagaaggtgagcaagactttggagatcactgtcaatcatgcatggacattaggaaacaataacacttgctttggaacagcagccaagtagcacatagatcctgacagcttcttctcagctaaagtgaacaactcccatgagaggattaggatacattcagactccaaggcagttatcgaactaattctgtga

SEQ ID NO: 119 - DNA, 2573 bp, Homo sapiens
ggtgaccaagagtacatctcttttcaaatagctggattaggtcctcatgctgctgtggtcattgctggtcatctttgatgcagtcactgaacaggcagattcgctgacccttgtggcgccctcttctgtcttcgaaggagacagcatcgttctgaaatgccagggagaacagaactggaaaattcagaagatggcttaccataaggataacaaagagttatctgttttcaaaaaattctcagatttccttatccaaagtgcagttttaagtgacagtggtaactatttctgtagtaccaaaggacaactctttctctgggataaaacttcaaatatagtaaagataaaagtccaagagctctttcaacgtcctgtgctgactgccagctccttccagcccatcgaagggggtccagtgagcctgaaatgtgagacccggctctctccacagaggttggatgttcaactccagttctgcttcttcagagaaaaccaggtcctggggtcaggctggagcagctctccggagctccagatttctgccgtgtggagtgaagacacagggtcttactggtgcaaggcagaaacggtgactcacaggatcagaaaacagagcctccaatcccagattcacgtgcagagaatccccatctctaatgtaagcttggagatccgggcccccgggggacaggtgactgaaggacaaaaactgatcctgctctgctcagtggctgggggtacaggaaatgtcacattctcctggtacagagaggccacaggaaccagtatgggaaagaaaacccagcgttccctgtcagcagagctggagatcccagctgtgaaagagagtgatgccggcaaatattactgtagagctgacaacggccatgtgcctatccagagcaaggtggtgaatatccctgtgagaattccagtgtctcgccctgtcctcaccctcaggtctcctggggcccaggctgcagtgggggacctgctggagcttcactgtgaggccctgagaggctctcccccaatcttgtaccaattttatcatgaggatgtcacccttgggaacagctcggccccctctggaggaggggcctccttcaacctctctttgactgcagaacattctggaaactactcctgtgaggccaacaacggcctgggggcccagtgcagtgaggcagtgccagtctccatctcaggacctgatggctatagaagagacctcatgacagctggagttctctggggactgtttggtgtccttggtttcactggtgttgctttgctgttgtatgccttgttccacaagatatcaggagaaagttctgccactaatgaacccagaggggcttccaggccaaatcctcaagagttcacctattcaagcccaaccccagacatggaggagctgcagccagtgtatgtcaatgtgggctctgtagatgtggatgtggtttattctcaggtctggagcatgcagcagccagaaagctcagcaaacatcaggacacttctggagaacaaggactcccaagtcatctactcttctgtgaagaaatcataacacttggaggaatcagaagggaagatcaacagcaaggatggggcatcattaagacttgctataaaaccttatgaaaatgcttgaggcttatcacctgccacagccagaacgtgcctcaggaggcacctcctgtcatttttgtcctgatgatgtttcttctccaatatcttcttttacctatcaatattcattgaactgctgctacatccagacactgtgcaaataaattatttctgctaccttctcttaagcaatcagtgtgtaaagatttgagggaagaatgaataagagatacaaggtctcaccttcatctactgtgaagtgatgagaacaggacttgatagtggtgtattaacttatttatgtgctgctggatacagtttgctaatattttgttgagaatttttgcaaatatgttcattgggaatattggcctgaaattttcttttccactgtgtctctgccagaatgtttgtatcaggctgatgctggcttcatagaatgagttaggcaggagcccttcctccttgattttttggcatagtttcagcaggattggtaccagttattctttctgcatcttgtagaattcagctatgaatccatctggtctagggcttttgtgttggttggtaagttttttattactaattcaacttcagcgcttgatattggtctaggaggggtttctgtctcttcctggttcaatcttgggagattgtgtgtttccaggaatttagccgtttcctccagattttcttctttatgtgcatcgacttgagtgtaaacataacttatatgcactgggaaaccaaaaaatctgtgtgacttgctttattgcagcatttgttttattttggtagtctggaactgaacctgcaatatcaccaaagtatgcatatagttgcaaaaatgtgatttttgacatagtaaatatgagtatttgcaataaactatgatattacttttgtaagtatatagaataaaatgtaaataatct

SEQ ID NO: 120 - protein, 508 aa, Homo sapiens
MLLWSLLVIFDAVTEQADSLTLVAPSSVFEGDSIVLKCQGEQNWKIQKMAYHKDNKELSVFKKFSDFLIQSAVLSDSGNYFCSTKGQLFLWDKTSNIVKIKVQELFQRPVLTASSFQPIEGGPVSLKCETRLSPQRLDVQLQFCFFRENQVLGSGWSSSPELQISAVWSEDTGSYWCKAETVTHRIRKQSLQSQIHVQRIPISNVSLEIRAPGGQVTEGQKLILLCSVAGGTGNVTFSWYREATGTSMGKKTQRSLSAELEIPAVKESDAGKYYCRADNGHVPIQSKVVNIPVRIPVSRPVLTLRSPGAQAAVGDLLELHCEALRGSPPILYQFYHEDVTLGNSSAPSGGGASFNLSLTAEHSGNYSCEANNGLGAQCSEAVPVSISGPDGYRRDLMTAGVLWGLFGVLGFTGVALLLYALFHKISGESSATNEPRGASRPNPQEFTYSSPTPDMEELQPVYVNVGSVDVDVVYSQVWSMQQPESSANIRTLLENKDSQVIYSSVKKS

SEQ ID NO: 121 - DNA, 2071 bp, Homo sapiens
ccacgcgtccggtcctgaactgggctgaataaacatacctaaatatatgtttagaaatgctcctatgtatcagttttcccaggaacaactataatattatagaaatcttaaaattatttcctaataaaaaattataggatacaaaagaaaaaaaagaaatatgaagagggctggatgggcacaggaaaacaatcagatgagaacaacagatgaccgtgtctgcaggcagcacccagaactgatattcccctcaaacgtctaaatatattgttgagaaaattatctctaactgttctagtgggaatgtgggaatggaaaatatgcaacagccatggggccaggccctttgctgagcctgcaggttgggagtttgtgaatctattgaggcatcacaaatcttttctgatagcccctctgtgtctgtcagttccagtgtctcgccctgtcctcaccctcaggtctcctggggcccaggctgcagtgggggacctgctggagcttcactgtgaggccctgagaggctctcccccaatcttgtaccaattttatcatgaggatgtcacccttgggaacagctcggccccctctggaggaggggcctccttcaacctctctttgactgcagaacattctggaaactactcctgtgaggccaacaacggcctgggggcccagtgcagtgaggcagtgccagtctccatctcaggacctgatggctatagaagagacctcatgacagctggagttctctggggactgtttggtgtccttggtttcactggtgttgctttgctgttgtatgccttgttccacaagatatcaggagaaagttctgccactaatgaacccagaggggcttccaggccaaatcctcaagagttcacctattcaagcccaaccccagacatggaggagctgcagccagtgtatgtcaatgtgggctctgtagatgtggatgtggtttattctcaggtctggagcatgcagcagccagaaagctcagcaaacatcaggacacttctggagaacaaggactcccaagtcatctactcttctgtgaagaaatcataacacttggaggaatcagaagggaagatcaacagcaaggatggggcatcattaagacttgctataaaaccttatgaaaatgcttgaggcttatcacctgccacagccagaacgtgcctcaggaggcacctcctgtcatttttgtcctgatgatgtttcttctccaatatcttcttttacctatcaatattcattgaactgctgctacatccagacactgtgcaaataaattatttctgctaccttctcttaagcaatcagtgtgtaaagatttgagggaagaatgaataagagatacaaggtctcaccttcatctactgtgaagtgatgagaacaggacttgatagtggtgtattaacttatttatgtgctgctggatacagtttgctaatattttgttgagaatttttgcaaatatgttcattgggaatattggcctgaaattttcttttccactgtgtctctgccagaatgtttgtatcaggctgatgctggcttcatagaatgagttaggcaggagcccttcctccttgattttttggcatagtttcagcaggattggtaccagttattctttctgcatcttgtagaattcagctatgaatccatctggtctagggcttttgtgttggttggtaagttttttattactaattcaacttcagcgcttgatattggtctaggaggggtttctgtctcttcctggttcaatcttgggagattgtgtgtttccaggaatttagccgtttcctccagattttcttctttatgtgcatcgacttgagtgtaaacataacttatatgcactgggaaaccaaaaaatctgtgtgacttgctttattgcagcatttgttttattttggtagtctggaactgaacctgcaatatcaccaaagtatgcatatagttgcaaaaatgtgatttttgacatagtaaatatgagtatttgcaataaactatgatattacttttgtaagtatatagaataaaatgtaaataatct

SEQ ID NO: 122 - protein, 255 aa, Homo sapiens
MWEWKICNSHGARPFAEPAGWEFVNLLRHHKSFLIAPLCLSVPVSRPVLTLRSPGAQAAVGDLLELHCEALRGSPPILYQFYHEDVTLGNSSAPSGGGASFNLSLTAEHSGNYSCEANNGLGAQCSEAVPVSISGPDGYRRDLMTAGVLWGLFGVLGFTGVALLLYALFHKISGESSATNEPRGASRPNPQEFTYSSPTPDMEELQPVYVNVGSVDVDVVYSQVWSMQQPESSANIRTLLENKDSQVIYSSVKKS

SEQ ID NO: 123 - DNA, 2627 bp, Homo sapiens
actctgaggtgcattctttttttgatgagaggcatctctaggtaccatccctgacctggtcctcatgctgccgaggctgttgctgttgatctgtgctccactctgtgaacctgccgagctgtttttgatagccagcccctcccatcccacagaggggagcccagtgaccctgacgtgtaagatgccctttctacagagttcagatgcccagttccagttctgctttttcagagacacccgggccttgggcccaggctggagcagctcccccaagctccagatcgctgccatgtggaaagaagacacagggtcatactggtgcgaggcacagacaatggcgtccaaagtcttgaggagcaggagatcccagataaatgtgcacagggtccctgtcgctgatgtgagcttggagactcagcccccaggaggacaggtgatggagggagacaggctggtcctcatctgctcagttgctatgggcacaggagacatcaccttcctttggtacaaaggggctgtaggtttaaaccttcagtcaaagacccagcgttcactgacagcagagtatgagattccttcagtgagggagagtgatgctgagcaatattactgtgtagctgaaaatggctatggtcccagccccagtgggctggtgagcatcactgtcagaatcccggtgtctcgcccaatcctcatgctcagggctcccagggcccaggctgcagtggaggatgtgctggagcttcactgtgaggccctgagaggctctcctccgatcctgtactggttttatcacgaggatatcaccctggggagcaggtcggccccctctggaggaggagcctccttcaacctttccctgactgaagaacattctggaaactactcctgtgaggccaacaatggcctgggggcccagcgcagtgaggcggtgacactcaacttcacagtgcctactggggccagaagcaatcatcttacctcaggagtcattgaggggctgctcagcacccttggtccagccaccgtggccttattattttgctacggcctcaaaagaaaaataggaagacgttcagccagggatccactcaggagccttcccagccctctaccccaagagttcacctacctcaactcacctaccccagggcagctacagcctatatatgaaaatgtgaatgttgtaagtggggatgaggtttattcactggcgtactataaccagccggagcaggaatcagtagcagcagaaaccctggggacacatatggaggacaaggtttccttagacatctattccaggctgaggaaagcaaacattacagatgtggactatgaagatgctatgtaaggttatggaagattctgctctttgaaaaccatccatgaccccaagcctcaggcctgatatgttcttcagagatcctggggcattagctttccagtatacctcttctggatgccattctccatggcactattccttcatctactgtgaagtgaagttggcgcagccctgaagaaactacctaggagaactaatagacacaggagtgacagggactttgttatcagaaccagattcctgccggctcctttgaaaacaggtcatattgtgctcttctgtttacaagaggaaacaagatggaataaaagaaattgggatcttgggttggagggacagtgaagcttagagcacatgaactcaaggttagtgactctgcaggacttcacagagagagctgtgcccatcattcagtccaagtgctttctctgcccagacagcacagaactccagccccgctacttacatggatcatcgagtttccacctaaaatatgattctatttattttgagtcactgttaccaaattagaactaaaacaaagttacataaaaagttattgtgactccacttaattttagtgacgtatttttgtatatataggccaacctataccacatccaaaattatgtatctattacagcccctagaagctttataaatacagtgtgtcttcttttattcacaaaatttttgaaatcgtggtaatatggtttgaaacctgtatcttaattattttttttttaaattgagacagggtctcactctgtcactcaatctggaatgcagtggcacaatcttgcctcactgcaacgcctgcctctcaggctcaagcaaacctctcacctcagcctgctgagtagctgggactacaggcacatgccaccaaacttggccattttttgtcttacgtagagacaagatttcaccgttttgcccaggctggtctcaaactcctgggctcaagcaatgtattgaattttaaaataaccaggcactcactcttatgaattaataaacatttggaggtatataaagtaaaaagttaaagtctttcctgtaagttaacacaaatgttaactattgttaaaaactttacaggtagctctctagatatttttctatttttgtatgtatacttatgcatacatgtaagtatataaacatttagaagtgtacctatctaacaaactattatgaaatactttcaaatctgtaaatagatctattatactattttaaaaaaaaaaaaaaaaaaaaaaaaaaaaaaaaaaaaaaa

SEQ ID NO: 124 - protein, 429 aa, Homo sapiens
MLPRLLLLICAPLCEPAELFLIASPSHPTEGSPVTLTCKMPFLQSSDAQFQFCFFRDTRALGPGWSSSPKLQIAAMWKEDTGSYWCEAQTMASKVLRSRRSQINVHRVPVADVSLETQPPGGQVMEGDRLVLICSVAMGTGDITFLWYKGAVGLNLQSKTQRSLTAEYEIPSVRESDAEQYYCVAENGYGPSPSGLVSITVRIPVSRPILMLRAPRAQAAVEDVLELHCEALRGSPPILYWFYHEDITLGSRSAPSGGGASFNLSLTEEHSGNYSCEANNGLGAQRSEAVTLNFTVPTGARSNHLTSGVIEGLLSTLGPATVALLFCYGLKRKIGRRSARDPLRSLPSPLPQEFTYLNSPTPGQLQPIYENVNVVSGDEVYSLAYYNQPEQESVAAETLGTHMEDKVSLDIYSRLRKANITDVDYEDAM

SEQ ID NO: 125 - DNA, 2181 bp, Homo sapiens
ctgcttggggacctccttctagccttaaatttcagctcatcaccttcacctgccttggtcatggctctgctattctccttgatccttgccatttgcaccagacctggattcctagcgtctccatctggagtgcggctggtggggggcctccaccgctgtgaagggcgggtggaggtggaacagaaaggccagtggggcaccgtgtgtgatgacggctgggacattaaggacgtggctgtgttgtgccgggagctgggctgtggagctgccagcggaacccctagtggtattttgtatgagccaccagcagaaaaagagcaaaaggtcctcatccaatcagtcagttgcacaggaacagaagatacattggctcagtgtgagcaagaagaagtttatgattgttcacatgatgaagatgctggggcatcgtgtgagaacccagagagctctttctccccagtcccagagggtgtcaggctggctgacggccctgggcattgcaagggacgcgtggaagtgaagcaccagaaccagtggtataccgtgtgccagacaggctggagcctccgggccgcaaaggtggtgtgccggcagctgggatgtgggagggctgtactgactcaaaaacgctgcaacaagcatgcctatggccgaaaacccatctggctgagccagatgtcatgctcaggacgagaagcaacccttcaggattgcccttctgggccttgggggaagaacacctgcaaccatgatgaagacacgtgggtcgaatgtgaagatccctttgacttgagactagtaggaggagacaacctctgctctgggcgactggaggtgctgcacaagggcgtatggggctctgtctgtgatgacaactggggagaaaaggaggaccaggtggtatgcaagcaactgggctgtgggaagtccctctctccctccttcagagaccggaaatgctatggccctggggttggccgcatctggctggataatgttcgttgctcaggggaggagcagtccctggagcagtgccagcacagattttgggggtttcacgactgcacccaccaggaagatgtggctgtcatctgctcaggatagtatcctggtgttgcttgacctggcccccctggccccgcctgccctctgcttgttctcctgagccctgattatcctcatactcattctggggctcaggcttgagccactactccctcatcccctcaggagtctgaacactgggcttatgccttactctcagggacaagcagccccctttgctgcctgtagatgtgagctgttgagttccctcttgctggggaagatgagcttccatgtatcctgtgctcaaccctgaccctttgacactggttctggcctttcctgccttttctcaagctgcctggaatcctcaaacctgtcactttggtcagatgtgcagaccattactaaggtctatgtctgcaaacattactaatctaggtcctattactaatctatgtctgcaaacattaaaggaatgaaacaatgaaaggaacatttgaaagaaaatgtgggtagacaatttcttgcaacttgggggaaagtttagaattcttttgattggactacttttttttttttcctcaagcttcaggtgaccacaatagcaacacctccctattctgttatttcttagtgtaggtagacaattctttcaggagcagagcagcgtcctataatcctagaccttttcatgacgtgtaaaaaatgatgtttcatcctctgattgccccaataaaaatctttgttgtccatccctatacaacctgccaacatggttgacatttaatgagaggaatgtcaaaaatacattttactttattcaaagaaaaatatattggttactgggaaaaggtcaagaaagaggcagaaagagatcagggagggctaaagttgtgtcttatgccaagcggaagtggaaaatatcacttttcactttatcaactgagactttggggcctgtaagcttgaggcaagacagaaataagagaatcaagacttgattgtaaaaattgacaactttagattctgaggctaggctgagtacttattatacggctacatttacacatttacacttatctaataaatcagatttcacagtctcaaaaaaaaaaaaagaaaaaaaaaaaaaaa

SEQ ID NO: 126 - protein, 347 aa, Homo sapiens
MALLFSLILAICTRPGFLASPSGVRLVGGLHRCEGRVEVEQKGQWGTVCDDGWDIKDVAVLCRELGCGAASGTPSGILYEPPAEKEQKVLIQSVSCTGTEDTLAQCEQEEVYDCSHDEDAGASCENPESSFSPVPEGVRLADGPGHCKGRVEVKHQNQWYTVCQTGWSLRAAKVVCRQLGCGRAVLTQKRCNKHAYGRKPIWLSQMSCSGREATLQDCPSGPWGKNTCNHDEDTWVECEDPFDLRLVGGDNLCSGRLEVLHKGVWGSVCDDNWGEKEDQVVCKQLGCGKSLSPSFRDRKCYGPGVGRIWLDNVRCSGEEQSLEQCQHRFWGFHDCTHQEDVAVICSG

SEQ ID NO: 127 - DNA, 243 bp, Homo sapiens
atggccaatgactcagctcctgtcaccttccagtcagggatccctgtgtctggggtgctcctggagacccagccctcagggggccaggcggttgaaggggagacgctggtccttgtctgctccgtggctgaaggcacaggggaaaccacgttctcctggcaccgaaaggacacgcaggagagtctggggaggaaaactcagccttccccaagagcagagtcggagccccctgccatcaggtag

SEQ ID NO: 128 - protein, 80 aa, Homo sapiens
MANDSAPVTFQSGIPVSGVLLETQPSGGQAVEGETLVLVCSVAEGTGETTFSWHRKDTQESLGRKTQPSPRAESEPPAIR

SEQ ID NO: 129 - DNA, 1674 bp, Homo sapiens
gtcctccacttcctggggaggtagctgcagaataaaaccagcagagactccttttctcctaaccgtcccggccaccgctgcctcagcctctgcctcccagcctctttctgagggaaaggacaagatgaagtggaaggcgcttttcaccgcggccatcctgcaggcacagttgccgattacagaggcacagagctttggcctgctggatcccaaactctgctacctgctggatggaatcctcttcatctatggtgtcattctcactgccttgttcctgagagtgaagttcagcaggagcgcagacgcccccgcgtaccagcagggccagaaccagctctataacgagctcaatctaggacgaagagaggagtacgatgttttggacaagagacgtggccgggaccctgagatggggggaaagccgagaaggaagaaccctcaggaaggcctgtacaatgaactgcagaaagataagatggcggaggcctacagtgagattgggatgaaaggcgagcgccggaggggcaaggggcacgatggcctttaccagggtctcagtacagccaccaaggacacctacgacgcccttcacatgcaggccctgccccctcgctaacagccaggggatttcaccactcaaaggccagacctgcagacgcccagattatgagacacaggatgaagcatttacaacccggttcactcttctcagccactgaagtattcccctttatgtacaggatgctttggttatatttagctccaaaccttcacacacagactgttgtccctgcactctttaagggagtgtactcccagggcttacggccctggccttgggccctctggtttgccggtggtgcaggtagacctgtctcctggcggttcctcgttctccctgggaggcgggcgcactgcctctcacagctgagttgttgagtctgttttgtaaagtccccagagaaagcgcagatgctagcacatgccctaatgtctgtatcactctgtgtctgagtggcttcactcctgctgtaaatttggcttctgttgtcaccttcacctcctttcaaggtaactgtactgggccatgttgtgcctccctggtgagagggccgggcagaggggcagatggaaaggagcctaggccaggtgcaaccagggagctgcaggggcatgggaaggtgggcgggcaggggagggtcagccagggcctgcgagggcagcgggagcctccctgcctcaggcctctgtgccgcaccattgaactgtaccatgtgctacaggggccagaagatgaacagactgaccttgatgagctgtgcacaaagtggcataaaaaacatgtggttacacagtgtgaataaagtgctgcggagcaagaggaggccgttgattcacttcacgctttcagcgaatgacaaaatcatctttgtgaaggcctcgcaggaagacccaacacatgggacctataactgcccagcggacagtggcaggacaggaaaaacccgtcaatgtactaggatactgctgcgtcattacagggcacaggccatggatggaaaacgctctctgctctgctttttttctactgttttaatttatactggcatgctaaagccttcctattttgcataataaatgcttcagtgaaaaaaaaaaaaaaaaaaaaaaaaa

SEQ ID NO: 130 - protein, 163 aa, Homo sapiens
MKWKALFTAAILQAQLPITEAQSFGLLDPKLCYLLDGILFIYGVILTALFLRVKFSRSADAPAYQQGQNQLYNELNLGRREEYDVLDKRRGRDPEMGGKPRRKNPQEGLYNELQKDKMAEAYSEIGMKGERRRGKGHDGLYQGLSTATKDTYDALHMQALPPR

SEQ ID NO: 131 - DNA, 1677 bp, Homo sapiens
gtcctccacttcctggggaggtagctgcagaataaaaccagcagagactccttttctcctaaccgtcccggccaccgctgcctcagcctctgcctcccagcctctttctgagggaaaggacaagatgaagtggaaggcgcttttcaccgcggccatcctgcaggcacagttgccgattacagaggcacagagctttggcctgctggatcccaaactctgctacctgctggatggaatcctcttcatctatggtgtcattctcactgccttgttcctgagagtgaagttcagcaggagcgcagacgcccccgcgtaccagcagggccagaaccagctctataacgagctcaatctaggacgaagagaggagtacgatgttttggacaagagacgtggccgggaccctgagatggggggaaagccgcagagaaggaagaaccctcaggaaggcctgtacaatgaactgcagaaagataagatggcggaggcctacagtgagattgggatgaaaggcgagcgccggaggggcaaggggcacgatggcctttaccagggtctcagtacagccaccaaggacacctacgacgcccttcacatgcaggccctgccccctcgctaacagccaggggatttcaccactcaaaggccagacctgcagacgcccagattatgagacacaggatgaagcatttacaacccggttcactcttctcagccactgaagtattcccctttatgtacaggatgctttggttatatttagctccaaaccttcacacacagactgttgtccctgcactctttaagggagtgtactcccagggcttacggccctggccttgggccctctggtttgccggtggtgcaggtagacctgtctcctggcggttcctcgttctccctgggaggcgggcgcactgcctctcacagctgagttgttgagtctgttttgtaaagtccccagagaaagcgcagatgctagcacatgccctaatgtctgtatcactctgtgtctgagtggcttcactcctgctgtaaatttggcttctgttgtcaccttcacctcctttcaaggtaactgtactgggccatgttgtgcctccctggtgagagggccgggcagaggggcagatggaaaggagcctaggccaggtgcaaccagggagctgcaggggcatgggaaggtgggcgggcaggggagggtcagccagggcctgcgagggcagcgggagcctccctgcctcaggcctctgtgccgcaccattgaactgtaccatgtgctacaggggccagaagatgaacagactgaccttgatgagctgtgcacaaagtggcataaaaaacatgtggttacacagtgtgaataaagtgctgcggagcaagaggaggccgttgattcacttcacgctttcagcgaatgacaaaatcatctttgtgaaggcctcgcaggaagacccaacacatgggacctataactgcccagcggacagtggcaggacaggaaaaacccgtcaatgtactaggatactgctgcgtcattacagggcacaggccatggatggaaaacgctctctgctctgctttttttctactgttttaatttatactggcatgctaaagccttcctattttgcataataaatgcttcagtgaaaaaaaaaaaaaaaaaaaaaaaaa

SEQ ID NO: 132 - protein, 164 aa, Homo sapiens
MKWKALFTAAILQAQLPITEAQSFGLLDPKLCYLLDGILFIYGVILTALFLRVKFSRSADAPAYQQGQNQLYNELNLGRREEYDVLDKRRGRDPEMGGKPQRRKNPQEGLYNELQKDKMAEAYSEIGMKGERRRGKGHDGLYQGLSTATKDTYDALHMQALPPR

SEQ ID NO: 133 - DNA, 1646 bp, Homo sapiens
acagaataatggcgtctcgtagccccaggcgacagcgtggaggggcgggtctgtcgattggatgaacgcagctgagattactcccagccactaaggacgaagaggtggggcggtggcgtcccacgcctcgtgcgacagtgggcggggctttgttgcctgagtaaccgtatgatggtggtggtggtggtgtcttcctgtctcaacgatacctattttctagtgctgagatcctgagacaatgaatcatagtgaaagattcgttttcattgcagagtggtatgatccaaatgcttcacttcttcgacgttatgagcttttattttacccaggggatggatctgttgaaatgcatgatgtaaagaatcatcgcacctttttaaagcggaccaaatatgataacctgcacttggaagatttatttataggcaacaaagtgaatgtcttttctcgacaactggtattaattgactatggggatcaatatacagctcgccagctgggcagtaggaaagaaaaaacgctagccctaattaaaccagatgcaatatcaaaggctggagaaataattgaaataataaacaaagctggatttactataaccaaactcaaaatgatgatgctttcaaggaaagaagcattggattttcatgtagatcaccagtcaagaccctttttcaatgagctgatccagtttattacaactggtcctattattgccatggagattttaagagatgatgctatatgtgaatggaaaagactgctgggacctgcaaactctggagtggcacgcacagatgcttctgaaagcattagagccctctttggaacagatggcataagaaatgcagcgcatggccctgattcttttgcttctgcggccagagaaatggagttgttttttccttcaagtggaggttgtgggccggcaaacactgctaaatttactaattgtacctgttgcattgttaaaccccatgctgtcagtgaaggactgttgggaaagatcctgatggctatccgagatgcaggttttgaaatctcagctatgcagatgttcaatatggatcgggttaatgttgaggaattctatgaagtttataaaggagtagtgaccgaatatcatgacatggtgacagaaatgtattctggcccttgtgtagcaatggagattcaacagaataatgctacaaagacatttcgagaattttgtggacctgctgatcctgaaattgcccggcatttacgccctggaactctcagagcaatctttggtaaaactaagatccagaatgctgttcactgtactgatctgccagaggatggcctattagaggttcaatacttcttcaagatcttggataattagtggtgtggaaagtaaagaagtcacaggttgggacatttagacaagagtgaatcacacacgaggaatgtgttcattcttttattgtccgttgttttaacctgactgaatacaagatcaacaagagcactgtactcctggcaattattacatatgttagaacatggattttgcactgtagacaacatttaacaccagtctatggggtactgcattgctttttataaagttcaaaataaagatttattttcaaacaaaaaaaaaaaaaaaaaaaaaaaaa

SEQ ID NO: 134 - protein, 376 aa, Homo sapiens
MNHSERFVFIAEWYDPNASLLRRYELLFYPGDGSVEMHDVKNHRTFLKRTKYDNLHLEDLFIGNKVNVFSRQLVLIDYGDQYTARQLGSRKEKTLALIKPDAISKAGEIIEIINKAGFTITKLKMMMLSRKEALDFHVDHQSRPFFNELIQFITTGPIIAMEILRDDAICEWKRLLGPANSGVARTDASESIRALFGTDGIRNAAHGPDSFASAAREMELFFPSSGGCGPANTAKFTNCTCCIVKPHAVSEGLLGKILMAIRDAGFEISAMQMFNMDRVNVEEFYEVYKGVVTEYHDMVTEMYSGPCVAMEIQQNNATKTFREFCGPADPEIARHLRPGTLRAIFGKTKIQNAVHCTDLPEDGLLEVQYFFKILDN

SEQ ID NO: 135 - DNA, 1615 bp, Homo sapiens
acagaataatggcgtctcgtagccccaggcgacagcgtggaggggcgggtctgtcgattggatgaacgcagctgagattactcccagccactaaggacgaagaggtggggcggtggcgtcccacgcctcgtgcgacagtgggcggggctttgttgcctgagtaaccgtatgatggtggtggtggtggtgtcttcctgtctcaacgatacctattttctagtgctgagatcctgagacaatgagtggtatgatccaaatgcttcacttcttcgacgttatgagcttttattttacccaggggatggatctgttgaaatgcatgatgtaaagaatcatcgcacctttttaaagcggaccaaatatgataacctgcacttggaagatttatttataggcaacaaagtgaatgtcttttctcgacaactggtattaattgactatggggatcaatatacagctcgccagctgggcagtaggaaagaaaaaacgctagccctaattaaaccagatgcaatatcaaaggctggagaaataattgaaataataaacaaagctggatttactataaccaaactcaaaatgatgatgctttcaaggaaagaagcattggattttcatgtagatcaccagtcaagaccctttttcaatgagctgatccagtttattacaactggtcctattattgccatggagattttaagagatgatgctatatgtgaatggaaaagactgctgggacctgcaaactctggagtggcacgcacagatgcttctgaaagcattagagccctctttggaacagatggcataagaaatgcagcgcatggccctgattcttttgcttctgcggccagagaaatggagttgttttttccttcaagtggaggttgtgggccggcaaacactgctaaatttactaattgtacctgttgcattgttaaaccccatgctgtcagtgaaggactgttgggaaagatcctgatggctatccgagatgcaggttttgaaatctcagctatgcagatgttcaatatggatcgggttaatgttgaggaattctatgaagtttataaaggagtagtgaccgaatatcatgacatggtgacagaaatgtattctggcccttgtgtagcaatggagattcaacagaataatgctacaaagacatttcgagaattttgtggacctgctgatcctgaaattgcccggcatttacgccctggaactctcagagcaatctttggtaaaactaagatccagaatgctgttcactgtactgatctgccagaggatggcctattagaggttcaatacttcttcaagatcttggataattagtggtgtggaaagtaaagaagtcacaggttgggacatttagacaagagtgaatcacacacgaggaatgtgttcattcttttattgtccgttgttttaacctgactgaatacaagatcaacaagagcactgtactcctggcaattattacatatgttagaacatggattttgcactgtagacaacatttaacaccagtctatggggtactgcattgctttttataaagttcaaaataaagatttattttcaaaaaaaaaaaaaaaaaaaaaaaaaaaaa

SEQ ID NO: 136 - protein, 340 aa, Homo sapiens
MHDVKNHRTFLKRTKYDNLHLEDLFIGNKVNVFSRQLVLIDYGDQYTARQLGSRKEKTLALIKPDAISKAGEIIEIINKAGFTITKLKMMMLSRKEALDFHVDHQSRPFFNELIQFITTGPIIAMEILRDDAICEWKRLLGPANSGVARTDASESIRALFGTDGIRNAAHGPDSFASAAREMELFFPSSGGCGPANTAKFTNCTCCIVKPHAVSEGLLGKILMAIRDAGFEISAMQMFNMDRVNVEEFYEVYKGVVTEYHDMVTEMYSGPCVAMEIQQNNATKTFREFCGPADPEIARHLRPGTLRAIFGKTKIQNAVHCTDLPEDGLLEVQYFFKILDN

SEQ ID NO: 137 - DNA, 2344 bp, Homo sapiens
agttttacttccgtttgtttaacagctggcccggaagtttaagtgaatatgcggcttgggctccaaaagttgctgtacggtattttattttaaagtagaaatctgtccgcttttcacttacggaggccttacagtgtgtgttctgtgttacttgagtttatacgcactgcagaatttgtttaccctgctcttttggaaacgtattccggaagcgaaaccctgagtaatcggaagtggttaggagtgagagagctgctggatatgcggagggactgggcgggtcggcttccgaatggaagaggtctgtgagaagttaacctggtgataccgatccgaagagcctatcaagtgaagccccctgaaatacggagaataagaatcttagaggttgttcagcagaagtcttggagtgcattttcagtggttaaggtgaaaaaatgactactaaaaatttagaaaccaaagtcaccgttacttcatccccaatccgaggagcaggagatggaatggaaactgaggaaccacctaaatctgttgaagttacctccggagtccaatctagaaagcatcatagtcttcagagtccatggaagaaagcagttccatcagagagcccaggagttcttcagctagggaaaatgctcactgaaaaagcaatggaagttaaagctgtaagaatattagttcccaaagctgctataactcatgatatccccaacaaaaatacaaaggttaagtctctgggacatcataaaggagaattccttggtcagtcagagggagttatagaacctaataaggaactctcagaggtaaagaatgtattggaaaagctcaagaattctgaaagaaggttactacaggacaaagaaggtctttcaaaccagctccgtgtacagacagaggtaaatcgtgagttaaaaaagttactggtggcttctgttggggatgatcttcagtatcactttgaacgtctagcccgtgagaaaaatcagcttattttagaaaatgaagccctaggtcgaaacacagctcagctttctgaacagttagaacgtatgtcaatacagtgtgatgtatggcgaagtaaattccttgcaagcagggtaatggcagatgagttaaccaactcaagagcagctttacagcgtcaaaaccgtgatgcacacggggctatacaagatctcctaagtgaacgggaacagtttcgtcaagaaatgatagctacccagaaattattggaggagctcttagtttccttgcaatggggaagagagcaaacttactcccctagtgtacaaccccacagcacagcagagctagcattaacaaatcacaagttggcaaaagcagtaaattctcatcttctgggaaatgttggcattaacaatcaaaaaaagattccatcaacagttgaattctgcagcaccccagctgagaaaatggctgaaacggttctaagaattttagatccagttacctgcaaagagagttcacctgataatccattttttgagtcttcaccaaccaccttacttgctacaaagaaaaatattggacgatttcatccctatactagatatgaaaatataactttcaattgctgcaatcactgccggggagaactgattgccctttaacagtcaatatgttggaggcatgctaagaataaacaactaaataactgtattagaaaaaaaagaaacttactaaatatcataatctgatgatatgtggtcctgaattggctactagtttaagcaaataaactgtaagtcatttatgggttagttggggaataaatggatatgggctggatattcggtaatatcattaatgaaaagcagattgcagaaatacagtatgatctcagtattttgaaattgtaaatacatgtacagacaaatacttagacagtatgcatactggtgttaacagtcacaatttctgggtgatgaaaatgtaacttgaaaccgctccatttctacaatgcacatttactgtttctgttataataaaagggtatgttagaaaaacaaaaaggaggctgggcatggtggctcatgcctctaatctcagcactttgggaggccaaggtgggcggatcacttgaggtctggagtttgagaccagcctgagcaacatggtgagaccccatctctacaaaaaaaatataaaaattagccaggtgtggtggtgcacacctgtggtcccagctacttgggaggctgaggtgggaaaatcacttgaacctgggagggtgaggttgcagtgagctgagatcatgccactgcactccagcctgggtgacaggaaaaaaaaaaaaaaaaaaaaaaaaaaaaaa

SEQ ID NO: 138 - protein, 400 aa, Homo sapiens
MTTKNLETKVTVTSSPIRGAGDGMETEEPPKSVEVTSGVQSRKHHSLQSPWKKAVPSESPGVLQLGKMLTEKAMEVKAVRILVPKAAITHDIPNKNTKVKSLGHHKGEFLGQSEGVIEPNKELSEVKNVLEKLKNSERRLLQDKEGLSNQLRVQTEVNRELKKLLVASVGDDLQYHFERLAREKNQLILENEALGRNTAQLSEQLERMSIQCDVWRSKFLASRVMADELTNSRAALQRQNRDAHGAIQDLLSEREQFRQEMIATQKLLEELLVSLQWGREQTYSPSVQPHSTAELALTNHKLAKAVNSHLLGNVGINNQKKIPSTVEFCSTPAEKMAETVLRILDPVTCKESSPDNPFFESSPTTLLATKKNIGRFHPYTRYENITFNCCNHCRGELIAL

SEQ ID NO: 139 - DNA, 1866 bp, Homo sapiens
cgctgttgccatggcagtgtggtcctggctgccgcggaggcaggtgccggggtctcctttgcctcaatgtgaagagcttagaaagaggaggagaggagaactcccccggccatctctgtgatcccagccgccgcattttacacagcatatttccttcacaaacagaaaatgaatgaaaataaagatactgattcaaagaaaagtgaagaatacgaagatgactttgaaaaggacctggagtggttaattaatgaaaatgaaaaaagtgatgccagcataatagagatggcttgtgagaaggaagagaatattaaccaagacttaaaagagaatgagacagtaatggagcacaccaaacggcattctgatcctgacaaatctttgcaggatgaggtctcaccaagaagaaatgacatcatttctgtaccaggtattcaacctttggatcccatatcagattcagatagtgaaaactctttccaggaatccaaactagaaagccagaaagacttggaggaggaagaggatgaggaagtaaggagatatattatggagaaaattgtacaagctaacaagcttctacagaatcaagaaccggtgaatgataaaagggagcgaaaacttaagttcaaggaccagttagttgatttggaagttcctccactagaagacactactacttttaaaaattattttgaaaacgaaaggaatatgtttgggaaactgtcacaattatgtatttccaatgattttggacaagaagatgtgctcctgtcacttactaatggaagctgtgaagaaaacaaggataggacaatactggtagagagagatggaaaatttgaacttctgaatttacaagacattgccagtcaggggtttttgcctcccattaataatgcaaatagtacagaaaatgaccctcagcagttgttacccagatcttccaactcctctgtcagtggcaccaagaaagaagattctacagcaaagattcatgctgtcactcactcatcaacaggagagccgctggcttatatcgctcagccaccactcaaccgcaagacttgtccaagctctgctgtcaactcagatcgaagtaaagggaatgggaaatctaatcacaggacacagtctgcacatatctcaccagtgacttcaacatactgtctttcccctcgacagaaagaactacaaaaacaactagaagaaaagagagaaaaactgaaaagagaggaagagcgacgaaaaatagaagaagagaaagaaaaaaagagagagaatgacatagtatttaaagcgtggttgcaaaagaaaagagagcaggtcttagaaatgaggagaattcagcgagcaaaggaaattgaagacatgaacagtagagaaaacagagatccacaacaagcttttcgattatggcttaaaaaaaagcacgaagagcagatgaaagaaagacagacagaagaactaagaaagcaagaggaatgtttattcttccttaaaggaacagaaggccgggaaagggcctttaaacaatggttaagaaggaaacggatggaaaaaatggcagagcaacaagctgtcagagagagaactagacagctccgactagaagctaagcgttctaaacagttacagcaccacctatatatgtcagaagccaaaccttttcgttttactgatcattataactgaaagtttctattaaatatttcagtgggcagctgctatcaaaattttggatatgatttcttagggtctgtgtactttggttgtattctaaattatggaaatggtatttatcttttattgacagtgaatttgtttttttaatactagaacaaaataaatttttttctcacagtg

SEQ ID NO: 140 - protein, 508 aa, Homo sapiens
MNENKDTDSKKSEEYEDDFEKDLEWLINENEKSDASIIEMACEKEENINQDLKENETVMEHTKRHSDPDKSLQDEVSPRRNDIISVPGIQPLDPISDSDSENSFQESKLESQKDLEEEEDEEVRRYIMEKIVQANKLLQNQEPVNDKRERKLKFKDQLVDLEVPPLEDTTTFKNYFENERNMFGKLSQLCISNDFGQEDVLLSLTNGSCEENKDRTILVERDGKFELLNLQDIASQGFLPPINNANSTENDPQQLLPRSSNSSVSGTKKEDSTAKIHAVTHSSTGEPLAYIAQPPLNRKTCPSSAVNSDRSKGNGKSNHRTQSAHISPVTSTYCLSPRQKELQKQLEEKREKLKREEERRKIEEEKEKKRENDIVFKAWLQKKREQVLEMRRIQRAKEIEDMNSRENRDPQQAFRLWLKKKHEEQMKERQTEELRKQEECLFFLKGTEGRERAFKQWLRRKRMEKMAEQQAVRERTRQLRLEAKRSKQLQHHLYMSEAKPFRFTDHYN

SEQ ID NO: 141 - DNA, 4916 bp, Homo sapiens
aaaaagtacagagtccagggaaagacttgcttgtaactttatgaattctggatttttttttttcctttgctttttcttaactttcactaagggttactgtagtctgatgtgtccttcccaaggccacgaaatttgacaagctgcacttttcttttgctcaatgatttctgctttaagccaaagaactgcctataatttcactaagaatgtcttctaattcagatactggggatttacaagagtctttaaagcacggacttacacctattgtgtctcaatttaaaatggtgaattactcctatgatgaagatctggaagagctttgtcccgtgtgtggagataaagtgtctgggtaccattatgggctcctcacctgtgaaagctgcaagggattttttaagcgaacagtccaaaataataaaaggtacacatgtatagaaaaccagaactgccaaattgacaaaacacagagaaagcgttgtccttactgtcgttttcaaaaatgtctaagtgttggaatgaagctagaagctgtaagggccgaccgaatgcgtggaggaaggaataagtttgggccaatgtacaagagagacagggccctgaagcaacagaaaaaagccctcatccgagccaatggacttaagctagaagccatgtctcaggtgatccaagctatgccctctgacctgaccatttcctctgcaattcaaaacatccactctgcctccaaaggcctacctctgaaccatgctgccttgcctcctacagactatgacagaagtccctttgtaacatcccccattagcatgacaatgccccctcacggcagcctgcaaggttaccaaacatatggccactttcctagccgggccatcaagtctgagtacccagacccctataccagctcacccgagtccataatgggctattcatatatggatagttaccagacgagctctccagcaagcatcccacatctgatactggaacttttgaagtgtgagccagatgagcctcaagtccaggctaaaatcatggcctatttgcagcaagagcaggctaaccgaagcaagcacgaaaagctgagcacctttgggcttatgtgcaaaatggcagatcaaactctcttctccattgtcgagtgggccaggagtagtatcttcttcagagaacttaaggttgatgaccaaatgaagctgcttcagaactgctggagtgagctcttaatcctcgaccacatttaccgacaagtggtacatggaaaggaaggatccatcttcctggttactgggcaacaagtggactattccataatagcatcacaagccggagccaccctcaacaacctcatgagtcatgcacaggagttagtggcaaaacttcgttctctccagtttgatcaacgagagttcgtatgtctgaaattcttggtgctctttagtttagatgtcaaaaaccttgaaaacttccagctggtagaaggtgtccaggaacaagtcaatgccgccctgctggactacacaatgtgtaactacccgcagcagacagagaaatttggacagctacttcttcgactacccgaaatccgggccatcagtatgcaggctgaagaatacctctactacaagcacctgaacggggatgtgccctataataaccttctcattgaaatgttgcatgccaaaagagcataagttacaacccctaggagctctgctttcaaaacaaaaagagattgggggagtggggagggggaagaagaacaggaagaaaaaaagtactctgaactgctccaagtaacgctaattaaaaacttgctttaaagatattgaatttaaaaaggcataataatcaaatacttaatagcaaataaatgatgtatcagggtatttgtattgcaaactgtgaatcaaaggcttcacagccccagaggattccatataaaagacattgtaatggagtggattgaactcacagatggataccaacacggtcagaagaaaaacggacagaacggttcttgtatatttaaactgatctccactatgaagaaatttaggaactaatcttattaattaggcttatacagcgggggatttgagcttacaggattcctccatggtaaagctgaactgaaacaattctcaagaatgcatcagctgtacctacaatagcccctccctcttcctttgaaggccccagcacctctgccctgtggtcaccgaatctgtactaaggacctgtgttcagccacacccagtggtagctccaccaaatcatgaacagcctaattttgagtgtctgtgtcttagacctgcaaacagctaataggaaattctattaatatgttagcttgccattttaaatatgttctgagggttgttttgtctcgtgttcatgatgttaagaaaatgcaggcagtatccctcatcttatgtaagtgtgaattaatattaagggaaatgactacaaactttcaaagcaaatgctccatagctaaagcaacttagaccttatttctgctactgttgctgaaatgtggctttggcattgttggatttcataaaaaatttctggcaggaagtcttgttagtatacatcagtctttttcatcatccaagtttgtagttcatttaaaaatacaacattaaacacattttgctaggatgtcaaatagtcacagttctaagtagttggaaacaaaattgacgcatgttaatctatgcaaagagaaaggaaaggatgaggtgatgtattgactcaaggttcattcttgctgcaattgaacatcctcaagagttgggatggaaatggtgatttttacatgtgtcctggaaagatattaaagtaattcaaatcttccccaaaggggaaaggaagagagtgatactgacctttttaagtcatagaccaaagtctgctgtagaacaaatatgggaggacaaagaatcgcaaattcttcaaatgactattatcagtattattaacatgcgatgccacaggtatgaaagtcttgccttatttcacaattttaaaaggtagctgtgcagatgtggatcaacatttgtttaaaataaagtattaatactttaaagtcaaataagatatagtgtttacattctttaggtcctgaggggcagggggatctgtgatataacaaaatagcaaaagcggtaatttccttaatgttatttttctgattggtaattatttttaacagtacttaattattctatgtcgtgagacactaaaatcaaaaacgggaatctcatttagactttaatttttttgagattatcggcggcacaatcactttgtagaaactgtaaaaaataaaagtatctcctagtcccttaattttttcataaatatttctggcttttgagtagtgtatttatattgtatatcatactttcaactgtagacaattatgatgctaatttattgtttcttggtttcacctttgtataagatatagccaagactgaagaaaccaaatatatgtgtttactgtagcatgtcttcaaattagtggaacttagttcagggacatagaagagtcttaatgaattaaaatcattcacttgattaaatgtctgtaaatcttcatcattcctactgtagtttatttaatatctattgtaaattatgtgacttgtagcttcctctggttttcaagtaaactcaacaaggtggagtcttacctggttttcctttccaagcattgtaaattgtataccaaagatattagttattacttctgtgtgtacaaagaggattattttattatgtttattaatcacctctaatactcatccacatgaagggtacacattaggtaagctgggcgttgactcatgcgcagtctcagtcacccgtgttatcttcgtggctcaaaggacaatgcaaaatcgccgatcagagctcatacccaaagcattacagagaacagcagcatcattgccctccccagctgaaaaacaagttggctagaagatacatggagaggaatggtgtggtcaacagttaatgaaacggttctatcatgcatgtgtaatgtggatggagacaattataagatttgactataactatttggagggtctttaacattgccaaaaaaacaaatatgttgatttttattttattttattttttattttaagaggcgggatcttgatctcacatgttgcccaggctggccttgaactcctgggctcaagcattcctcctgcctcagcctcccccatagctgggactaggggtgcatgccagcatacctggctacgttgactcttaaaatctatgttctcttattttaaagatacagtgctccccactgaaaattaaacctaaaaaatgtcacatattggtatgttgttaacctggtagattaaatcatgagaatgattagaaagacgggcaacacagcgggttacatccacactgctgatcacaccaacgacaggagctgataagcaagaaagcgtcacagccagcgtctgttcacccaaggttgacaagtgaagtttctctaatgttgattgttagccgatttgtaacctggcatttacttagcaactgccttatcaattacaggatttgccggtaaaagcagactcaaatataaaggtttttggcttaacttggtttattatagttgctctatgtttgtaaacagacaatctctaatgtctgattatttgtatcacagatctgcagctgccttggacttgaatccatgcaatgtttagagtgtgaagtcagttacttgttgatgttttcttactgtatcaatgaaatacatattgtcatgtcagttcttgccaggaacttctcaacaaaatggaattttttttttcagtatttcaataaatattgatatgcccagcctgataatttttaaaaaaaaaaaa

SEQ ID NO: 142 - protein, 495 aa, Homo sapiens
MSSNSDTGDLQESLKHGLTPIVSQFKMVNYSYDEDLEELCPVCGDKVSGYHYGLLTCESCKGFFKRTVQNNKRYTCIENQNCQIDKTQRKRCPYCRFQKCLSVGMKLEAVRADRMRGGRNKFGPMYKRDRALKQQKKALIRANGLKLEAMSQVIQAMPSDLTISSAIQNIHSASKGLPLNHAALPPTDYDRSPFVTSPISMTMPPHGSLQGYQTYGHFPSRAIKSEYPDPYTSSPESIMGYSYMDSYQTSSPASIPHLILELLKCEPDEPQVQAKIMAYLQQEQANRSKHEKLSTFGLMCKMADQTLFSIVEWARSSIFFRELKVDDQMKLLQNCWSELLILDHIYRQVVHGKEGSIFLVTGQQVDYSIIASQAGATLNNLMSHAQELVAKLRSLQFDQREFVCLKFLVLFSLDVKNLENFQLVEGVQEQVNAALLDYTMCNYPQQTEKFGQLLLRLPEIRAISMQAEEYLYYKHLNGDVPYNNLLIEMLHAKRA

SEQ ID NO: 143 - DNA, 5054 bp, Homo sapiens
aaaaagtacagagtccagggaaagacttgcttgtaactttatgaattctggatttttttttttcctttgctttttcttaactttcactaagggttactgtagtctgatgtgtccttcccaaggccacgaaatttgacaagctgcacttttcttttgctcaatgatttctgctttaagccaaagaactgcctataatttcactaagaatgtcttctaattcagatactggggatttacaagagtctttaaagcacggacttacacctattggtgctgggcttccggaccgacacggatcccccatccccgcccgcggtcgccttgtcatgctgcccaaagtggagacggaagccctgggactggctcgatcgcatggggaacagggccagatgccggaaaacatgcaagtgtctcaatttaaaatggtgaattactcctatgatgaagatctggaagagctttgtcccgtgtgtggagataaagtgtctgggtaccattatgggctcctcacctgtgaaagctgcaagggattttttaagcgaacagtccaaaataataaaaggtacacatgtatagaaaaccagaactgccaaattgacaaaacacagagaaagcgttgtccttactgtcgttttcaaaaatgtctaagtgttggaatgaagctagaagctgtaagggccgaccgaatgcgtggaggaaggaataagtttgggccaatgtacaagagagacagggccctgaagcaacagaaaaaagccctcatccgagccaatggacttaagctagaagccatgtctcaggtgatccaagctatgccctctgacctgaccatttcctctgcaattcaaaacatccactctgcctccaaaggcctacctctgaaccatgctgccttgcctcctacagactatgacagaagtccctttgtaacatcccccattagcatgacaatgccccctcacggcagcctgcaaggttaccaaacatatggccactttcctagccgggccatcaagtctgagtacccagacccctataccagctcacccgagtccataatgggctattcatatatggatagttaccagacgagctctccagcaagcatcccacatctgatactggaacttttgaagtgtgagccagatgagcctcaagtccaggctaaaatcatggcctatttgcagcaagagcaggctaaccgaagcaagcacgaaaagctgagcacctttgggcttatgtgcaaaatggcagatcaaactctcttctccattgtcgagtgggccaggagtagtatcttcttcagagaacttaaggttgatgaccaaatgaagctgcttcagaactgctggagtgagctcttaatcctcgaccacatttaccgacaagtggtacatggaaaggaaggatccatcttcctggttactgggcaacaagtggactattccataatagcatcacaagccggagccaccctcaacaacctcatgagtcatgcacaggagttagtggcaaaacttcgttctctccagtttgatcaacgagagttcgtatgtctgaaattcttggtgctctttagtttagatgtcaaaaaccttgaaaacttccagctggtagaaggtgtccaggaacaagtcaatgccgccctgctggactacacaatgtgtaactacccgcagcagacagagaaatttggacagctacttcttcgactacccgaaatccgggccatcagtatgcaggctgaagaatacctctactacaagcacctgaacggggatgtgccctataataaccttctcattgaaatgttgcatgccaaaagagcataagttacaacccctaggagctctgctttcaaaacaaaaagagattgggggagtggggagggggaagaagaacaggaagaaaaaaagtactctgaactgctccaagtaacgctaattaaaaacttgctttaaagatattgaatttaaaaaggcataataatcaaatacttaatagcaaataaatgatgtatcagggtatttgtattgcaaactgtgaatcaaaggcttcacagccccagaggattccatataaaagacattgtaatggagtggattgaactcacagatggataccaacacggtcagaagaaaaacggacagaacggttcttgtatatttaaactgatctccactatgaagaaatttaggaactaatcttattaattaggcttatacagcgggggatttgagcttacaggattcctccatggtaaagctgaactgaaacaattctcaagaatgcatcagctgtacctacaatagcccctccctcttcctttgaaggccccagcacctctgccctgtggtcaccgaatctgtactaaggacctgtgttcagccacacccagtggtagctccaccaaatcatgaacagcctaattttgagtgtctgtgtcttagacctgcaaacagctaataggaaattctattaatatgttagcttgccattttaaatatgttctgagggttgttttgtctcgtgttcatgatgttaagaaaatgcaggcagtatccctcatcttatgtaagtgtgaattaatattaagggaaatgactacaaactttcaaagcaaatgctccatagctaaagcaacttagaccttatttctgctactgttgctgaaatgtggctttggcattgttggatttcataaaaaatttctggcaggaagtcttgttagtatacatcagtctttttcatcatccaagtttgtagttcatttaaaaatacaacattaaacacattttgctaggatgtcaaatagtcacagttctaagtagttggaaacaaaattgacgcatgttaatctatgcaaagagaaaggaaaggatgaggtgatgtattgactcaaggttcattcttgctgcaattgaacatcctcaagagttgggatggaaatggtgatttttacatgtgtcctggaaagatattaaagtaattcaaatcttccccaaaggggaaaggaagagagtgatactgacctttttaagtcatagaccaaagtctgctgtagaacaaatatgggaggacaaagaatcgcaaattcttcaaatgactattatcagtattattaacatgcgatgccacaggtatgaaagtcttgccttatttcacaattttaaaaggtagctgtgcagatgtggatcaacatttgtttaaaataaagtattaatactttaaagtcaaataagatatagtgtttacattctttaggtcctgaggggcagggggatctgtgatataacaaaatagcaaaagcggtaatttccttaatgttatttttctgattggtaattatttttaacagtacttaattattctatgtcgtgagacactaaaatcaaaaacgggaatctcatttagactttaatttttttgagattatcggcggcacaatcactttgtagaaactgtaaaaaataaaagtatctcctagtcccttaattttttcataaatatttctggcttttgagtagtgtatttatattgtatatcatactttcaactgtagacaattatgatgctaatttattgtttcttggtttcacctttgtataagatatagccaagactgaagaaaccaaatatatgtgtttactgtagcatgtcttcaaattagtggaacttagttcagggacatagaagagtcttaatgaattaaaatcattcacttgattaaatgtctgtaaatcttcatcattcctactgtagtttatttaatatctattgtaaattatgtgacttgtagcttcctctggttttcaagtaaactcaacaaggtggagtcttacctggttttcctttccaagcattgtaaattgtataccaaagatattagttattacttctgtgtgtacaaagaggattattttattatgtttattaatcacctctaatactcatccacatgaagggtacacattaggtaagctgggcgttgactcatgcgcagtctcagtcacccgtgttatcttcgtggctcaaaggacaatgcaaaatcgccgatcagagctcatacccaaagcattacagagaacagcagcatcattgccctccccagctgaaaaacaagttggctagaagatacatggagaggaatggtgtggtcaacagttaatgaaacggttctatcatgcatgtgtaatgtggatggagacaattataagatttgactataactatttggagggtctttaacattgccaaaaaaacaaatatgttgatttttattttattttattttttattttaagaggcgggatcttgatctcacatgttgcccaggctggccttgaactcctgggctcaagcattcctcctgcctcagcctcccccatagctgggactaggggtgcatgccagcatacctggctacgttgactcttaaaatctatgttctcttattttaaagatacagtgctccccactgaaaattaaacctaaaaaatgtcacatattggtatgttgttaacctggtagattaaatcatgagaatgattagaaagacgggcaacacagcgggttacatccacactgctgatcacaccaacgacaggagctgataagcaagaaagcgtcacagccagcgtctgttcacccaaggttgacaagtgaagtttctctaatgttgattgttagccgatttgtaacctggcatttacttagcaactgccttatcaattacaggatttgccggtaaaagcagactcaaatataaaggtttttggcttaacttggtttattatagttgctctatgtttgtaaacagacaatctctaatgtctgattatttgtatcacagatctgcagctgccttggacttgaatccatgcaatgtttagagtgtgaagtcagttacttgttgatgttttcttactgtatcaatgaaatacatattgtcatgtcagttcttgccaggaacttctcaacaaaatggaattttttttttcagtatttcaataaatattgatatgcccagcctgataatttttaaaaaaaaaaaa

SEQ ID NO: 144 - protein, 541 aa, Homo sapiens
MSSNSDTGDLQESLKHGLTPIGAGLPDRHGSPIPARGRLVMLPKVETEALGLARSHGEQGQMPENMQVSQFKMVNYSYDEDLEELCPVCGDKVSGYHYGLLTCESCKGFFKRTVQNNKRYTCIENQNCQIDKTQRKRCPYCRFQKCLSVGMKLEAVRADRMRGGRNKFGPMYKRDRALKQQKKALIRANGLKLEAMSQVIQAMPSDLTISSAIQNIHSASKGLPLNHAALPPTDYDRSPFVTSPISMTMPPHGSLQGYQTYGHFPSRAIKSEYPDPYTSSPESIMGYSYMDSYQTSSPASIPHLILELLKCEPDEPQVQAKIMAYLQQEQANRSKHEKLSTFGLMCKMADQTLFSIVEWARSSIFFRELKVDDQMKLLQNCWSELLILDHIYRQVVHGKEGSIFLVTGQQVDYSIIASQAGATLNNLMSHAQELVAKLRSLQFDQREFVCLKFLVLFSLDVKNLENFQLVEGVQEQVNAALLDYTMCNYPQQTEKFGQLLLRLPEIRAISMQAEEYLYYKHLNGDVPYNNLLIEMLHAKRA

SEQ ID NO: 145 - DNA, 2256 bp, Homo sapiens
tgaaattcagggactctttggtggagcaattaccagtcaacttcagggtattatgataaactctgatctggggaggaaccaggactacatagatcaaggcagttttcttctttgagaaactatcccagatatcatcatagagtcttctgctcttcctcaactaccaaagaaaaacatcagcgaagcagcaggccatgcaccccccaaaaactccatctggggctcttcatagaaaaaggaaaatggcagcctggcccttctccaggctgtggaaagtctctgatccaattctcttccaaatgaccttgatcgctgctctgttgcctgctgttcttggcaattgtggtcctccacccactttatcatttgctgccccgatggatattacgttgactgagacacgcttcaaaactggaactactctgaaatacacctgcctccctggctacgtcagatcccattcaactcagacgcttacctgtaattctgatggcgaatgggtgtataacaccttctgtatctacaaacgatgcagacacccaggagagttacgtaatgggcaagtagagattaagacagatttatcttttggatcacaaatagaattcagctgttcagaaggatttttcttaattggctcaaccactagtcgttgtgaagtccaagatagaggagttggctggagtcatcctctcccacaatgtgaaattgtcaagtgtaagcctcctccagacatcaggaatggaaggcacagcggtgaagaaaatttctacgcatacggcttttctgtcacctacagctgtgacccccgcttctcactcttgggccatgcctccatttcttgcactgtggagaatgaaacaataggtgtttggagaccaagccctcctacctgtgaaaaaatcacctgtcgcaagccagatgtttcacatggggaaatggtctctggatttggacccatctataattacaaagacactattgtgtttaagtgccaaaaaggttttgttctcagaggcagcagtgtaattcattgtgatgctgatagcaaatggaatccttctcctcctgcttgtgagcccaatagttgtattaatttaccagacattccacatgcttcctgggaaacatatcctaggccgacaaaagaggatgtgtatgttgttgggactgtgttaaggtaccgctgtcatcctggctacaaacccactacagatgagcctacgactgtgatttgtcagaaaaatttgagatggaccccataccaaggatgtgaggcgttatgttgccctgaaccaaagctaaataatggtgaaatcactcaacacaggaaaagtcgtcctgccaatcactgtgtttatttctatggagatgagatttcattttcatgtcatgagaccagtaggttttcagctatatgccaaggagatggcacgtggagtccccgaacaccatcatgtggagacatttgcaattttcctcctaaaattgcccatgggcattataaacaatctagttcatacagctttttcaaagaagagattatatatgaatgtgataaaggctacattctggtcggacaggcgaaactctcctgcagttattcacactggtcagctccagcccctcaatgtaaagctctgtgtcggaaaccagaattagtgaatggaaggttgtctgtggataaggatcagtatgttgagcctgaaaatgtcaccatccaatgtgattctggctatggtgtggttggtccccaaagtatcacttgctctgggaacagaacctggtacccagaggtgcccaagtgtgagtgggagacccccgaaggctgtgaacaagtgctcacaggcaaaagactcatgcagtgtctcccaaacccagaggatgtgaaaatggccctggaggtatataagctgtctctggaaattgaacaactggaactacagagagacagcgcaagacaatccactttggataaagaactataatttttctcaaaagaaggaggaaaaggtgtcttgctggcttgcctcttgcaattcaatacagatcagtttagcaaatctactgtcaatttggcagtgatattcatcataataaatatctagaaatgataatttgctaaagtttagtgctttgagattgtgaaattattaatcatcctctgtgtggctcatgtttttgcttttcaacacacaaagcacaaattttttttcgattaaaaatgtatgtataaaaaactaaaaaaaaaaaaaa

SEQ ID NO: 146 - protein, 597 aa, Homo sapiens
MHPPKTPSGALHRKRKMAAWPFSRLWKVSDPILFQMTLIAALLPAVLGNCGPPPTLSFAAPMDITLTETRFKTGTTLKYTCLPGYVRSHSTQTLTCNSDGEWVYNTFCIYKRCRHPGELRNGQVEIKTDLSFGSQIEFSCSEGFFLIGSTTSRCEVQDRGVGWSHPLPQCEIVKCKPPPDIRNGRHSGEENFYAYGFSVTYSCDPRFSLLGHASISCTVENETIGVWRPSPPTCEKITCRKPDVSHGEMVSGFGPIYNYKDTIVFKCQKGFVLRGSSVIHCDADSKWNPSPPACEPNSCINLPDIPHASWETYPRPTKEDVYVVGTVLRYRCHPGYKPTTDEPTTVICQKNLRWTPYQGCEALCCPEPKLNNGEITQHRKSRPANHCVYFYGDEISFSCHETSRFSAICQGDGTWSPRTPSCGDICNFPPKIAHGHYKQSSSYSFFKEEIIYECDKGYILVGQAKLSCSYSHWSAPAPQCKALCRKPELVNGRLSVDKDQYVEPENVTIQCDSGYGVVGPQSITCSGNRTWYPEVPKCEWETPEGCEQVLTGKRLMQCLPNPEDVKMALEVYKLSLEIEQLELQRDSARQSTLDKEL

SEQ ID NO: 147 - DNA, 2045 bp, Homo sapiens
atgcactcccagagacctccacttgcactccttgagggctccaccctcgatagaaaaggagaaatcgcagcttcactcgtctctaggctgtggaaagtctccaattcaactctgttccaaatgatgctggtcactgttttgttggctaccattcttggtgactgtggtcctccacctgagttaccatttgcttttccaataaatccgttgtatgatactgaattcaaaactggaactactctgaagtacacctgccaccctgggcatggtaaaatcaattcaagtcgactgatttgtgatgccaaagactcgtggaactatagtatcttttgtgcaaagaaacgatgcagaaatccagaattaatcaatgggatagtggaagttaaaaaagatcttctccttggttcaaccatataattcagctgctcagagggatttttcttaattggctcaaccaccagtcattgtcagatccaaggtaaaggagttgattggagtgatcctctcccagaacgtgtaattgccaagtgcgagccccctccagacatcaggaatgggaagcacagcggtggagatcaagaattctacacatatgcctcctctgtcacctacagctgcaacccctacttctcactcataggcaacgtctccatctcctgcaccgtggagaatgaaacaataggtgtctggagcccaaaccctcctatctgtgaaaaaattgtctgtcgtcgaccacagattccaaaggcaatctttgtttctggatttggacccctctatacttacaaagactctattatggttaactgtgaggaaggttatatcctcagaggcagcagtttaatctattgtgaaacgaataatgagtggtatccttctgttccctcttgcatatccatgaatggttgcactgtcctaccggacatttcctatgcttcctgggagagaaatgactacaacctaagtgatcacgaaatatttgaaattggaactgagttgaaatatctatgcaaacctggctatagacctgttttagatgagcctctgactgtgacttgtcaggaaaatttgacatggacatcttccaatgagtgtgagagggtatgttgcccaacaccagatctggagaatatcagaatcataaatgaaaggaggtatttcactggtagatgtgtctatgcctatggagactatatttcatatatgtgtgatgaaggctattaccctatttctgttgacggggagagttcctgccacacagatggcacatggaagcctaaaatgccagcatgtgagccagtttgcagttaccctcccagtattgcccatggacactacaaggaagttattttaataactccttatcctgaggctacatatgaatgtgatgaaggatatgttttggctggatttgctacaatctactgcaagtcttttcactggcaacttgcacctcctcaatgtaaagctctgtgtctgaaaccagaaatagtgaatggaaggctgtctgtggataaggatcagtatgttgagtctgaaaatgttaccattgaatgtgattctggctatggtgtggttggtctcaaaagtatcacttgctcagagaagagaacctggtacccagaagtgcccaggtgtgagtgggaggcacctgaaggttgtgagcaagtgctcacaggcagaaaactcatgcagtgtctcccaagcccagaggatgtgaaagtggccctggaggtgtataagctgtctctggagataaaacaacttgaaaaagagagagacaaattgatgaacacccatcagaaattttctgaaaaagaggaaatgaaggacttatttttcccttcaaatcaacatacagaatcttcactcatccaccctactcttccttgagcaccatcactctcataagggtctgggctaggagaactttcttattactgccagagaaaaatgtgtaattattggtaatctagccttttgtagctcaaatgtccagtttcctggacttgaagtgctggttaattaaataattatttaccaaa

SEQ ID NO: 148 - DNA, 2308 bp, Homo sapiens
cccggggcgtatgacgccggagccctctgaccgcacctctgaccacaacaaacccctactccacccgtcttgtttgtcccacccttggtgacgcagagccccagcccagaccccgcccaaagcactcatttaactggtattgcggagccacgaggcttctgcttactgcaactcgctccggccgctgggcgtagctgcgactcggcggagtcccggcggcgcgtccttgttctaacccggcgcgccatgaccgtcgcgcggccgagcgtgcccgcggcgctgcccctcctcggggagctgccccggctgctgctgctggtgctgttgtgcctgccggccgtgtggggtgactgtggccttcccccagatgtacctaatgcccagccagctttggaaggccgtacaagttttcccgaggatactgtaataacgtacaaatgtgaagaaagctttgtgaaaattcctggcgagaaggactcagtgatctgccttaagggcagtcaatggtcagatattgaagagttctgcaatcgtagctgcgaggtgccaacaaggctaaattctgcatccctcaaacagccttatatcactcagaattattttccagtcggtactgttgtggaatatgagtgccgtccaggttacagaagagaaccttctctatcaccaaaactaacttgccttcagaatttaaaatggtccacagcagtcgaattttgtaaaaagaaatcatgccctaatccgggagaaatacgaaatggtcagattgatgtaccaggtggcatattatttggtgcaaccatctccttctcatgtaacacagggtacaaattatttggctcgacttctagtttttgtcttatttcaggcagctctgtccagtggagtgacccgttgccagagtgcagagaaatttattgtccagcaccaccacaaattgacaatggaataattcaaggggaacgtgaccattatggatatagacagtctgtaacgtatgcatgtaataaaggattcaccatgattggagagcactctatttattgtactgtgaataatgatgaaggagagtggagtggcccaccacctgaatgcagaggaaaatctctaacttccaaggtcccaccaacagttcagaaacctaccacagtaaatgttccaactacagaagtctcaccaacttctcagaaaaccaccacaaaaaccaccacaccaaatgctcaagcaacacggagtacacctgtttccaggacaaccaagcattttcatgaaacaaccccaaataaaggaagtggaaccacttcaggtactacccgtcttctatctgggcacacgtgtttcacgttgacaggtttgcttgggacgctagtaaccatgggcttgctgacttagccaaagaagagttaagaagaaaatacacacaagtatacagactgttcctagtttcttagacttatctgcatattggataaaataaatgcaattgtgctcttcatttaggatgctttcattgtctttaagatgtgttaggaatgtcaacagagcaaggagaaaaaaggcagtcctggaatcacattcttagcacacctacacctcttgaaaatagaacaacttgcagaattgagagtgattcctttcctaaaagtgtaagaaagcatagagatttgttcgtatttagaatgggatcacgaggaaaagagaaggaaagtgatttttttccacaagatctgtaatgttatttccacttataaaggaaataaaaaatgaaaaacattatttggatatcaaaagcaaataaaaacccaattcagtctcttctaagcaaaattgctaaagagagatgaaccacattataaagtaatctttggctgtaaggcattttcatctttccttcgggttggcaaaatattttaaaggtaaaacatgctggtgaaccaggggtgttgatggtgataagggaggaatatagaatgaaagactgaatcttcctttgttgcacaaatagagtttggaaaaagcctgtgaaaggtgtcttctttgacttaatgtctttaaaagtatccagagatactacaatattaacataagaaaagattatatattatttctgaatcgagatgtccatagtcaaatttgtaaatcttattcttttgtaatatttatttatatttatttatgacagtgaacattctgattttacatgtaaaacaagaaaagttgaagaagatatgtgaagaaaaatgtatttttcctaaatagaaataaatgatcccattttttggtaaaaaaaaaaaaaaaaaaaaaaaaa

SEQ ID NO: 149 - protein, 381 aa, Homo sapiens
MTVARPSVPAALPLLGELPRLLLLVLLCLPAVWGDCGLPPDVPNAQPALEGRTSFPEDTVITYKCEESFVKIPGEKDSVICLKGSQWSDIEEFCNRSCEVPTRLNSASLKQPYITQNYFPVGTVVEYECRPGYRREPSLSPKLTCLQNLKWSTAVEFCKKKSCPNPGEIRNGQIDVPGGILFGATISFSCNTGYKLFGSTSSFCLISGSSVQWSDPLPECREIYCPAPPQIDNGIIQGERDHYGYRQSVTYACNKGFTMIGEHSIYCTVNNDEGEWSGPPPECRGKSLTSKVPPTVQKPTTVNVPTTEVSPTSQKTTTKTTTPNAQATRSTPVSRTTKHFHETTPNKGSGTTSGTTRLLSGHTCFTLTGLLGTLVTMGLLT

SEQ ID NO: 150 - DNA, 4159 bp, Homo sapiens
cacagctgcttgctgctccagccttgccctcccagagctgccggacgctcgcgggtctcggaacgcatcccgccgcgggggcttcggccgtggcatgggcgccgcgggcctgctcggggttttcttggctctcgtcgcaccgggggtcctcgggatttcttgtggctctcctccgcctatcctaaatggccggattagttattattctacccccattgctgttggtaccgtgataaggtacagttgttcaggtaccttccgcctcattggagaaaaaagtctattatgcataactaaagacaaagtggatggaacctgggataaacctgctcctaaatgtgaatatttcaataaatattcttcttgccctgagcccatagtaccaggaggatacaaaattagaggctctacaccctacagacatggtgattctgtgacatttgcctgtaaaaccaacttctccatgaacggaaacaagtctgtttggtgtcaagcaaataatatgtgggggccgacacgactaccaacctgtgtaagtgttttccctctcgagtgtccagcacttcctatgatccacaatggacatcacacaagtgagaatgttggctccattgctccaggattgtctgtgacttacagctgtgaatctggttacttgcttgttggagaaaagatcattaactgtttgtcttcgggaaaatggagtgctgtcccccccacatgtgaagaggcacgctgtaaatctctaggacgatttcccaatgggaaggtaaaggagcctccaattctccgggttggtgtaactgcaaactttttctgtgatgaagggtatcgactgcaaggcccaccttctagtcggtgtgtaattgctggacagggagttgcttggaccaaaatgccagtatgtgaagaaattttttgcccatcacctccccctattctcaatggaagacatataggcaactcactagcaaatgtctcatatggaagcatagtcacttacacttgtgacccggacccagaggaaggagtgaacttcatccttattggagagagcactctccgttgtacagttgatagtcagaagactgggacctggagtggccctgccccacgctgtgaactttctacttctgcggttcagtgtccacatccccagatcctaagaggccgaatggtatctgggcagaaagatcgatatacctataacgacactgtgatatttgcttgcatgtttggcttcaccttgaagggcagcaagcaaatccgatgcaatgcccaaggcacatgggagccatctgcaccagtctgtgaaaaggaatgccaggcccctcctaacatcctcaatgggcaaaaggaagatagacacatggtccgctttgaccctggaacatctataaaatatagctgtaaccctggctatgtgctggtgggagaagaatccatacagtgtacctctgagggggtgtggacaccccctgtaccccaatgcaaagtggcagcgtgtgaagctacaggaaggcaactcttgacaaaaccccagcaccaatttgttagaccagatgtcaactcttcttgtggtgaagggtacaagttaagtgggagtgtttatcaggagtgtcaaggcacaattccttggtttatggagattcgtctttgtaaagaaatcacctgcccaccaccccctgttatctacaatggggcacacaccgggagttccttagaagattttccatatggaaccacggtcacttacacatgtaaccctgggccagaaagaggagtggaattcagcctcattggagagagcaccatccgttgtacaagcaatgatcaagaaagaggcacctggagtggccctgctcccctgtgtaaactttccctccttgctgtccagtgctcacatgtccatattgcaaatggatacaagatatctggcaaggaagccccatatttctacaatgacactgtgacattcaagtgttatagtggatttactttgaagggcagtagtcagattcgttgcaaagctgataacacctgggatcctgaaataccagtttgtgaaaaaggctgccagtcacctcctgggctccaccatggtcgtcatacaggtggaaatacggtcttctttgtctctgggatgactgtagactacacttgtgaccctggctatttgcttgtgggaaacaaatccattcactgtatgccttcaggaaattggagtccttctgccccacggtgtgaagaaacatgccagcatgtgagacagagtcttcaagaacttccagctggttcacgtgtggagctagttaatacgtcctgccaagatgggtaccagttgactggacatgcttatcagatgtgtcaagatgctgaaaatggaatttggttcaaaaagattccactttgtaaagttattcactgtcaccctccaccagtgattgtcaatgggaagcacacaggcatgatggcagaaaactttctatatggaaatgaagtctcttatgaatgtgaccaaggattctatctcctgggagagaaaaaattgcagtgcagaagtgattctaaaggacatggatcttggagcgggccttccccacagtgcttacgatctcctcctgtgactcgctgccctaatccagaagtcaaacatgggtacaagctcaataaaacacattctgcatattcccacaatgacatagtgtatgttgactgcaatcctggcttcatcatgaatggtagtcgcgtgattaggtgtcatactgataacacatgggtgccaggtgtgccaacttgtatcaaaaaagccttcatagggtgtccacctccgcctaagacccctaacgggaaccatactggtggaaacatagctcgattttctcctggaatgtcaatcctgtacagctgtgaccaaggctacctgctggtgggagaggcactccttctttgcacacatgagggaacctggagccaacctgcccctcattgtaaagaggtaaactgtagctcaccagcagatatggatggaatccagaaagggctggaaccaaggaaaatgtatcagtatggagctgttgtaactctggagtgtgaagatgggtatatgctggaaggcagtccccagagccagtgccaatcggatcaccaatggaaccctcccctggcggtttgcagatcccgttcacttgctcctgtcctttgtggtattgctgcaggtttgatacttcttaccttcttgattgtcattaccttatacgtgatatcaaaacacagagcacgcaattattatacagatacaagccagaaagaagcttttcatttagaagcacgagaagtatattctgttgatccatacaacccagccagctgatcagaagacaaactggtgtgtgcctcattgcttggaattcagcggaatattgattagaaagaaactgctctaatatcagcaagtctctttatatggcctcaagatcaatgaaatgatgtcataagcgatcacttcctatatgcacttattctcaagaagaacatctttatggtaaagatgggagcccagtttcactgccatatactcttcaaggactttctgaagcctcacttatgagatgcctgaagccaggccatggctataaacaattacatggctctaaaaagttttgccctttttaaggaaggcactaaaaagagctgtcctggtatctagacccatcttctttttgaaatcagcatactcaatgttactatctgcttttggttataatgtgtttttaattatctaaagtatgaagcattttctggggttatgatggctttacctttattaggaagtatggttttattttgatagtagcttcctcctctggtggtgttaatcatttcatttttacccttacttggtttgagtttctctcacattactgtatatactttgcctttccataatcactcagtgattgcaatttgcacaagtttttttaaattatgggaatcaagatttaatcctagagatttggtgtacaattcaggctttggatgtttctttagcagttttgtgataagttctagttgcttgtaaaatttcacttaataatgtgtacattagtcattcaataaattgtaattgtaaagaaaacatacaaaaaaaaaaaaaaaa

SEQ ID NO: 151 - protein, 1092 aa, Homo sapiens
MGAAGLLGVFLALVAPGVLGISCGSPPPILNGRISYYSTPIAVGTVIRYSCSGTFRLIGEKSLLCITKDKVDGTWDKPAPKCEYFNKYSSCPEPIVPGGYKIRGSTPYRHGDSVTFACKTNFSMNGNKSVWCQANNMWGPTRLPTCVSVFPLECPALPMIHNGHHTSENVGSIAPGLSVTYSCESGYLLVGEKIINCLSSGKWSAVPPTCEEARCKSLGRFPNGKVKEPPILRVGVTANFFCDEGYRLQGPPSSRCVIAGQGVAWTKMPVCEEIFCPSPPPILNGRHIGNSLANVSYGSIVTYTCDPDPEEGVNFILIGESTLRCTVDSQKTGTWSGPAPRCELSTSAVQCPHPQILRGRMVSGQKDRYTYNDTVIFACMFGFTLKGSKQIRCNAQGTWEPSAPVCEKECQAPPNILNGQKEDRHMVRFDPGTSIKYSCNPGYVLVGEESIQCTSEGVWTPPVPQCKVAACEATGRQLLTKPQHQFVRPDVNSSCGEGYKLSGSVYQECQGTIPWFMEIRLCKEITCPPPPVIYNGAHTGSSLEDFPYGTTVTYTCNPGPERGVEFSLIGESTIRCTSNDQERGTWSGPAPLCKLSLLAVQCSHVHIANGYKISGKEAPYFYNDTVTFKCYSGFTLKGSSQIRCKADNTWDPEIPVCEKGCQSPPGLHHGRHTGGNTVFFVSGMTVDYTCDPGYLLVGNKSIHCMPSGNWSPSAPRCEETCQHVRQSLQELPAGSRVELVNTSCQDGYQLTGHAYQMCQDAENGIWFKKIPLCKVIHCHPPPVIVNGKHTGMMAENFLYGNEVSYECDQGFYLLGEKKLQCRSDSKGHGSWSGPSPQCLRSPPVTRCPNPEVKHGYKLNKTHSAYSHNDIVYVDCNPGFIMNGSRVIRCHTDNTWVPGVPTCIKKAFIGCPPPPKTPNGNHTGGNIARFSPGMSILYSCDQGYLLVGEALLLCTHEGTWSQPAPHCKEVNCSSPADMDGIQKGLEPRKMYQYGAVVTLECEDGYMLEGSPQSQCQSDHQWNPPLAVCRSRSLAPVLCGIAAGLILLTFLIVITLYVISKHRARNYYTDTSQKEAFHLEAREVYSVDPYNPAS

SEQ ID NO: 152 - DNA, 3982 bp, Homo sapiens
cacagctgcttgctgctccagccttgccctcccagagctgccggacgctcgcgggtctcggaacgcatcccgccgcgggggcttcggccgtggcatgggcgccgcgggcctgctcggggttttcttggctctcgtcgcaccgggggtcctcgggatttcttgtggctctcctccgcctatcctaaatggccggattagttattattctacccccattgctgttggtaccgtgataaggtacagttgttcaggtaccttccgcctcattggagaaaaaagtctattatgcataactaaagacaaagtggatggaacctgggataaacctgctcctaaatgtgaatatttcaataaatattcttcttgccctgagcccatagtaccaggaggatacaaaattagaggctctacaccctacagacatggtgattctgtgacatttgcctgtaaaaccaacttctccatgaacggaaacaagtctgtttggtgtcaagcaaataatatgtgggggccgacacgactaccaacctgtgtaagtgttttccctctcgagtgtccagcacttcctatgatccacaatggacatcacacaagtgagaatgttggctccattgctccaggattgtctgtgacttacagctgtgaatctggttacttgcttgttggagaaaagatcattaactgtttgtcttcgggaaaatggagtgctgtcccccccacatgtgaagaggcacgctgtaaatctctaggacgatttcccaatgggaaggtaaaggagcctccaattctccgggttggtgtaactgcaaactttttctgtgatgaagggtatcgactgcaaggcccaccttctagtcggtgtgtaattgctggacagggagttgcttggaccaaaatgccagtatgtgaagaaattttttgcccatcacctccccctattctcaatggaagacatataggcaactcactagcaaatgtctcatatggaagcatagtcacttacacttgtgacccggacccagaggaaggagtgaacttcatccttattggagagagcactctccgttgtacagttgatagtcagaagactgggacctggagtggccctgccccacgctgtgaactttctacttctgcggttcagtgtccacatccccagatcctaagaggccgaatggtatctgggcagaaagatcgatatacctataacgacactgtgatatttgcttgcatgtttggcttcaccttgaagggcagcaagcaaatccgatgcaatgcccaaggcacatgggagccatctgcaccagtctgtgaaaaggaatgccaggcccctcctaacatcctcaatgggcaaaaggaagatagacacatggtccgctttgaccctggaacatctataaaatatagctgtaaccctggctatgtgctggtgggagaagaatccatacagtgtacctctgagggggtgtggacaccccctgtaccccaatgcaaagtggcagcgtgtgaagctacaggaaggcaactcttgacaaaaccccagcaccaatttgttagaccagatgtcaactcttcttgtggtgaagggtacaagttaagtgggagtgtttatcaggagtgtcaaggcacaattccttggtttatggagattcgtctttgtaaagaaatcacctgcccaccaccccctgttatctacaatggggcacacaccgggagttccttagaagattttccatatggaaccacggtcacttacacatgtaaccctgggccagaaagaggagtggaattcagcctcattggagagagcaccatccgttgtacaagcaatgatcaagaaagaggcacctggagtggccctgctcccctgtgtaaactttccctccttgctgtccagtgctcacatgtccatattgcaaatggatacaagatatctggcaaggaagccccatatttctacaatgacactgtgacattcaagtgttatagtggatttactttgaagggcagtagtcagattcgttgcaaagctgataacacctgggatcctgaaataccagtttgtgaaaaagaaacatgccagcatgtgagacagagtcttcaagaacttccagctggttcacgtgtggagctagttaatacgtcctgccaagatgggtaccagttgactggacatgcttatcagatgtgtcaagatgctgaaaatggaatttggttcaaaaagattccactttgtaaagttattcactgtcaccctccaccagtgattgtcaatgggaagcacacaggcatgatggcagaaaactttctatatggaaatgaagtctcttatgaatgtgaccaaggattctatctcctgggagagaaaaaattgcagtgcagaagtgattctaaaggacatggatcttggagcgggccttccccacagtgcttacgatctcctcctgtgactcgctgccctaatccagaagtcaaacatgggtacaagctcaataaaacacattctgcatattcccacaatgacatagtgtatgttgactgcaatcctggcttcatcatgaatggtagtcgcgtgattaggtgtcatactgataacacatgggtgccaggtgtgccaacttgtatcaaaaaagccttcatagggtgtccacctccgcctaagacccctaacgggaaccatactggtggaaacatagctcgattttctcctggaatgtcaatcctgtacagctgtgaccaaggctacctgctggtgggagaggcactccttctttgcacacatgagggaacctggagccaacctgcccctcattgtaaagaggtaaactgtagctcaccagcagatatggatggaatccagaaagggctggaaccaaggaaaatgtatcagtatggagctgttgtaactctggagtgtgaagatgggtatatgctggaaggcagtccccagagccagtgccaatcggatcaccaatggaaccctcccctggcggtttgcagatcccgttcacttgctcctgtcctttgtggtattgctgcaggtttgatacttcttaccttcttgattgtcattaccttatacgtgatatcaaaacacagagcacgcaattattatacagatacaagccagaaagaagcttttcatttagaagcacgagaagtatattctgttgatccatacaacccagccagctgatcagaagacaaactggtgtgtgcctcattgcttggaattcagcggaatattgattagaaagaaactgctctaatatcagcaagtctctttatatggcctcaagatcaatgaaatgatgtcataagcgatcacttcctatatgcacttattctcaagaagaacatctttatggtaaagatgggagcccagtttcactgccatatactcttcaaggactttctgaagcctcacttatgagatgcctgaagccaggccatggctataaacaattacatggctctaaaaagttttgccctttttaaggaaggcactaaaaagagctgtcctggtatctagacccatcttctttttgaaatcagcatactcaatgttactatctgcttttggttataatgtgtttttaattatctaaagtatgaagcattttctggggttatgatggctttacctttattaggaagtatggttttattttgatagtagcttcctcctctggtggtgttaatcatttcatttttacccttacttggtttgagtttctctcacattactgtatatactttgcctttccataatcactcagtgattgcaatttgcacaagtttttttaaattatgggaatcaagatttaatcctagagatttggtgtacaattcaggctttggatgtttctttagcagttttgtgataagttctagttgcttgtaaaatttcacttaataatgtgtacattagtcattcaataaattgtaattgtaaagaaaacatacaaaaaaaaaaaaaaaa

SEQ ID NO: 153 - protein, 1033 aa, Homo sapiens
MGAAGLLGVFLALVAPGVLGISCGSPPPILNGRISYYSTPIAVGTVIRYSCSGTFRLIGEKSLLCITKDKVDGTWDKPAPKCEYFNKYSSCPEPIVPGGYKIRGSTPYRHGDSVTFACKTNFSMNGNKSVWCQANNMWGPTRLPTCVSVFPLECPALPMIHNGHHTSENVGSIAPGLSVTYSCESGYLLVGEKIINCLSSGKWSAVPPTCEEARCKSLGRFPNGKVKEPPILRVGVTANFFCDEGYRLQGPPSSRCVIAGQGVAWTKMPVCEEIFCPSPPPILNGRHIGNSLANVSYGSIVTYTCDPDPEEGVNFILIGESTLRCTVDSQKTGTWSGPAPRCELSTSAVQCPHPQILRGRMVSGQKDRYTYNDTVIFACMFGFTLKGSKQIRCNAQGTWEPSAPVCEKECQAPPNILNGQKEDRHMVRFDPGTSIKYSCNPGYVLVGEESIQCTSEGVWTPPVPQCKVAACEATGRQLLTKPQHQFVRPDVNSSCGEGYKLSGSVYQECQGTIPWFMEIRLCKEITCPPPPVIYNGAHTGSSLEDFPYGTTVTYTCNPGPERGVEFSLIGESTIRCTSNDQERGTWSGPAPLCKLSLLAVQCSHVHIANGYKISGKEAPYFYNDTVTFKCYSGFTLKGSSQIRCKADNTWDPEIPVCEKETCQHVRQSLQELPAGSRVELVNTSCQDGYQLTGHAYQMCQDAENGIWFKKIPLCKVIHCHPPPVIVNGKHTGMMAENFLYGNEVSYECDQGFYLLGEKKLQCRSDSKGHGSWSGPSPQCLRSPPVTRCPNPEVKHGYKLNKTHSAYSHNDIVYVDCNPGFIMNGSRVIRCHTDNTWVPGVPTCIKKAFIGCPPPPKTPNGNHTGGNIARFSPGMSILYSCDQGYLLVGEALLLCTHEGTWSQPAPHCKEVNCSSPADMDGIQKGLEPRKMYQYGAVVTLECEDGYMLEGSPQSQCQSDHQWNPPLAVCRSRSLAPVLCGIAAGLILLTFLIVITLYVISKHRARNYYTDTSQKEAFHLEAREVYSVDPYNPAS

SEQ ID NO: 154 - DNA, 3597 bp, Homo sapiens
aaagggcagctccgggggaaagagggtggcgtcccggggaagcccgcagccgccgccgatgtcgctgggactcggaagtgccgaaagaggggtgttgggaactcgcggcgcgcgtgaacgttgccgtcgccgccgcccgggacagcccggagaaactctcagcgtaggcatcgggaaccttcgtgccaaggagccatgccgccccgatgggaactggcactttacctacttgcctcactaggcttccacttctattccttctatgaagtttacaaagtctccagagaacacgaagaggagctggaccaggaatttgagctggagactgacactttatttggaggattaaagaaggatgcgaccgactttgagtggagcttctggatggaatgggggaagcagtggctggtgtggcttctccttggccacatggtagtgtctcaaatggccacactgctggcaagaaagcacagaccctggattctcatgctctatgggatgtgggcctgctggtgtgtgctggggacccctggtgtggctatggttttgctccataccaccatctctttctgcgtggcccagttccggtctcagctcctgacgtggctctgttctctcctcctcctctccacactgaggctgcagggtgtggaagaagttaagagaaggtggtacaagacagaaaacgagtactacctgctgcagttcacgctgaccgttcgctgcctctactacaccagcttcagcctggagctctgctggcagcagctgcctgctgcatcgacctcctactcctttccctggatgctggcctatgtcttttattatccagtcttacacaatgggcccatcctcagcttctcggagttcatcaaacagatgcagcagcaggagcatgactccctgaaggccagcctgtgtgtcctggccctggggctgggccgccttctttgctggtggtggctggccgagctgatggctcacctgatgtacatgcatgccatctacagcagcatccccctcctggagactgtctcttgttggaccttaggaggactggcgttagcccaggtgctctttttctacgtgaagtacttggtgctctttggcgtgcctgctctgctcatgcgcctggatggactcactccacccgccctcccccgctgcgtgagcaccatgttcagtttcaccgggatgtggaggtattttgatgttggactgcataatttcttaatcaggtatgtgtacattccagtgggcgggtcccagcatggcctgctggggacactgttttccacggcgatgacatttgcatttgtgagctactggcatggcggctacgactacctctggtgctgggcagcgctcaactggctgggagtcactgtggagaatggagtccggaggctggtggagactccctgcatccaggacagtctggcccgatacttctccccacaagctcgccgtcgattccacgctgcccttgcttcttgttccacctcgatgctgatcctgtccaacctggtatttcttgggggcgatgaggttgggaaaacctactggaataggatcttcatacaaggctggccttgggtgaccctctctgtcctgggattcctgtactgctactcccacgtgggcattgcctgggcccagacctacgccacggactaatgctgttgggcccaggccagtcattgttgctggcctccaaggcaaatagtgcttcaccctgacctctcactccaggacagcctctaagggatttgatctgctcatcttcagttgaatgccctcactccaagactggatgctggatctcatagaaaattcacagccagacaatcttctaatctggagtctttgagatcttctaccccaactcatcattttcctattgaggaaacgggtccagggcagtcgtgtgtcttacccagctacacagggtgacattttggtctagaacctagtctcatgagccctttgcattctttccccttaagcaagaatagaatgtagtggaaatttattgattgagacacagaaatcctgattagtgataggcctgtcttctgggcaatatttctaaaatatttgagtgacattgatgtttaagtgacctccttcatcacatcctgcagtatctccagaagcagcactagggtttgagtttcatgcttcagcccctctgtaggaatgagaccaagccacagctgtcttttgaattacgtagtcgaagaagacggtagcagccctgtagcattctaaggcatctatacccaaggagtcctgtgatttgagcttcagcagggtgatctacatttgggtgcttgtttctgagatttgcagagaagtataacatggtagttcctctaccttacagttaatcgtttcttaataaagaagcagaatttagaaaccacaggatagtgtacccacagatgggtgttatcaaggccagtcatgaggatggtgtcctggagtcttgtccaccctctccatacaagtctcaaaagtcatcctcctactcagtgattcacgtttagtggtttatattattaaggtttgattcaaacagagccttttctgtcctgtagataatctacatgtttgtagaattattttgaatatgtttgaggaaaatgtttaaaatctaaatatactcacataacttgattattcactcctctgaaaagatgctggataggctaccaaagttcccaagtggtagataattcagaagacttgtttgaatttggatttttttttttttttttggagtggggaagggtataaaggaggcttaaaatttgaatccataatatatctaattacaggagaatttacaacatctcaagtacgtaaattaagttgtcattgagtgaaaggttcacttggacctagtgctgcctcctgtttattacatagcatggcccttatgtcttgagttgaggttatcatctcaatgaggcttaagctcctagagtacaggaccattttgttgattgtctttcttcatagcttctctgcttggcaaagagatgggagggggccagatactgactacctggggtaggcacattgtgtgttaaagcaagacagaggccagagaggggcaggtagacctgcatagcagcagcctcagcagctgtcttggtaaaggagagagagagacatggggccagtaattccggggtgctcagaagttttaggagggaatgagcctcagggaggagtgagcacctaaatgaacgcagtaaaccttcatggaccaacagtgattgaggatttgtgggcagccagagggagtctgactgaagtttacttggaaagaaagggcttgctaagaaaaaagggagtaaaaatgatgatagggaagtgtctaatgtatgtgcacatataagtaatacaaaagttttgagctcttccaagtataccatttatatacaaacaaataggtttattcattcattaaactactttggaagcgtcagtggatatatttgaaagtggtaatcctgaatctcttttaaactattatatgattcataatggttctcaggaattaataaatgattactgtgtttagctctg

SEQ ID NO: 155 - protein, 493 aa, Homo sapiens
MPPRWELALYLLASLGFHFYSFYEVYKVSREHEEELDQEFELETDTLFGGLKKDATDFEWSFWMEWGKQWLVWLLLGHMVVSQMATLLARKHRPWILMLYGMWACWCVLGTPGVAMVLLHTTISFCVAQFRSQLLTWLCSLLLLSTLRLQGVEEVKRRWYKTENEYYLLQFTLTVRCLYYTSFSLELCWQQLPAASTSYSFPWMLAYVFYYPVLHNGPILSFSEFIKQMQQQEHDSLKASLCVLALGLGRLLCWWWLAELMAHLMYMHAIYSSIPLLETVSCWTLGGLALAQVLFFYVKYLVLFGVPALLMRLDGLTPPALPRCVSTMFSFTGMWRYFDVGLHNFLIRYVYIPVGGSQHGLLGTLFSTAMTFAFVSYWHGGYDYLWCWAALNWLGVTVENGVRRLVETPCIQDSLARYFSPQARRRFHAALASCSTSMLILSNLVFLGGDEVGKTYWNRIFIQGWPWVTLSVLGFLYCYSHVGIAWAQTYATD

SEQ ID NO: 156 - DNA, 3127 bp, Homo sapiens
gaagagggcgcgagggtagcagccagagggagccgccagccctgcctgcggatccccgccgggcgcatggggcgcttcgagccgggactgcgtgcgggccccgaggccagtttcctgctgtcgtaagaagccgcgccaggacgcccgccggaccccgagctgctgggaggatgaccatggctgggggcaggaggggactagtggcccctcaaaacacgtttctggagaatattgttcggcggtccaatgatactaattttgtgttggggaatgctcagatagtggactggcctattgtgtacagcaatgatggattttgcaagctgtctggctatcacagggcagaagtgatgcaaaaaagcagcacctgcagttttatgtatggggagctgactgataaagacacgattgaaaaagtgcggcaaacatttgagaactatgagatgaattcctttgaaattctgatgtacaagaagaacaggacacctgtgtggttctttgtgaaaattgctccaattcgaaacgaacaggataaagtggttttatttctttgcactttcagtgacataacagctttcaaacagccaattgaggatgattcatgtaaaggctgggggaagtttgctcggctgacaagagcactgacaagcagcaggggtgtcctgcagcagctggctccaagcgtgcaaaaaggcgagaatgtccacaagcactcccgcctggcagaggtcctacagctgggctcagacatccttccccagtacaagcaagaggcaccaaagactccccctcacatcatcttacattattgtgtttttaagaccacgtgggattggatcatcttgatcttgaccttctatacagccatcttggtcccttataatgtctccttcaaaaccaggcagaataatgtggcctggctggttgttgatagcatcgtggatgttatctttttggtggacattgtgctcaattttcataccacctttgttggaccagcaggggaggtgatttctgaccccaaacttatccgcatgaactacctgaagacgtggtttgtgattgaccttctgtcctgtttgccatatgatgtcatcaacgcttttgagaacgtggatgagggcatcagcagcctgttcagctctctaaaagttgtccggctgctccgtcttgggcgagtggcccgtaagctggaccactacattgaatatggagctgctgtgctggtcctgctggtgtgtgtgtttgggctggctgcacactggatggcctgcatctggtacagcattggggactatgagatctttgacgaggacaccaagacaatccgcaacaacagctggctgtaccaactagcgatggacattggcaccccttaccagtttaatgggtctggctcagggaagtgggaaggtggtcccagcaagaattctgtctacatctcctcgttgtatttcacaatgaccagcctcaccagtgtgggctttgggaacatcgccccatccacagacattgagaagatctttgcagtggccatcatgatgattggctcacttctctatgccaccatcttcgggaatgtgacgactattttccaacagatgtatgccaacaccaacagataccatgagatgctcaacagtgttcgggacttcctgaagctctaccaggtgccaaaaggattgagtgagcgagtaatggattatattgtgtccacttggtccatgtccagaggcattgacacagagaaggtcctgcagatctgccccaaggacatgagagccgacatctgcgtgcacctgaaccgcaaggtgttcaaggagcacccggccttccggctggccagtgatggctgcctccgggcactggccatggagttccagacggtgcactgtgccccaggggacctcatctaccatgcaggagagagcgttgacagcctctgctttgtggtttctggctccctggaggtgatccaagatgatgaggtggtggccattctaggaaaaggagacgtgtttggagatgtgttctggaaggaagccacccttgcccagtcctgtgccaatgttagggccttgacctactgtgatctgcatgtgatcaagcgggatgccctgcagaaagtgctggaattctacacggccttctcccattccttctcccggaacctgattctgacgtacaacttgaggaagaggattgtgttccggaagatcagcgatgtgaaacgtgaagaggaagaacgcatgaaacgaaagaatgaggcccccctgatcttgcccccggaccaccctgtccggcgcctcttccagagattccgacagcagaaagaggccaggctggcagctgagagagggggccgggacctggatgacctagatgtggagaagggcaatgtccttacagagcatgcctccgccaaccacagcctcgtgaaggccagcgtggtcaccgtgcgtgagagtcctgccacgcccgtatccttccaggcagcctccacctccggggtgccagaccacgcaaagctacaggcgccagggtccgagtgcctgggccccaaggggggcgggggcgattgtgccaagcgcaaaagctgggcccgcttcaaagatgcttgcgggaagagtgaggactggaacaaggtgtccaaggctgagtcgatggagacacttcccgagaggacaaaagcgtcaggcgaggccacactgaagaagacagactcgtgtgacagtggcatcaccaagagcgacttgcgcctggacaacgtgggtgaggccaggagtccccaggatcggagtcccatcctggcagaggtcaagcattcgttctaccccatccctgagcagacgctgcaggccacagtcctggaggtgaggcacgagctgaaggaggacatcaaggccttaaacgccaaaatgaccaatattgagaaacagctctctgagatactcaggatattaacttccagaagatcctctcagtctcctcaggagttgtttgaaatatcgaggccacagtccccagaatcagagagagacatttttggagccagctgagaggtctatttaaaaaaaaagtcagagacagatacctccaaccctgccgtcaccaccacccctaccac

SEQ ID NO: 157 - protein, 962 aa, Homo sapiens
MTMAGGRRGLVAPQNTFLENIVRRSNDTNFVLGNAQIVDWPIVYSNDGFCKLSGYHRAEVMQKSSTCSFMYGELTDKDTIEKVRQTFENYEMNSFEILMYKKNRTPVWFFVKIAPIRNEQDKVVLFLCTFSDITAFKQPIEDDSCKGWGKFARLTRALTSSRGVLQQLAPSVQKGENVHKHSRLAEVLQLGSDILPQYKQEAPKTPPHIILHYCVFKTTWDWIILILTFYTAILVPYNVSFKTRQNNVAWLVVDSIVDVIFLVDIVLNFHTTFVGPAGEVISDPKLIRMNYLKTWFVIDLLSCLPYDVINAFENVDEGISSLFSSLKVVRLLRLGRVARKLDHYIEYGAAVLVLLVCVFGLAAHWMACIWYSIGDYEIFDEDTKTIRNNSWLYQLAMDIGTPYQFNGSGSGKWEGGPSKNSVYISSLYFTMTSLTSVGFGNIAPSTDIEKIFAVAIMMIGSLLYATIFGNVTTIFQQMYANTNRYHEMLNSVRDFLKLYQVPKGLSERVMDYIVSTWSMSRGIDTEKVLQICPKDMRADICVHLNRKVFKEHPAFRLASDGCLRALAMEFQTVHCAPGDLIYHAGESVDSLCFVVSGSLEVIQDDEVVAILGKGDVFGDVFWKEATLAQSCANVRALTYCDLHVIKRDALQKVLEFYTAFSHSFSRNLILTYNLRKRIVFRKISDVKREEEERMKRKNEAPLILPPDHPVRRLFQRFRQQKEARLAAERGGRDLDDLDVEKGNVLTEHASANHSLVKASVVTVRESPATPVSFQAASTSGVPDHAKLQAPGSECLGPKGGGGDCAKRKSWARFKDACGKSEDWNKVSKAESMETLPERTKASGEATLKKTDSCDSGITKSDLRLDNVGEARSPQDRSPILAEVKHSFYPIPEQTLQATVLEVRHELKEDIKALNAKMTNIEKQLSEILRILTSRRSSQSPQELFEISRPQSPESERDIFGAS

SEQ ID NO: 158 - DNA, 3208 bp, Homo sapiens
gaagagggcgcgagggtagcagccagagggagccgccagccctgcctgcggatccccgccgggcgcatggggcgcttcgagccgggactgcgtgcgggccccgaggccagtttcctgctgtcgtaagaagccgcgccaggacgcccgccggaccccgagctgctgggaggatgaccatggctgggggcaggaggggactagtggcccctcaaaacacgtttctggagaatattgttcggcggtccaatgatactaattttgtgttggggaatgctcagatagtggactggcctattgtgtacagcaatgatggattttgcaagctgtctggctatcacagggcagaagtgatgcaaaaaagcagcacctgcagttttatgtatggggagctgactgataaagacacgattgaaaaagtgcggcaaacatttgagaactatgagatgaattcctttgaaattctgatgtacaagaagaacaggacacctgtgtggttctttgtgaaaattgctccaattcgaaacgaacaggataaagtggttttatttctttgcactttcagtgacataacagctttcaaacagccaattgaggatgattcatgtaaaggctgggggaagtttgctcggctgacaagagcactgacaagcagcaggggtgtcctgcagcagctggctccaagcgtgcaaaaaggcgagaatgtccacaagcactcccgcctggcagaggtcctacagctgggctcagacatccttccccagtacaagcaagaggcaccaaagactccccctcacatcatcttacattattgtgtttttaagaccacgtgggattggatcatcttgatcttgaccttctatacagccatcttggtcccttataatgtctccttcaaaaccaggcagaataatgtggcctggctggttgttgatagcatcgtggatgttatctttttggtggacattgtgctcaattttcataccacctttgttggaccagcaggggaggtgatttctgaccccaaacttatccgcatgaactacctgaagacgtggtttgtgattgaccttctgtcctgtttgccatatgatgtcatcaacgcttttgagaacgtggatgaggttagtgcctttatgggtgatccagggaagattggttttgctgatcagattccaccaccactggaggggagagagagtcagggcatcagcagcctgttcagctctctaaaagttgtccggctgctccgtcttgggcgagtggcccgtaagctggaccactacattgaatatggagctgctgtgctggtcctgctggtgtgtgtgtttgggctggctgcacactggatggcctgcatctggtacagcattggggactatgagatctttgacgaggacaccaagacaatccgcaacaacagctggctgtaccaactagcgatggacattggcaccccttaccagtttaatgggtctggctcagggaagtgggaaggtggtcccagcaagaattctgtctacatctcctcgttgtatttcacaatgaccagcctcaccagtgtgggctttgggaacatcgccccatccacagacattgagaagatctttgcagtggccatcatgatgattggctcacttctctatgccaccatcttcgggaatgtgacgactattttccaacagatgtatgccaacaccaacagataccatgagatgctcaacagtgttcgggacttcctgaagctctaccaggtgccaaaaggattgagtgagcgagtaatggattatattgtgtccacttggtccatgtccagaggcattgacacagagaaggtcctgcagatctgccccaaggacatgagagccgacatctgcgtgcacctgaaccgcaaggtgttcaaggagcacccggccttccggctggccagtgatggctgcctccgggcactggccatggagttccagacggtgcactgtgccccaggggacctcatctaccatgcaggagagagcgttgacagcctctgctttgtggtttctggctccctggaggtgatccaagatgatgaggtggtggccattctaggaaaaggagacgtgtttggagatgtgttctggaaggaagccacccttgcccagtcctgtgccaatgttagggccttgacctactgtgatctgcatgtgatcaagcgggatgccctgcagaaagtgctggaattctacacggccttctcccattccttctcccggaacctgattctgacgtacaacttgaggaagaggattgtgttccggaagatcagcgatgtgaaacgtgaagaggaagaacgcatgaaacgaaagaatgaggcccccctgatcttgcccccggaccaccctgtccggcgcctcttccagagattccgacagcagaaagaggccaggctggcagctgagagagggggccgggacctggatgacctagatgtggagaagggcaatgtccttacagagcatgcctccgccaaccacagcctcgtgaaggccagcgtggtcaccgtgcgtgagagtcctgccacgcccgtatccttccaggcagcctccacctccggggtgccagaccacgcaaagctacaggcgccagggtccgagtgcctgggccccaaggggggcgggggcgattgtgccaagcgcaaaagctgggcccgcttcaaagatgcttgcgggaagagtgaggactggaacaaggtgtccaaggctgagtcgatggagacacttcccgagaggacaaaagcgtcaggcgaggccacactgaagaagacagactcgtgtgacagtggcatcaccaagagcgacttgcgcctggacaacgtgggtgaggccaggagtccccaggatcggagtcccatcctggcagaggtcaagcattcgttctaccccatccctgagcagacgctgcaggccacagtcctggaggtgaggcacgagctgaaggaggacatcaaggccttaaacgccaaaatgaccaatattgagaaacagctctctgagatactcaggatattaacttccagaagatcctctcagtctcctcaggagttgtttgaaatatcgaggccacagtccccagaatcagagagagacatttttggagccagctgagaggtctatttaaaaaaaaagtcagagacagatacctccaaccctgccgtcaccaccacccctaccac

SEQ ID NO: 159 - protein, 989 aa, Homo sapiens
MTMAGGRRGLVAPQNTFLENIVRRSNDTNFVLGNAQIVDWPIVYSNDGFCKLSGYHRAEVMQKSSTCSFMYGELTDKDTIEKVRQTFENYEMNSFEILMYKKNRTPVWFFVKIAPIRNEQDKVVLFLCTFSDITAFKQPIEDDSCKGWGKFARLTRALTSSRGVLQQLAPSVQKGENVHKHSRLAEVLQLGSDILPQYKQEAPKTPPHIILHYCVFKTTWDWIILILTFYTAILVPYNVSFKTRQNNVAWLVVDSIVDVIFLVDIVLNFHTTFVGPAGEVISDPKLIRMNYLKTWFVIDLLSCLPYDVINAFENVDEVSAFMGDPGKIGFADQIPPPLEGRESQGISSLFSSLKVVRLLRLGRVARKLDHYIEYGAAVLVLLVCVFGLAAHWMACIWYSIGDYEIFDEDTKTIRNNSWLYQLAMDIGTPYQFNGSGSGKWEGGPSKNSVYISSLYFTMTSLTSVGFGNIAPSTDIEKIFAVAIMMIGSLLYATIFGNVTTIFQQMYANTNRYHEMLNSVRDFLKLYQVPKGLSERVMDYIVSTWSMSRGIDTEKVLQICPKDMRADICVHLNRKVFKEHPAFRLASDGCLRALAMEFQTVHCAPGDLIYHAGESVDSLCFVVSGSLEVIQDDEVVAILGKGDVFGDVFWKEATLAQSCANVRALTYCDLHVIKRDALQKVLEFYTAFSHSFSRNLILTYNLRKRIVFRKISDVKREEEERMKRKNEAPLILPPDHPVRRLFQRFRQQKEARLAAERGGRDLDDLDVEKGNVLTEHASANHSLVKASVVTVRESPATPVSFQAASTSGVPDHAKLQAPGSECLGPKGGGGDCAKRKSWARFKDACGKSEDWNKVSKAESMETLPERTKASGEATLKKTDSCDSGITKSDLRLDNVGEARSPQDRSPILAEVKHSFYPIPEQTLQATVLEVRHELKEDIKALNAKMTNIEKQLSEILRILTSRRSSQSPQELFEISRPQSPESERDIFGAS

SEQ ID NO: 160 - DNA, 2008 bp, Homo sapiens
gccgcgcggcgcgggggaggagaccttcatctgttcacgcggtagcgcggattgcggttcgcggcgcgcgccaccggggaaggagcggtgggccgaggggttggaggtggggccccaggaggacctcgggctgtgggccgggagagcggagtcggggagtggggcgggggagcgaggtggcgccggggagcctgggatatggcgcggccagacgatgaggagggggcggcggtggcgcccggacacccgctcgcgaaaggatacctcccgttgccgaggggcgcgcccgttgggaaggagagcgtggagctgcagaacgggcccaaagcgggcaccttcccggtgaatggggccccccgggacagcctcgctgccgcctcgggagttctgggcgggcctcagactccactggccccagaagaggagacccaggcccggctgctgcctgcgggcgcgggagctgagaccccgggggccgagagcagcccgctgccccttacggcgctctccccgcggcgcttcgtggtgctcctgatcttcagcctgtactcgctggtcaacgcctttcagtggatccagtacagcatcattagcaacgtcttcgagggcttctacggtgtcaccttgctgcacatcgactggctgtccatggtgtacatgctggcctacgtgcccctcatcttcccggccacctggctgctggacaccagaggcctgcggctcaccgccctgctgggctccggcctcaactgcctgggtgcctggatcaagtgcggcagtgtgcaacaacatctcttctgggtcaccatgttgggccagtgcttgtgctcggtggcccaggtgttcatcctgggcttgccctcccgcatcgcctcagtgtggtttgggcccaaagaggtgtccacagcttgtgccaccgccgtgctgggcaatcagcttggaactgcagttggctttttgctaccaccagttttagtacccaacacacagaatgacacaaatctcctggcttgtaatatcagcaccatgttttatggaacatcagctgttgccacacttttatttattttaacagcaattgccttcaaagaaaaacctcggtatccaccaagtcaggctcaagcagctcttcaagacagtccccctgaagagtactcctataagaaatcaataagaaacctgtttaaaaacattccttttgtccttctgttgatcacttatggtatcatgactggtgccttttattcagtctcaacgttattaaatcaaatgatattgacatattatgagggagaagaagtcaatgctggaaggattgggctaacgctagtagtagctggaatggtgggctctattctttgtggcttatggctggattatactaaaacatacaaacagactaccctgatagtttatattttgtcttttattggaatggttatctttactttcacattggaccttagatatattatcatcgtgtttgttactggaggggtgcttggcttcttcatgactggttacctccctttgggttttgaatttgctgttgaaatcacttaccctgaatctgaaggtacttcatctggtcttcttaatgcttctgcacagatatttggaattttgttcacattggctcaaggaaagctcacatcagactatggtcctaaggcagggaacatttttctctgtgtctggatgtttataggcatcatattaacagcattaatcaagtctgatctgcgaagacacaacataaatataggaattacaaatgttgatgttaaagctataccagctgacagtcccacagaccaagaaccaaaaacggttatgttgtccaagcagtcagaatcagcaatttgaagagaaaggcaaagttactgtcccgtagtaattggggacaatgtgatcatccttggagagagatgtgagcaccaaggctgggtttgtatgtggtgggggaataaacacacttacttgaaaattaaaaaaaaaaaaaaaaaaa

SEQ ID NO: 161 - protein, 555 aa, Homo sapiens
MARPDDEEGAAVAPGHPLAKGYLPLPRGAPVGKESVELQNGPKAGTFPVNGAPRDSLAAASGVLGGPQTPLAPEEETQARLLPAGAGAETPGAESSPLPLTALSPRRFVVLLIFSLYSLVNAFQWIQYSIISNVFEGFYGVTLLHIDWLSMVYMLAYVPLIFPATWLLDTRGLRLTALLGSGLNCLGAWIKCGSVQQHLFWVTMLGQCLCSVAQVFILGLPSRIASVWFGPKEVSTACATAVLGNQLGTAVGFLLPPVLVPNTQNDTNLLACNISTMFYGTSAVATLLFILTAIAFKEKPRYPPSQAQAALQDSPPEEYSYKKSIRNLFKNIPFVLLLITYGIMTGAFYSVSTLLNQMILTYYEGEEVNAGRIGLTLVVAGMVGSILCGLWLDYTKTYKQTTLIVYILSFIGMVIFTFTLDLRYIIIVFVTGGVLGFFMTGYLPLGFEFAVEITYPESEGTSSGLLNASAQIFGILFTLAQGKLTSDYGPKAGNIFLCVWMFIGIILTALIKSDLRRHNINIGITNVDVKAIPADSPTDQEPKTVMLSKQSESAI

SEQ ID NO: 162 - DNA, 3580 bp, Homo sapiens
gccccagcagccccagccccagccccaggcccagcagcagcagcagcagcccctgctctcccgccgcccggagaggctctgcagccatgaagccaaccgtcccgaggcaccgccggtaagcagggagcctccgcggagctcccgccgccgctcccccttggtgagtcctgccgcagcgagaggcatggagaaggccgcccccgcggggcgctgatcccctcgccgcgcccgcgcgcacacgccccccgccgccgccgccgctgccgccgccgcgcgcccccagtacctcgctccccacccaggccccaccatgaccggctccgcggccgacactcaccgctgcccccaccccaaaggcgccaaaggcacccggtcccggagcagccacgcgcggcccgtgagcctcgccaccagcgggggctcagaggaggaggacaaagacggcggggtgctgttccacgtcaacaagagcggcttccccatcgacagccacacctgggagcgcatgtggatgcacgtggccaaggtgcaccctaaggggggagaaatggtgggcgccatcaggaacgccgccttcttggcaaagccttcaataccccaggtcccaaactacaggctgtcgatgacgatcccagactggctccaggcgatccagaattacatgaagaccctacactacttaaccaatgggcagccttccattgagcggttccccatcagctttaaaacctacttctcaggaaactactttcaccacgttgtgctggggatttactgcaatggccgctatggctcattgggcatgagccgcagggctgagctgatggacaagccattgacttttcggactctgagtgacctcatctttgactttgaggactcttacaagaaatacctgcacacagtcaagaaggtcaagattgggctgtacgtcccccatgagcctcatagcttccagcccattgagtggaagcagctggtcctcaacgtctcaaagatgctgagggctgacataaggaaggagctggagaaatatgccagggacatgagaatgaagatcctgaaacctgcaagtgcccactctccgacccaagtgagaagccggggaaaatccctgtcccccagaaggagacaggcaagccccccgaggaggctcggccggcgagagaagtcgcctgcactgcctgaaaagaaggtggctgatctgagcactctgaatgaagtgggctatcaaatccgaatttagccaagccataccggccagcaagagggtttctgtggtgcttctctctgcactttacccagcatcttcaggaggaactgcaactatttattaagaacttgtgaattttatttttaaggattcacctggaaatagaatctgagtgggtggtaaccattagctttaaaaaattcactaaaaggcaccatgaaaaggctgaagtaataagccccactggggttgaactatgtccctcactcaagatcttaaggataaccgtaactgaagttttatatttttccatttacctactttcttttacttgctttgaacattatgcctcaccaatagtaaatgttcatgaaataatctcttgaacttttggtatagtaaggtaactctaacagtattactgtctttttcagcaataacagaaagcaaaaatgggtgggttttttttaagcagttattacctcagcattttgacatcagatatgcaaacttaatggcgttttgtttttttatattctatttgtattctttccccagtatttcccatggggatctccacaagtttggagttttttcctggtgcacacacgtgaggagatttaaggtactatatgcaagtgttttactaaaaagcactgaaattcttctggcaatacaagaaccattttcaggatcttggagttacttccttcttaatctttcttaaagcattcactgatgtttttgttttttcaaaatgaaacaaaaatatcacattgagaagctagtctatgttctgtcactaacatttaaactttgcagactctaacaaaaagcacaagaggtcacgtactattatacaaatttagcggtactggatttacctctgacattaacacactcaggcagagaccaggagtgatcagcaggtcttcagaaccaaaaaacctttctgttcacatttcatctgatttttaaactgaggcaggctttgattcttctgaaggatgccaagaatcaaactaagggaggactcactgttaaagatgtgttctgatgtcttatattaagaccaaatgtgacatgatgtgattatcttccagtactttgcttttaggtaccatttcatgacattttaggaatgagtattggaaaatataaagaattagaaaagcagcactttttttttaatggaaaagtcttcggtccagtgttacaccttatagtgtaattcagtccctaagcacagaatgaatgtctggcctgcatatggtagttacagtgtaacctctggctgcagaccacacaggacaaccctaacagcctagtcttgtatggtgtaaatatcaagagtacagcttcaatttcatttgctttatcttagcaacaatgccaactcaggagagcagacggccgatttcagtgaagtctggtagtcaacagatgttatttcagtctcagtgcatctcctctggctttctttgactgaaggtgtttataggaaggaagttaaaaaaaaaaaagctcattgagattctttaccaattctttacaagatttctgggggtgacagggaaagcaaaaggacttcaaagcaaaagggtgcacaagagcttacttcaccctgaaaatcagtattattaatgaaaagtactgttttcttaaagaagtcgaatgtcctttagatgaacaagaccaagtatacatctccattagattaaaatgtagcacagggttaaaaattatcagtttaatctctttaagaacagtattatcagagtttaaaatgagttagctctgtttatctacacacagcaaacccattcgcagcctcttggccacatgtattcagatgtttgaaatagtgaatcatttcattttcattctaaaacaatactgacttagccatataccttctgtttgtcaatctgaaacttgcttacatctaataagtagacctcttataacactgcaaccattctaagagttggaatttatttttgccaagtattaagtactgttacatctaaaatacagaatgtcaaatggttgcatagcttgtttcccacaacaaggaggaaaagaacaggaatacaaactctgtaatatgctgataaagaagccttagaactgccaactggcttgatggttcaattagtaagctaatttctcccacacccgctccttgatttttagactaattttcccaaagcaaggtttagtcacacaaacttgaaagtacatttaaaatgttcttagttgtcatcctacttttattgcctatggaatatgctaatttctaaaaaaaatacgggagaggcaccaaacccctaaattctagtgcaataatttaaaaaaaaaaaaaaa

SEQ ID NO: 163 - protein, 311 aa, Homo sapiens
MTGSAADTHRCPHPKGAKGTRSRSSHARPVSLATSGGSEEEDKDGGVLFHVNKSGFPIDSHTWERMWMHVAKVHPKGGEMVGAIRNAAFLAKPSIPQVPNYRLSMTIPDWLQAIQNYMKTLHYLTNGQPSIERFPISFKTYFSGNYFHHVVLGIYCNGRYGSLGMSRRAELMDKPLTFRTLSDLIFDFEDSYKKYLHTVKKVKIGLYVPHEPHSFQPIEWKQLVLNVSKMLRADIRKELEKYARDMRMKILKPASAHSPTQVRSRGKSLSPRRRQASPPRRLGRREKSPALPEKKVADLSTLNEVGYQIRI

SEQ ID NO: 164 - DNA, 4668 bp, Homo sapiens
cggcgagactgcacctcccagcatgccttgcagccaggactggagtcggtacttaagagtgatggggttccctagatactttaggccgtcgcatcgattatagagattgaggtggaacccggggcctgggaactggacgcacgcggagggcgaagatggaagcctggcgctgtgtgaggaagggctacggccactgtgtggtgggaagaggccgataccccatgtttccccatcactcgaggagtctgggcagagactggactacaccgtgggagaatctgcaaaggtgttgctggaacagacatatttctagttgtatgaggtggcctggacattactctcgagctccttacccatacttcagtagtaggcatttttcactaaattggagaccaccctgtttgtttgagtctagaactcagttccagtactgtaactggagacctgacaacctgagccagacatctttgattcatctctctagttacgtcatgaacgctgagggagatgagccttcatcaaaacgaagaaaacaccaaggtgtgataaagcggaattgggaatatatatgtagccatgataaagaaaaaacgaagatcctaggagacaaaaatgttgatcccaaatgtgaagacagtgagaacaagtttgacttttcagtgatgtcctataatatactttcacaagatttactggaagataactctcacctttatagacattgccggcggccagtattacactggagttttaggtttcccaatattctgaaagaaattaaacattttgatgcagacgtactttgtttgcaagaagttcaagaagatcattatggagcagagatcaggccaagtttggaatcactgggttatcactgtgaatataagatgcggacaggaaggaaacctgatggctgtgctatttgcttcaaacattccaaattttcactcttgtcagtgaacccagtggaattcttccgccctgatatttctctgttggacagagacaatgttggattagttttactcttacagcccaaaattccatatgctgcctgccctgcaatctgcgtagcaaatacgcatctgttgtataatccaaggcgaggtgatattaagctgacgcaattggcaatgctactggcagagatttccagtgttgcccaccagaaagatggcagcttctgccctattgttatgtgtggtgactttaattctgttcctggttctccactatatagtttcataaaggaaggaaaattgaattatgaaggacttcccataggaaaggtatctggccaggaacagtcttcacggggacaaagaattttatctattccaatttggcccccaaacctaggtatctcacagaactgtgtgtatgaggtacagcaggtaccaaaagtagaaaagacagacagtgatctgacacaaacacagctgaagcaaacagaggtcctagtgacagctgaaaaattgtcttcaaatttacagcaccatttcagtttgtcatctgtttattcacattactttcctgacactggaattccagaagtgaccacctgtcattcccgaagtgccataactgtggattatattttctactctgcagaaaaggaagatgttgctgggcacccaggagctgaagttgctttggttggtggcttgaaacttctagctagactgtcacttcttacagaacaagacttatggactgttaatggacttccaaacgaaaataactcttcagatcatctgcctttattggcaaagttcagacttgagctctgactctctttgatcacatactaattttctttccaatttgtattgtttttcaaagaatgtaaagttcttaagtgtatgcatgttgtttatttttgcactgtggagattctgaagcggttatgttagatgctttgaaactccatatcagaagaaataactttataacaattttttttaataatgaaaaatattttcgtgacaagtgagctctaaattctctttattgtaaaagagatgtaaaggttttatattctaaatcctagtaaaattgacagtgatttttaaatataatgcatcttcctttgtctgcttagtaaaaaatttcatttcataattttggcaagctctgtagtggatccaaagtatctttgagttcttgcaaactacaagttgtttcctttccagaaggcttgatttcattaggagacccctctattgagttctaaatagtttatcttagaaagccttgggtcattcacaggtatccaaccagccattgtttagtttgtttttgaaggggtttgataatgctttttaagttgtacagaatgcttaatccatcttattactgtcctgagccatgtaatatgcctgcatcgtgttggggaaatgtttgggaaatataagccagcataacgtgtaaagctcactctttcaccctggaacagacaagaggtgggcttaatagaggcagagactggggatatacctttgtttccctagcatttttatttatttatttttattttattttattttttgagatggagtttcactcttgttgcccaggctgggggtgcaatggcgcaatctttgctcactgcaacccctgcctcccgggctcaagcgattctcctgcctcagcctctcgagtagctgggattacaggcatgcgtcaccactcccagctaattttgtattttcagtagagacagggtttccccatgttggttaggctggtctcgaactcccaacctcaggtgatccgcccacctcagctctcaaagtgctgggattacaggcgggagccactgcacatggcagcattttttaaaaattcagttttaagatctctggtttaggggagagattttattttactgaaccagttctatagaaatttattttattaggaaatttgtctttggaacaaagtggcagctataaaattatttttgttaagcctcagaaatatgaggaagcctgtaaaactctagtggggagatattaacttggagacctaatgctctgtaaatagtcatttaaactgttggttttagtggttttgtttctaaaatgttttcttttaccgtgatgcaccagtatgagatggtgctgacactttctatgaagtggttatgagcaggtttaataaatcctctatacaagtgtttgaatcaattttaaaacataaaaagtggaaatttccttttttgtagacagtaggaacaaggaattatatgcatttttactaagtagtaattttacactgaattgtaaatgtttttacagtgagttttattaatagaatgcttcaccttaaattggaaaacaataatagtcttggactaagtctttgtactaaagcatttgctataattatttttaaaaaaacaaacagatgaaaacctcagagaaggcatgtggattataagatttgtctagtaaaaattgtaattgaatatgtttaaatatttaatttctcattttggggggtttttatttttttattttttagatggtgtctcacgctatcgcccaggctggagtgcagtggcgcgaactcggctcactgcaacctccgcctcctgggttcaagcaattctccttcctcagcctcccaagtagctgggattacaggcatgcaccaccatgcccagctaatttttgtatttttagtagagatggaattttgccatgttggccaggctggtcttgaactcctgacctcaggggtgatccacccgcctcgggctcccaaagtgctgtgattacaggcatgagccaccatgcctggcctttggggggattttaattacagtattaattatagttctaggatttcccacattttatagtagtagtttgcaggatattatgtgccctaattagcagatatagacattatcaaattataatgatagtataattatccctttttaatattggggaaagaaaaatgaaaattcattagttaattactgctttgtgttgtgtgaatttattaacaaataacattattacatataggtcattgttaacaaacaaacatccctgaaaacctctgtgaaaatttaattttttatatcctgattaatatattgtgactttaggcccatttttcatgtgcttcactttgatagagttaatccataaaattgctctttactttagcttatcaaatgaagtattattttgtggactggaggccaaaaagtcaatgtgagcttctcacaggtttttaaagctccactaaaaataattatccacttgtctttacttttgttgaccagaatagttggtaactctgccagagcctgtacttacctgccaaaaacaattaaatctggttaatgcctgaaaccaaatctctcagtctcaagtgttatactatccaagttttaaatggaaaggtaaactgtggagtaatgaaattttggttttactgtaccttttgctatcaagataatattcatgtttgaaatcttgtctttatttggaatttagttactgtctgcttttaacctttgctttcctaaagaaagtttgagatccagagagttcaagggattggggaaagagaggcgtcaagtcatttgcactttgtacctgtaagttaggtaataaactattatactcgtaaaaaaaaaaaaaaaaaaaa

SEQ ID NO: 165 - protein, 544 aa, Homo sapiens
MEAWRCVRKGYGHCVVGRGRYPMFPHHSRSLGRDWTTPWENLQRCCWNRHISSCMRWPGHYSRAPYPYFSSRHFSLNWRPPCLFESRTQFQYCNWRPDNLSQTSLIHLSSYVMNAEGDEPSSKRRKHQGVIKRNWEYICSHDKEKTKILGDKNVDPKCEDSENKFDFSVMSYNILSQDLLEDNSHLYRHCRRPVLHWSFRFPNILKEIKHFDADVLCLQEVQEDHYGAEIRPSLESLGYHCEYKMRTGRKPDGCAICFKHSKFSLLSVNPVEFFRPDISLLDRDNVGLVLLLQPKIPYAACPAICVANTHLLYNPRRGDIKLTQLAMLLAEISSVAHQKDGSFCPIVMCGDFNSVPGSPLYSFIKEGKLNYEGLPIGKVSGQEQSSRGQRILSIPIWPPNLGISQNCVYEVQQVPKVEKTDSDLTQTQLKQTEVLVTAEKLSSNLQHHFSLSSVYSHYFPDTGIPEVTTCHSRSAITVDYIFYSAEKEDVAGHPGAEVALVGGLKLLARLSLLTEQDLWTVNGLPNENNSSDHLPLLAKFRLEL

SEQ ID NO: 166 - DNA, 4196 bp, Homo sapiens
gctgtgcagctgaggcgccgccgtggagccgccttggagccaccgcccccgatcgccttcgccgctgcgttggggaacctggaccgcgcggcgccgggtttccctcatgatcccgggcgggtggcggcggcggcagaggcggcgggaggatgacctcttaccgggagcggagtgccgacctggcccgtttctacactgtcaccgagccccagcgacacccgaggggctacacagtatataaggtcaccgcccgggttgtttcacgaagaaatccagaggatgtccaggagataattgtatggaagagatacagtgattttaagaaactacacaaagaactatggcaaattcacaaaaacttattccgacattcagagttgtttcctccatttgctaaaggaatagtgtttgggcgatttgatgaaactgttatcgaagagagaagacaatgtgctgaagacctgctacagttctctgccaatattcctgctctttacaatagtaaacagcttgaagactttttcaagggtggaataattaatgatagttctgaattaattggtcctgctgaagctcactcagattccctcattgatacctttcctgagtgtagtacggaaggcttctccagtgacagtgatctggtatctcttactgttgatgtggattctcttgctgagttagatgatggaatggcttccaatcaaaattctcccattagaacttttggtctcaatctttcttcggattcttcagcactaggggctgttgcttctgacagtgaacagagcaaaacagaagaagaacgggaaagtcgtagcctctttcctggcagtttaaagccgaagcttggcaagagagattatttggagaaagcaggagaattaataaagctggctttaaaaaaggaagaagaagacgactatgaagctgcttctgatttttataggaagggagttgatttactcctagaaggtgttcaaggagagtcaagccctacccgtcgagaagctgtgaagagaagaacagccgagtacctcatgcgggcagaaagtatctctagtctttatgggaaacctcagcttgatgatgtatctcagcctccaggatcactaagttcaaggcccctttggaacctaaggagccctgccgaggagctgaaggccttcagagtccttggggtgattgacaaggttttacttgtaatggacacaaggacagaacagactttcattttaaaaggtctaaggaaaagcagtgaatacagcaggaacagaaagaccatcatcccccgctgtgtgcccaacatggtgtgtctgcataagtacatcatctctgaggagtcagtatttcttgtgctgcagcatgcggaaggtggcaaactgtggtcatatatcagtaaatttctaaacagaagtcctgaagaaagctttgacatcaaggaagtgaaaaaacctacacttgcaaaagttcacctgcagcagccaacttctagtcctcaggacagcagtagctttgaatccagaggaagtgatggtggaagcatgcttaaagctctgcctttgaagagtagtcttactccaagttctcaagatgacagcaaccaggaagatgatggccaagatagctctccaaagtggccagattctggttcaagttcagaagaagaatgtactactagttatttaacattatgcaatgaatatgggcaagaaaagattgaaccagggtctttgaatgaggagcccttcatgaagactgaagggaatggtgttgatacaaaagctattaaaagcttcccagcacaccttgctgctgacagtgacagccccagcacacagctgagagctcacgagctgaagttcttccccaacgatgacccagaagcagttagttctccaagaacatcagattccctcagtagatcaaaaaatagccccatggaattctttaggatagacagtaaggatagcgcaagtgaactcctgggacttgactttggagaaaaattgtatagtctaaaatcagaacctttgaaaccattctttactcttccagatggagacagtgcttctaggagttttaatactagtgaaagcaaggtagagtttaaagctcaggacaccattagcaggggctcagatgactcagtgccagttatttcatttaaagatgctgcttttgatgatgtcagtggtactgatgaaggaagacctgatcttcttgtaaatttacctggtgaattggagtcaacaagagaagctgcagcaatgggacctactaagtttacacaaactaatatagggataatagaaaataaactcttggaagcccctgatgttttatgcctcaggcttagtactgaacaatgccaagcacatgaggagaaaggcatagaggaactgagtgatccctctgggcccaaatcctatagtataacagagaaacactatgcacaggaggatcccaggatgttatttgtagcagctgttgatcatagtagttcaggagatatgtctttgttacccagctcagatcctaagtttcaaggacttggagtggttgagtcagcagtaactgcaaacaacacagaagaaagcttattccgtatttgtagtccactctcaggtgctaatgaatatattgcaagcacagacactttaaaaacagaagaagtattgctgtttacagatcagactgatgatttggctaaagaggaaccaacttctttattccagagagactctgagactaagggtgaaagtggtttagtgctagaaggagacaaggaaatacatcagatttttgaggaccttgataaaaaattagcactagcctccaggttttacatcccagagggctgcattcaaagatgggcagctgaaatggtggtagcccttgatgctttacatagagagggaattgtgtgccgcgatttgaacccaaacaacatcttattgaatgatagaggacacattcagctaacgtattttagcaggtggagtgaggttgaagattcctgtgacagcgatgccatagagagaatgtactgtgccccagaggttggagcaatcactgaagaaactgaagcctgtgattggtggagtttgggtgctgtcctctttgaacttctcactggcaagactctggttgaatgccatccagcaggaataaatactcacactactttgaacatgccagaatgtgtctctgaagaggctcgctcactcattcaacagctcttgcagttcaatcctctggaacgacttggtgctggagttgctggtgttgaagatatcaaatctcatccattttttacccctgtggattgggcagaactgatgagatgaacgtaatgcagggttatcttcacacattctgatcttctctgtgacaggcatctccagcactgaggcacctctgactcacagttacttatggagcaccaaagcatttggataaagaccgttataggaaatgggggggaaatggctaaaagagaacaattcgtttacaattacaagatattagctaattgtgccaggggctgttatatacatatatacacaaccaaggtgtgatctgaatttaatccacatttggtgttgcagatgagttgtaaagccaactgaaagagttccttcaagaagttcctctgataggaagctagaagtgtagaatgaagttttacttgacagaaggacctttacatggcagctaacagtgctttttgctgaccaggattggtttatatgattaaattaatatttgcttaataatacactaaaagtatatgaacaatgtcatcaatgaaacttaaaagcgagaaaaaagaatatacacataatttctgacggaaaacctgtaccctgatgctgtataatgtatgttgaatgtggtcccagattatttctgtaagaagacactccatgttgtcagctttgtactctttgttgatactgcttatttagagaagggttcatataaacactcactctgtgtcttcaacagcatctttctttccccatctttctattttctgcaccctctgcttgttccctcatattctgttcttccgactcctgctaacacacatgcaacaaaaaagggaagggagtgcttatttccctttgtgtaaggactaagaaatcatgatatcaaataaacatggtgaaacattaaaaaaaaaaaaaaaa

SEQ ID NO: 167 - protein, 1066 aa, Homo sapiens
MTSYRERSADLARFYTVTEPQRHPRGYTVYKVTARVVSRRNPEDVQEIIVWKRYSDFKKLHKELWQIHKNLFRHSELFPPFAKGIVFGRFDETVIEERRQCAEDLLQFSANIPALYNSKQLEDFFKGGIINDSSELIGPAEAHSDSLIDTFPECSTEGFSSDSDLVSLTVDVDSLAELDDGMASNQNSPIRTFGLNLSSDSSALGAVASDSEQSKTEEERESRSLFPGSLKPKLGKRDYLEKAGELIKLALKKEEEDDYEAASDFYRKGVDLLLEGVQGESSPTRREAVKRRTAEYLMRAESISSLYGKPQLDDVSQPPGSLSSRPLWNLRSPAEELKAFRVLGVIDKVLLVMDTRTEQTFILKGLRKSSEYSRNRKTIIPRCVPNMVCLHKYIISEESVFLVLQHAEGGKLWSYISKFLNRSPEESFDIKEVKKPTLAKVHLQQPTSSPQDSSSFESRGSDGGSMLKALPLKSSLTPSSQDDSNQEDDGQDSSPKWPDSGSSSEEECTTSYLTLCNEYGQEKIEPGSLNEEPFMKTEGNGVDTKAIKSFPAHLAADSDSPSTQLRAHELKFFPNDDPEAVSSPRTSDSLSRSKNSPMEFFRIDSKDSASELLGLDFGEKLYSLKSEPLKPFFTLPDGDSASRSFNTSESKVEFKAQDTISRGSDDSVPVISFKDAAFDDVSGTDEGRPDLLVNLPGELESTREAAAMGPTKFTQTNIGIIENKLLEAPDVLCLRLSTEQCQAHEEKGIEELSDPSGPKSYSITEKHYAQEDPRMLFVAAVDHSSSGDMSLLPSSDPKFQGLGVVESAVTANNTEESLFRICSPLSGANEYIASTDTLKTEEVLLFTDQTDDLAKEEPTSLFQRDSETKGESGLVLEGDKEIHQIFEDLDKKLALASRFYIPEGCIQRWAAEMVVALDALHREGIVCRDLNPNNILLNDRGHIQLTYFSRWSEVEDSCDSDAIERMYCAPEVGAITEETEACDWWSLGAVLFELLTGKTLVECHPAGINTHTTLNMPECVSEEARSLIQQLLQFNPLERLGAGVAGVEDIKSHPFFTPVDWAELMR

SEQ ID NO: 168 - DNA, 5253 bp, Homo sapiens
aatcggggctttaagtccttgattaggagagtgtgagagctttggtcccaactggctgtgcctataggcttgtcactaggagaacatttgtgttaattgcactgtgctctgtcaaggaaactttgatttatagctggggtgcacaaataatggttgccggtcgcacatggattcggtagaactttgccttcctgaatctttttccctgcactacgaggaagagcttctctgcagaatgtcaaacaaagatcgacacattgattccagctgttcgtccttcatcaagacggaaccttccagcccagcctccctgacggacagcgtcaaccaccacagccctggtggctcttcagacgccagtgggagctacagttcaaccatgaatggccatcagaacggacttgactcgccacctctctacccttctgctcctatcctgggaggtagtgggcctgtcaggaaactgtatgatgactgctccagcaccattgttgaagatccccagaccaagtgtgaatacatgctcaactcgatgcccaagagactgtgtttagtgtgtggtgacatcgcttctgggtaccactatggggtagcatcatgtgaagcctgcaaggcattcttcaagaggacaattcaaggcaatatagaatacagctgccctgccacgaatgaatgtgaaatcacaaagcgcagacgtaaatcctgccaggcttgccgcttcatgaagtgtttaaaagtgggcatgctgaaagaaggggtgcgtcttgacagagtacgtggaggtcggcagaagtacaagcgcaggatagatgcggagaacagcccatacctgaaccctcagctggttcagccagccaaaaagccatataacaagattgtctcacatttgttggtggctgaaccggagaagatctatgccatgcctgaccctactgtccccgacagtgacatcaaagccctcactacactgtgtgacttggccgaccgagagttggtggttatcattggatgggcgaagcatattccaggcttctccacgctgtccctggcggaccagatgagccttctgcagagtgcttggatggaaattttgatccttggtgtcgtataccggtctctttcgtttgaggatgaacttgtctatgcagacgattatataatggacgaagaccagtccaaattagcaggccttcttgatctaaataatgctatcctgcagctggtaaagaaatacaagagcatgaagctggaaaaagaagaatttgtcaccctcaaagctatagctcttgctaattcagactccatgcacatagaagatgttgaagccgttcagaagcttcaggatgtcttacatgaagcgctgcaggattatgaagctggccagcacatggaagaccctcgtcgagctggcaagatgctgatgacactgccactcctgaggcagacctctaccaaggccgtgcagcatttctacaacatcaaactagaaggcaaagtcccaatgcacaaactttttttggaaatgttggaggccaaggtctgactaaaagctccctgggccttcccatccttcatgttgaaaaagggaaaataaacccaagagtgatgtcgaagaaacttagagtttagttaacaacatcaaaaatcaacagactgcactgataatttagcagcaagactatgaagcagctttcagattcctccataggttcctgatgagtttctttctactttctccatcatcttctttcctctttcttcccacatttctctttctctttattttttctccttttcttctttcacctcccttatttctttgcttctttcattcctagttcccattctcctttattttcttcccgtctgcctgccttctttcttttctttacctactctcattcctctcttttctcatccttccccttttttctaaatttgaaatagctttagtttaaaaaaaaatcctcccttccccctttcctttccctttctttcctttttccctttccttttccctttcctttcctttcctcttgaccttctttccatctttctttttcttccttctgctgctgaacttttaaaagaggtctctaactgaagagagatggaagccagccctgccaaaggatggagatccataatatggatgccagtgaacttattgtgaaccatactgtccccaatgactaaggaatcaaagagagagaaccaacgttcctaaaagtacagtgcaacatatacaaattgactgagtgcagtattagatttcatgggagcagcctctaattagacaacttaagcaacgttgcatcggctgcttcttatcattgcttttccatctagatcagttacagccatttgattccttaattgttttttcaagtcttccaggtatttgttagtttagctactatgtaactttttcagggaatagtttaagctttattcattcatgcaatactaaagagaaataagaatactgcaattttgtgctggctttgaacaattacgaacaataatgaaggacaaatgaatcctgaaggaagatttttaaaaatgttttgtttcttcttacaaatggagatttttttgtaccagctttaccacttttcagccatttattaatatgggaatttaacttactcaagcaatagttgaagggaaggtgcatattatcacggatgcaatttatgttgtgtgccagtctggtcccaaacatcaatttcttaacatgagctccagtttacctaaatgttcactgacacaaaggatgagattacacctacagtgactctgagtagtcacatatataagcactgcacatgagatatagatccgtagaattgtcaggagtgcacctctctacttgggaggtacaattgccatatgatttctagctgccatggtggttaggaatgtgatactgcctgtttgcaaagtcacagaccttgcctcagaaggagctgtgagccagtattcatttaagaggcaataaggcaaatgccagaattaaaaaaaaaaatcatcaaagacagaaaatgcctgaccaaattctaaaacctaatccatataagtttattcatttaggaatgttcgtttaaattaatctgcagtttttaccaagagctaagccaatatatgtgcttttcaaccagtattgtcacagcatgaaagtcaagtcaggttccagactgttaagaggtgtaatctaatgaagaaatcaattagatgccccgaaatctacagtcgctgaataaccaataaacagtaacctccatcaaatgctataccaatggaccagtgttagtagctgctccctgtattatgtgaacagtcttattctatgtacacagatgtaattaaaattgtaatcctaacaaacaaaagaaatgtagttcagcttttcaatgtttcatgtttgctgtgcttttctgaattttatgttgcattcaaagactgttgtcttgttcttgtggtgtttggattcttgtggtgtgtgcttttagacacagggtagaattagagacaatattggatgtacaattcctcaggagactacagtagtatattctattccttaccagtaataaggttcttcctaataataattaagagattgaaactccaaacaagtattcattatgaacagatacacatcaaaatcataataatattttcaaaacaaggaataatttctctaatggtttattatagaataccaatgtatagcttagaaataaaactttgaatatttcaagaatatagataagtctaatttttaaatgctgtatatatggctttcactcaatcatctctcagatgttgttattaactcgctctgtgttgttgcaaaactttttggtgcagattcgtttccaaaactattgctactttgtgtgctttaaacaaaataccttgggttgatgaaacatcaacccagtgctaggaatactgtgtatctatcattagctatatgggactatattgtagattgtggtttctcagtagagaagtgactgtagtgtgattctagataaatcatcattagcaattcattcagatggtcaataacttgaaatttatagctgtgataggagttcagaaattggcacatccctttaaaaataacaacagaaaatacaactcctgggaaaaaaggtgctgattctataagattatttatatatgtaagtgtttaaaaagattattttccagaaagtttgtgcagggtttaagttgctactattcaactacactatatataaataaaatatatacaatatatacattgttttcactgtatcacattaaagtacttgggcttcagaagtaagagccaaccaactgaaaacctgagatggagatatgttcaaagaatgagatacaattttttagttttcagtttaagtaactctcagcattacaaaagagtaagtatctcacaaataggaaataaaactaaaacgtggatttaaaaagaactgcacgggctttagggtaaatgctcatcttaaacctcactagagggaagtcttctcaagtttcaagcaagaccatttacttaatgtgaagttttggaaagttataaaggtgtatgttttagccatatgattttaattttaattttgcttcttttaggttcgttcttatttaaagcaatatgattgtgtgactccttgtagttacacttgtgtttcaatcagatcagattgttgtatttattccactattttgcatttaaatgataacataaaagatataaaaaatttaaaactgctatttttcttatagaagagaaaatgggtgttggtgattgtattttaattatttaagcgtctctgtttacctgcctaggaaaacattttatggcagtcttatgtgcaaagatcgtaaaaggacaaaaaatttaaactgcttataataatccaggagttgcattatagccagtagtaaaaataataataataataataaaaccatgtctatagctgtagatgggcttcacatctgtaaagcaatcaattgtatatttttgtgatgtgtaccatactgtgtgctccagcaaatgtccatttgtgtaaatgtatttattttatattgtatatattgttaaatgcaaaaaggagatatgattctgtaactccaatcagttcagatgtgtaactcaaattattatgcctttcaggatgatggtagagcaatattaaacaagcttccacttttgactgctaaaaaaaaaaaaaaaaa

SEQ ID NO: 169 - protein, 458 aa, Homo sapiens
MDSVELCLPESFSLHYEEELLCRMSNKDRHIDSSCSSFIKTEPSSPASLTDSVNHHSPGGSSDASGSYSSTMNGHQNGLDSPPLYPSAPILGGSGPVRKLYDDCSSTIVEDPQTKCEYMLNSMPKRLCLVCGDIASGYHYGVASCEACKAFFKRTIQGNIEYSCPATNECEITKRRRKSCQACRFMKCLKVGMLKEGVRLDRVRGGRQKYKRRIDAENSPYLNPQLVQPAKKPYNKIVSHLLVAEPEKIYAMPDPTVPDSDIKALTTLCDLADRELVVIIGWAKHIPGFSTLSLADQMSLLQSAWMEILILGVVYRSLSFEDELVYADDYIMDEDQSKLAGLLDLNNAILQLVKKYKSMKLEKEEFVTLKAIALANSDSMHIEDVEAVQKLQDVLHEALQDYEAGQHMEDPRRAGKMLMTLPLLRQTSTKAVQHFYNIKLEGKVPMHKLFLEMLEAKV

SEQ ID NO: 170 - DNA, 5369 bp, Homo sapiens
gtgtaagatgtgcaatgttcctgcatgggggttttgtagactttcatagccaaagaaaccggcttcggcttctttaaaatccccgacgactcacctgattaacctgctgcagttctgaccctgccaagagctgacaatttactggttcatcaatgaaacaatattaaattatgaagatgtaaggaaaaaatcctacgctaacactgtcgcagtttgaaagctttaaaaagttgaagtctattggaaaccttcttataagaaaccttcctagtcagagaattcaactttcttcttttcttcattcatgaaaatgcagatccactgagaaagggaataaggcttctctgcagaatgtcaaacaaagatcgacacattgattccagctgttcgtccttcatcaagacggaaccttccagcccagcctccctgacggacagcgtcaaccaccacagccctggtggctcttcagacgccagtgggagctacagttcaaccatgaatggccatcagaacggacttgactcgccacctctctacccttctgctcctatcctgggaggtagtgggcctgtcaggaaactgtatgatgactgctccagcaccattgttgaagatccccagaccaagtgtgaatacatgctcaactcgatgcccaagagactgtgtttagtgtgtggtgacatcgcttctgggtaccactatggggtagcatcatgtgaagcctgcaaggcattcttcaagaggacaattcaaggcaatatagaatacagctgccctgccacgaatgaatgtgaaatcacaaagcgcagacgtaaatcctgccaggcttgccgcttcatgaagtgtttaaaagtgggcatgctgaaagaaggggtgcgtcttgacagagtacgtggaggtcggcagaagtacaagcgcaggatagatgcggagaacagcccatacctgaaccctcagctggttcagccagccaaaaagccatataacaagattgtctcacatttgttggtggctgaaccggagaagatctatgccatgcctgaccctactgtccccgacagtgacatcaaagccctcactacactgtgtgacttggccgaccgagagttggtggttatcattggatgggcgaagcatattccaggcttctccacgctgtccctggcggaccagatgagccttctgcagagtgcttggatggaaattttgatccttggtgtcgtataccggtctctttcgtttgaggatgaacttgtctatgcagacgattatataatggacgaagaccagtccaaattagcaggccttcttgatctaaataatgctatcctgcagctggtaaagaaatacaagagcatgaagctggaaaaagaagaatttgtcaccctcaaagctatagctcttgctaattcagactccatgcacatagaagatgttgaagccgttcagaagcttcaggatgtcttacatgaagcgctgcaggattatgaagctggccagcacatggaagaccctcgtcgagctggcaagatgctgatgacactgccactcctgaggcagacctctaccaaggccgtgcagcatttctacaacatcaaactagaaggcaaagtcccaatgcacaaactttttttggaaatgttggaggccaaggtctgactaaaagctccctgggccttcccatccttcatgttgaaaaagggaaaataaacccaagagtgatgtcgaagaaacttagagtttagttaacaacatcaaaaatcaacagactgcactgataatttagcagcaagactatgaagcagctttcagattcctccataggttcctgatgagtttctttctactttctccatcatcttctttcctctttcttcccacatttctctttctctttattttttctccttttcttctttcacctcccttatttctttgcttctttcattcctagttcccattctcctttattttcttcccgtctgcctgccttctttcttttctttacctactctcattcctctcttttctcatccttccccttttttctaaatttgaaatagctttagtttaaaaaaaaatcctcccttccccctttcctttccctttctttcctttttccctttccttttccctttcctttcctttcctcttgaccttctttccatctttctttttcttccttctgctgctgaacttttaaaagaggtctctaactgaagagagatggaagccagccctgccaaaggatggagatccataatatggatgccagtgaacttattgtgaaccatactgtccccaatgactaaggaatcaaagagagagaaccaacgttcctaaaagtacagtgcaacatatacaaattgactgagtgcagtattagatttcatgggagcagcctctaattagacaacttaagcaacgttgcatcggctgcttcttatcattgcttttccatctagatcagttacagccatttgattccttaattgttttttcaagtcttccaggtatttgttagtttagctactatgtaactttttcagggaatagtttaagctttattcattcatgcaatactaaagagaaataagaatactgcaattttgtgctggctttgaacaattacgaacaataatgaaggacaaatgaatcctgaaggaagatttttaaaaatgttttgtttcttcttacaaatggagatttttttgtaccagctttaccacttttcagccatttattaatatgggaatttaacttactcaagcaatagttgaagggaaggtgcatattatcacggatgcaatttatgttgtgtgccagtctggtcccaaacatcaatttcttaacatgagctccagtttacctaaatgttcactgacacaaaggatgagattacacctacagtgactctgagtagtcacatatataagcactgcacatgagatatagatccgtagaattgtcaggagtgcacctctctacttgggaggtacaattgccatatgatttctagctgccatggtggttaggaatgtgatactgcctgtttgcaaagtcacagaccttgcctcagaaggagctgtgagccagtattcatttaagaggcaataaggcaaatgccagaattaaaaaaaaaaatcatcaaagacagaaaatgcctgaccaaattctaaaacctaatccatataagtttattcatttaggaatgttcgtttaaattaatctgcagtttttaccaagagctaagccaatatatgtgcttttcaaccagtattgtcacagcatgaaagtcaagtcaggttccagactgttaagaggtgtaatctaatgaagaaatcaattagatgccccgaaatctacagtcgctgaataaccaataaacagtaacctccatcaaatgctataccaatggaccagtgttagtagctgctccctgtattatgtgaacagtcttattctatgtacacagatgtaattaaaattgtaatcctaacaaacaaaagaaatgtagttcagcttttcaatgtttcatgtttgctgtgcttttctgaattttatgttgcattcaaagactgttgtcttgttcttgtggtgtttggattcttgtggtgtgtgcttttagacacagggtagaattagagacaatattggatgtacaattcctcaggagactacagtagtatattctattccttaccagtaataaggttcttcctaataataattaagagattgaaactccaaacaagtattcattatgaacagatacacatcaaaatcataataatattttcaaaacaaggaataatttctctaatggtttattatagaataccaatgtatagcttagaaataaaactttgaatatttcaagaatatagataagtctaatttttaaatgctgtatatatggctttcactcaatcatctctcagatgttgttattaactcgctctgtgttgttgcaaaactttttggtgcagattcgtttccaaaactattgctactttgtgtgctttaaacaaaataccttgggttgatgaaacatcaacccagtgctaggaatactgtgtatctatcattagctatatgggactatattgtagattgtggtttctcagtagagaagtgactgtagtgtgattctagataaatcatcattagcaattcattcagatggtcaataacttgaaatttatagctgtgataggagttcagaaattggcacatccctttaaaaataacaacagaaaatacaactcctgggaaaaaaggtgctgattctataagattatttatatatgtaagtgtttaaaaagattattttccagaaagtttgtgcagggtttaagttgctactattcaactacactatatataaataaaatatatacaatatatacattgttttcactgtatcacattaaagtacttgggcttcagaagtaagagccaaccaactgaaaacctgagatggagatatgttcaaagaatgagatacaattttttagttttcagtttaagtaactctcagcattacaaaagagtaagtatctcacaaataggaaataaaactaaaacgtggatttaaaaagaactgcacgggctttagggtaaatgctcatcttaaacctcactagagggaagtcttctcaagtttcaagcaagaccatttacttaatgtgaagttttggaaagttataaaggtgtatgttttagccatatgattttaattttaattttgcttcttttaggttcgttcttatttaaagcaatatgattgtgtgactccttgtagttacacttgtgtttcaatcagatcagattgttgtatttattccactattttgcatttaaatgataacataaaagatataaaaaatttaaaactgctatttttcttatagaagagaaaatgggtgttggtgattgtattttaattatttaagcgtctctgtttacctgcctaggaaaacattttatggcagtcttatgtgcaaagatcgtaaaaggacaaaaaatttaaactgcttataataatccaggagttgcattatagccagtagtaaaaataataataataataataaaaccatgtctatagctgtagatgggcttcacatctgtaaagcaatcaattgtatatttttgtgatgtgtaccatactgtgtgctccagcaaatgtccatttgtgtaaatgtatttattttatattgtatatattgttaaatgcaaaaaggagatatgattctgtaactccaatcagttcagatgtgtaactcaaattattatgcctttcaggatgatggtagagcaatattaaacaagcttccacttttgactgctaaaaaaaaaaaaaaaaa

SEQ ID NO: 171 - protein, 435 aa, Homo sapiens
MSNKDRHIDSSCSSFIKTEPSSPASLTDSVNHHSPGGSSDASGSYSSTMNGHQNGLDSPPLYPSAPILGGSGPVRKLYDDCSSTIVEDPQTKCEYMLNSMPKRLCLVCGDIASGYHYGVASCEACKAFFKRTIQGNIEYSCPATNECEITKRRRKSCQACRFMKCLKVGMLKEGVRLDRVRGGRQKYKRRIDAENSPYLNPQLVQPAKKPYNKIVSHLLVAEPEKIYAMPDPTVPDSDIKALTTLCDLADRELVVIIGWAKHIPGFSTLSLADQMSLLQSAWMEILILGVVYRSLSFEDELVYADDYIMDEDQSKLAGLLDLNNAILQLVKKYKSMKLEKEEFVTLKAIALANSDSMHIEDVEAVQKLQDVLHEALQDYEAGQHMEDPRRAGKMLMTLPLLRQTSTKAVQHFYNIKLEGKVPMHKLFLEMLEAKV

SEQ ID NO: 172 - DNA, 5251 bp, Homo sapiens
gtgtaagatgtgcaatgttcctgcatgggggttttgtagactttcatagccaaagaaaccggcttcggcttctttaaaatccccgacgactcacctgattaacctgctgcagttctgaccctgccaagagctgacaatttactggttcatcaatgaaacaatattaaattatgaagatgtaaggaaaaaatcctacgctaacactgtcgcagtttgaaaggcttctctgcagaatgtcaaacaaagatcgacacattgattccagctgttcgtccttcatcaagacggaaccttccagcccagcctccctgacggacagcgtcaaccaccacagccctggtggctcttcagacgccagtgggagctacagttcaaccatgaatggccatcagaacggacttgactcgccacctctctacccttctgctcctatcctgggaggtagtgggcctgtcaggaaactgtatgatgactgctccagcaccattgttgaagatccccagaccaagtgtgaatacatgctcaactcgatgcccaagagactgtgtttagtgtgtggtgacatcgcttctgggtaccactatggggtagcatcatgtgaagcctgcaaggcattcttcaagaggacaattcaaggcaatatagaatacagctgccctgccacgaatgaatgtgaaatcacaaagcgcagacgtaaatcctgccaggcttgccgcttcatgaagtgtttaaaagtgggcatgctgaaagaaggggtgcgtcttgacagagtacgtggaggtcggcagaagtacaagcgcaggatagatgcggagaacagcccatacctgaaccctcagctggttcagccagccaaaaagccatataacaagattgtctcacatttgttggtggctgaaccggagaagatctatgccatgcctgaccctactgtccccgacagtgacatcaaagccctcactacactgtgtgacttggccgaccgagagttggtggttatcattggatgggcgaagcatattccaggcttctccacgctgtccctggcggaccagatgagccttctgcagagtgcttggatggaaattttgatccttggtgtcgtataccggtctctttcgtttgaggatgaacttgtctatgcagacgattatataatggacgaagaccagtccaaattagcaggccttcttgatctaaataatgctatcctgcagctggtaaagaaatacaagagcatgaagctggaaaaagaagaatttgtcaccctcaaagctatagctcttgctaattcagactccatgcacatagaagatgttgaagccgttcagaagcttcaggatgtcttacatgaagcgctgcaggattatgaagctggccagcacatggaagaccctcgtcgagctggcaagatgctgatgacactgccactcctgaggcagacctctaccaaggccgtgcagcatttctacaacatcaaactagaaggcaaagtcccaatgcacaaactttttttggaaatgttggaggccaaggtctgactaaaagctccctgggccttcccatccttcatgttgaaaaagggaaaataaacccaagagtgatgtcgaagaaacttagagtttagttaacaacatcaaaaatcaacagactgcactgataatttagcagcaagactatgaagcagctttcagattcctccataggttcctgatgagtttctttctactttctccatcatcttctttcctctttcttcccacatttctctttctctttattttttctccttttcttctttcacctcccttatttctttgcttctttcattcctagttcccattctcctttattttcttcccgtctgcctgccttctttcttttctttacctactctcattcctctcttttctcatccttccccttttttctaaatttgaaatagctttagtttaaaaaaaaatcctcccttccccctttcctttccctttctttcctttttccctttccttttccctttcctttcctttcctcttgaccttctttccatctttctttttcttccttctgctgctgaacttttaaaagaggtctctaactgaagagagatggaagccagccctgccaaaggatggagatccataatatggatgccagtgaacttattgtgaaccatactgtccccaatgactaaggaatcaaagagagagaaccaacgttcctaaaagtacagtgcaacatatacaaattgactgagtgcagtattagatttcatgggagcagcctctaattagacaacttaagcaacgttgcatcggctgcttcttatcattgcttttccatctagatcagttacagccatttgattccttaattgttttttcaagtcttccaggtatttgttagtttagctactatgtaactttttcagggaatagtttaagctttattcattcatgcaatactaaagagaaataagaatactgcaattttgtgctggctttgaacaattacgaacaataatgaaggacaaatgaatcctgaaggaagatttttaaaaatgttttgtttcttcttacaaatggagatttttttgtaccagctttaccacttttcagccatttattaatatgggaatttaacttactcaagcaatagttgaagggaaggtgcatattatcacggatgcaatttatgttgtgtgccagtctggtcccaaacatcaatttcttaacatgagctccagtttacctaaatgttcactgacacaaaggatgagattacacctacagtgactctgagtagtcacatatataagcactgcacatgagatatagatccgtagaattgtcaggagtgcacctctctacttgggaggtacaattgccatatgatttctagctgccatggtggttaggaatgtgatactgcctgtttgcaaagtcacagaccttgcctcagaaggagctgtgagccagtattcatttaagaggcaataaggcaaatgccagaattaaaaaaaaaaatcatcaaagacagaaaatgcctgaccaaattctaaaacctaatccatataagtttattcatttaggaatgttcgtttaaattaatctgcagtttttaccaagagctaagccaatatatgtgcttttcaaccagtattgtcacagcatgaaagtcaagtcaggttccagactgttaagaggtgtaatctaatgaagaaatcaattagatgccccgaaatctacagtcgctgaataaccaataaacagtaacctccatcaaatgctataccaatggaccagtgttagtagctgctccctgtattatgtgaacagtcttattctatgtacacagatgtaattaaaattgtaatcctaacaaacaaaagaaatgtagttcagcttttcaatgtttcatgtttgctgtgcttttctgaattttatgttgcattcaaagactgttgtcttgttcttgtggtgtttggattcttgtggtgtgtgcttttagacacagggtagaattagagacaatattggatgtacaattcctcaggagactacagtagtatattctattccttaccagtaataaggttcttcctaataataattaagagattgaaactccaaacaagtattcattatgaacagatacacatcaaaatcataataatattttcaaaacaaggaataatttctctaatggtttattatagaataccaatgtatagcttagaaataaaactttgaatatttcaagaatatagataagtctaatttttaaatgctgtatatatggctttcactcaatcatctctcagatgttgttattaactcgctctgtgttgttgcaaaactttttggtgcagattcgtttccaaaactattgctactttgtgtgctttaaacaaaataccttgggttgatgaaacatcaacccagtgctaggaatactgtgtatctatcattagctatatgggactatattgtagattgtggtttctcagtagagaagtgactgtagtgtgattctagataaatcatcattagcaattcattcagatggtcaataacttgaaatttatagctgtgataggagttcagaaattggcacatccctttaaaaataacaacagaaaatacaactcctgggaaaaaaggtgctgattctataagattatttatatatgtaagtgtttaaaaagattattttccagaaagtttgtgcagggtttaagttgctactattcaactacactatatataaataaaatatatacaatatatacattgttttcactgtatcacattaaagtacttgggcttcagaagtaagagccaaccaactgaaaacctgagatggagatatgttcaaagaatgagatacaattttttagttttcagtttaagtaactctcagcattacaaaagagtaagtatctcacaaataggaaataaaactaaaacgtggatttaaaaagaactgcacgggctttagggtaaatgctcatcttaaacctcactagagggaagtcttctcaagtttcaagcaagaccatttacttaatgtgaagttttggaaagttataaaggtgtatgttttagccatatgattttaattttaattttgcttcttttaggttcgttcttatttaaagcaatatgattgtgtgactccttgtagttacacttgtgtttcaatcagatcagattgttgtatttattccactattttgcatttaaatgataacataaaagatataaaaaatttaaaactgctatttttcttatagaagagaaaatgggtgttggtgattgtattttaattatttaagcgtctctgtttacctgcctaggaaaacattttatggcagtcttatgtgcaaagatcgtaaaaggacaaaaaatttaaactgcttataataatccaggagttgcattatagccagtagtaaaaataataataataataataaaaccatgtctatagctgtagatgggcttcacatctgtaaagcaatcaattgtatatttttgtgatgtgtaccatactgtgtgctccagcaaatgtccatttgtgtaaatgtatttattttatattgtatatattgttaaatgcaaaaaggagatatgattctgtaactccaatcagttcagatgtgtaactcaaattattatgcctttcaggatgatggtagagcaatattaaacaagcttccacttttgactgctaaaaaaaaaaaaaaaaa

SEQ ID NO: 173 - protein, 435 aa, Homo sapiens; identical to SEQ ID NO: 171

SEQ ID NO: 174 - DNA, 2932 bp, Homo sapiens
agctcccagggcccggccccccccggcgctcacgctctcggggcggactcccggccctccgcgccctctcgcgcggcgatggccccactcggatacttcttactcctctgcagcctgaagcaggctctgggcagctacccgatctggtggtcgctggctgttgggccacagtattcctccctgggctcgcagcccatcctgtgtgccagcatcccgggcctggtccccaagcagctccgcttctgcaggaactacgtggagatcatgcccagcgtggccgagggcatcaagattggcatccaggagtgccagcaccagttccgcggccgccggtggaactgcaccaccgtccacgacagcctggccatcttcgggcccgtgctggacaaagctaccagggagtcggcctttgtccacgccattgcctcagccggtgtggcctttgcagtgacacgctcatgtgcagaaggcacggccgccatctgtggctgcagcagccgccaccagggctcaccaggcaagggctggaagtggggtggctgtagcgaggacatcgagtttggtgggatggtgtctcgggagttcgccgacgcccgggagaaccggccagatgcccgctcagccatgaaccgccacaacaacgaggctgggcgccaggccatcgccagccacatgcacctcaagtgcaagtgccacgggctgtcgggcagctgcgaggtgaagacatgctggtggtcgcaacccgacttccgcgccatcggtgacttcctcaaggacaagtacgacagcgcctcggagatggtggtggagaagcaccgggagtcccgcggctgggtggagaccctgcggccgcgctacacctacttcaaggtgcccacggagcgcgacctggtctactacgaggcctcgcccaacttctgcgagcccaaccctgagacgggctccttcggcacgcgcgaccgcacctgcaacgtcagctcgcacggcatcgacggctgcgacctgctgtgctgcggccgcggccacaacgcgcgagcggagcggcgccgggagaagtgccgctgcgtgttccactggtgctgctacgtcagctgccaggagtgcacgcgcgtctacgacgtgcacacctgcaagtaggcaccggccgcggctccccctggacggggcgggccctgcctgagggtgggcttttccctgggtggagcaggactcccacctaaacggggcagtactcctccctgggggcgggactcctccctgggggtggggctcctacctgggggcagaactcctacctgaaggcagggctcctccctggagctagtgtctcctctctggtggctgggctgctcctgaatgaggcggagctccaggatggggaggggctctgcgttggcttctccctggggacggggctcccctggacagaggcggggctacagattgggcggggcttctcttgggtgggacagggcttctcctgcgggggcgaggcccctcccagtaagggcgtggctctgggtgggcggggcactaggtaggcttctacctgcaggcggggctcctcctgaaggaggcggggctctaggatggggcacggctctggggtaggctgctccctgagggcggagcgcctccttaggagtggggttttatggtggatgaggcttcttcctggatggggcagagcttctcctgaccagggcaaggccccttccacgggggctgtggctctgggtgggcgtggcctgcataggctccttcctgtgggtggggcttctctgggaccaggctccaatggggcggggcttctctccgcgggtgggactcttccctgggaaccgccctcctgattaaggcgtggcttctgcaggaatcccggctccagagcaggaaattcagcccaccagccacctcatccccaaccccctgtaaggttccatccacccctgcgtcgagctgggaaggttccatgaagcgagtcgggtccccaacccgtgcccctgggatccgagggcccctctccaagcgcctggctttggaatgctccaggcgcgccgacgcctgtgccaccccttcctcagcctggggtttgaccacccacctgaccaggggccctacctggggaaagcctgaagggcctcccagcccccaaccccaagaccaagcttagtcctgggagaggacagggacttcgcagaggcaagcgaccgaggccctcccaaagaggcccgccctgcccgggctcccacaccgtcaggtactcctgccagggaactggcctgctgcgccccaggccccgcccgtctctgctctgctcagctgcgcccccttctttgcagctgcccagcccctcctccctgccctcgggtctccccacctgcactccatccagctacaggagagatagaagcctctcgtcccgtccctccctttcctccgcctgtccacagccccttaagggaaaggtaggaagagaggtccagccccccaggctgcccagagctgctggtctcatttgggggcgttcgggaggtttggggggcatcaaccccccgactgtgctgctcgcgaaggtcccacagccctgagatgggccggcccccttcctggcccctcatggcgggactggagaaatggtccgctttcctggagccaatggcccggcccctcctgactcatccgcctggcccgggaatgaatggggaggccgctgaacccacccggcccatatccctggttgcctcatggccagcgcccctcagcctctgccactgtgaaccggctcccaccctcaaggtgcggggagaagaagcggccaggcggggcgccccaagagcccaaaagagggcacaccgccatcctctgcctcaaattctgcgtttttggttttaatgttatatctgatgctgctatatccactgtccaacgg

SEQ ID NO: 175 - protein, 352 aa, Homo sapiens
MAPLGYFLLLCSLKQALGSYPIWWSLAVGPQYSSLGSQPILCASIPGLVPKQLRFCRNYVEIMPSVAEGIKIGIQECQHQFRGRRWNCTTVHDSLAIFGPVLDKATRESAFVHAIASAGVAFAVTRSCAEGTAAICGCSSRHQGSPGKGWKWGGCSEDIEFGGMVSREFADARENRPDARSAMNRHNNEAGRQAIASHMHLKCKCHGLSGSCEVKTCWWSQPDFRAIGDFLKDKYDSASEMVVEKHRESRGWVETLRPRYTYFKVPTERDLVYYEASPNFCEPNPETGSFGTRDRTCNVSSHGIDGCDLLCCGRGHNARAERRREKCRCVFHWCCYVSCQECTRVYDVHTCK

SEQ ID NO: 176 - DNA, 1986 bp, Homo sapiens
ccttacccggcgtgccccgcgcccggaggcgctgacgtggccgccgtcagagccgccatcttgtgggagcaaaaccaacgcctggctcggagcagcagcctctgaggtgagggcgaggggcgcgggccggtgtgggccgcagagacgttggagccggcgggggctggggactggcctcggggcgacttgaggtgtccctggccagtgtccttccacctgtccacaagcatggggaacatcttcgccaacctcttcaagggcctttttggcaaaaaagaaatgcgcatcctcatggtgggcctggatgctgcagggaagaccacgatcctctacaagcttaagctgggtgagatcgtgaccaccattcccaccataggcttcaacgtggaaaccgtggagtacaagaacatcagcttcactgtgtgggacgtgggtggccaggacaagatccggcccctgtggcgccactacttccagaacacacaaggcctgatcttcgtggtggacagcaatgacagagagcgtgtgaacgaggcccgtgaggagctcatgaggatgctggccgaggacgagctccgggatgctgtcctcctggtgttcgccaacaagcaggacctccccaacgccatgaatgcggccgagatcacagacaagctggggctgcactcactacgccacaggaactggtacattcaggccacctgcgccaccagcggcgacgggctctatgaaggactggactggctgtccaatcagctccggaaccagaagtgaacgcgacccccctccctctcactcctcttgccctctgctttactctcatgtggcaaacgtgcggctcgtggtgtgagtgccagaagctgcctccgtggtttggtcaccgtgtgcatcgcaccgtgctgtaaatgtggcagacgcagcctgcggccaggctttttatttaatgtaaatagtttttgtttccaatgaggcagtttctggtactcctatgcaatattactcagctttttttattgtaaaaagaaaaatcaactcactgttcagtgctgagaggggatgtaggcccatgggcacctggcctccaggagtcgctgtgttgggagagccggccacgcccttggctttagagctgtgttgaaatccattttggtggttggtttttaacccaaactcagtgcattttttaaaatagttaagaatccaagtcgagaacacttgaacacacagaagggagaccccgcctagcatagatttgcagttacggcctggatgccagtcgccagcccagctgttcccctcgggaacatgaggtggtggtggcgcagcagactgcgatcaattctgcatggtcacagtagagatccccgcaactcgcttgtccttgggtcaccctgcattccatagccatgtgcttgtccctgtgctcccacggttcccaggggccaggctgggagcccacagccaccccactatgccgcaggccgccctacccaccttcaggcagcctatgggacgcagggccccatctgtccctcggtcgccgtgtggccagagtgggtccgtcgtccccaacactcgtgctcgctcagacactttggcaggatgtctggggcctcaccagcaggagcgcgtgcaagccgggcaggcggtccacctagacccacagcccctcgggagcaccccacctctgtgtgtgatgtagctttctctccctcagcctgcaagggtccgatttgccatcgaaaaagacaacctctacttttttcttttgtattttgataaacactgaagctggagctgttaaatttatcttggggaaacctcagaactggtctatttggtgtcgtggaacctcttactgctttcaatacacgattagtaatcaactgttttgtatacttgttttcagttttcatttcgacaaacaagcactgtaattatagctattagaataaaatctcttaactatttcaaaaaaaaaaaaaa

SEQ ID NO: 177 - protein, 181 aa, Homo sapiens
MGNIFANLFKGLFGKKEMRILMVGLDAAGKTTILYKLKLGEIVTTIPTIGFNVETVEYKNISFTVWDVGGQDKIRPLWRHYFQNTQGLIFVVDSNDRERVNEAREELMRMLAEDELRDAVLLVFANKQDLPNAMNAAEITDKLGLHSLRHRNWYIQATCATSGDGLYEGLDWLSNQLRNQK

SEQ ID NO: 178 - DNA, 2020 bp, Homo sapiens
gcccgcgcgtggacggttgggattagcggccgcgggggccggtgggggtcgtggggcctcccccacccgagtacaggcgagcgagcggcatccgggcggacccccgcctcggggaccgggaaactgaggctcgggcggcctgagacgccgtcaaggtcatgtaggtggtgggggcttgcatcttcgcctcccgactccatccagttcgtgtttgctgtgaagacggtgtccctggccagtgtccttccacctgtccacaagcatggggaacatcttcgccaacctcttcaagggcctttttggcaaaaaagaaatgcgcatcctcatggtgggcctggatgctgcagggaagaccacgatcctctacaagcttaagctgggtgagatcgtgaccaccattcccaccataggcttcaacgtggaaaccgtggagtacaagaacatcagcttcactgtgtgggacgtgggtggccaggacaagatccggcccctgtggcgccactacttccagaacacacaaggcctgatcttcgtggtggacagcaatgacagagagcgtgtgaacgaggcccgtgaggagctcatgaggatgctggccgaggacgagctccgggatgctgtcctcctggtgttcgccaacaagcaggacctccccaacgccatgaatgcggccgagatcacagacaagctggggctgcactcactacgccacaggaactggtacattcaggccacctgcgccaccagcggcgacgggctctatgaaggactggactggctgtccaatcagctccggaaccagaagtgaacgcgacccccctccctctcactcctcttgccctctgctttactctcatgtggcaaacgtgcggctcgtggtgtgagtgccagaagctgcctccgtggtttggtcaccgtgtgcatcgcaccgtgctgtaaatgtggcagacgcagcctgcggccaggctttttatttaatgtaaatagtttttgtttccaatgaggcagtttctggtactcctatgcaatattactcagctttttttattgtaaaaagaaaaatcaactcactgttcagtgctgagaggggatgtaggcccatgggcacctggcctccaggagtcgctgtgttgggagagccggccacgcccttggctttagagctgtgttgaaatccattttggtggttggtttttaacccaaactcagtgcattttttaaaatagttaagaatccaagtcgagaacacttgaacacacagaagggagaccccgcctagcatagatttgcagttacggcctggatgccagtcgccagcccagctgttcccctcgggaacatgaggtggtggtggcgcagcagactgcgatcaattctgcatggtcacagtagagatccccgcaactcgcttgtccttgggtcaccctgcattccatagccatgtgcttgtccctgtgctcccacggttcccaggggccaggctgggagcccacagccaccccactatgccgcaggccgccctacccaccttcaggcagcctatgggacgcagggccccatctgtccctcggtcgccgtgtggccagagtgggtccgtcgtccccaacactcgtgctcgctcagacactttggcaggatgtctggggcctcaccagcaggagcgcgtgcaagccgggcaggcggtccacctagacccacagcccctcgggagcaccccacctctgtgtgtgatgtagctttctctccctcagcctgcaagggtccgatttgccatcgaaaaagacaacctctacttttttcttttgtattttgataaacactgaagctggagctgttaaatttatcttggggaaacctcagaactggtctatttggtgtcgtggaacctcttactgctttcaatacacgattagtaatcaactgttttgtatacttgttttcagttttcatttcgacaaacaagcactgtaattatagctattagaataaaatctcttaactatttcaaaaaaaaaaaaaa

SEQ ID NO: 179 - protein, 181 aa, Homo sapiens; identical to SEQ ID NO: 177

SEQ ID NO: 180 - DNA, 1998 bp, Homo sapiens
gcccgcgcgtggacggttgggattagcggccgcgggggccggtgggggtcgtggggcctcccccacccgagtacaggcgagcgagcggcatccgggcggacccccgcctcggggaccgggaaactgaggctcgggcggcctgagacgccgtcaaggtcatgtaggtggtgggggcttgcatcttcgcctcccgactccatccagtgtccctggccagtgtccttccacctgtccacaagcatggggaacatcttcgccaacctcttcaagggcctttttggcaaaaaagaaatgcgcatcctcatggtgggcctggatgctgcagggaagaccacgatcctctacaagcttaagctgggtgagatcgtgaccaccattcccaccataggcttcaacgtggaaaccgtggagtacaagaacatcagcttcactgtgtgggacgtgggtggccaggacaagatccggcccctgtggcgccactacttccagaacacacaaggcctgatcttcgtggtggacagcaatgacagagagcgtgtgaacgaggcccgtgaggagctcatgaggatgctggccgaggacgagctccgggatgctgtcctcctggtgttcgccaacaagcaggacctccccaacgccatgaatgcggccgagatcacagacaagctggggctgcactcactacgccacaggaactggtacattcaggccacctgcgccaccagcggcgacgggctctatgaaggactggactggctgtccaatcagctccggaaccagaagtgaacgcgacccccctccctctcactcctcttgccctctgctttactctcatgtggcaaacgtgcggctcgtggtgtgagtgccagaagctgcctccgtggtttggtcaccgtgtgcatcgcaccgtgctgtaaatgtggcagacgcagcctgcggccaggctttttatttaatgtaaatagtttttgtttccaatgaggcagtttctggtactcctatgcaatattactcagctttttttattgtaaaaagaaaaatcaactcactgttcagtgctgagaggggatgtaggcccatgggcacctggcctccaggagtcgctgtgttgggagagccggccacgcccttggctttagagctgtgttgaaatccattttggtggttggtttttaacccaaactcagtgcattttttaaaatagttaagaatccaagtcgagaacacttgaacacacagaagggagaccccgcctagcatagatttgcagttacggcctggatgccagtcgccagcccagctgttcccctcgggaacatgaggtggtggtggcgcagcagactgcgatcaattctgcatggtcacagtagagatccccgcaactcgcttgtccttgggtcaccctgcattccatagccatgtgcttgtccctgtgctcccacggttcccaggggccaggctgggagcccacagccaccccactatgccgcaggccgccctacccaccttcaggcagcctatgggacgcagggccccatctgtccctcggtcgccgtgtggccagagtgggtccgtcgtccccaacactcgtgctcgctcagacactttggcaggatgtctggggcctcaccagcaggagcgcgtgcaagccgggcaggcggtccacctagacccacagcccctcgggagcaccccacctctgtgtgtgatgtagctttctctccctcagcctgcaagggtccgatttgccatcgaaaaagacaacctctacttttttcttttgtattttgataaacactgaagctggagctgttaaatttatcttggggaaacctcagaactggtctatttggtgtcgtggaacctcttactgctttcaatacacgattagtaatcaactgttttgtatacttgttttcagttttcatttcgacaaacaagcactgtaattatagctattagaataaaatctcttaactatttcaaaaaaaaaaaaaa

SEQ ID NO: 181 - protein, 181 aa, Homo sapiens; identical to SEQ ID NO: 177

SEQ ID NO: 182 - DNA, 1901 bp, Homo sapiens
ccttacccggcgtgccccgcgcccggaggcgctgacgtggccgccgtcagagccgccatcttgtgggagcaaaaccaacgcctggctcggagcagcagcctctgaggtgtccctggccagtgtccttccacctgtccacaagcatggggaacatcttcgccaacctcttcaagggcctttttggcaaaaaagaaatgcgcatcctcatggtgggcctggatgctgcagggaagaccacgatcctctacaagcttaagctgggtgagatcgtgaccaccattcccaccataggcttcaacgtggaaaccgtggagtacaagaacatcagcttcactgtgtgggacgtgggtggccaggacaagatccggcccctgtggcgccactacttccagaacacacaaggcctgatcttcgtggtggacagcaatgacagagagcgtgtgaacgaggcccgtgaggagctcatgaggatgctggccgaggacgagctccgggatgctgtcctcctggtgttcgccaacaagcaggacctccccaacgccatgaatgcggccgagatcacagacaagctggggctgcactcactacgccacaggaactggtacattcaggccacctgcgccaccagcggcgacgggctctatgaaggactggactggctgtccaatcagctccggaaccagaagtgaacgcgacccccctccctctcactcctcttgccctctgctttactctcatgtggcaaacgtgcggctcgtggtgtgagtgccagaagctgcctccgtggtttggtcaccgtgtgcatcgcaccgtgctgtaaatgtggcagacgcagcctgcggccaggctttttatttaatgtaaatagtttttgtttccaatgaggcagtttctggtactcctatgcaatattactcagctttttttattgtaaaaagaaaaatcaactcactgttcagtgctgagaggggatgtaggcccatgggcacctggcctccaggagtcgctgtgttgggagagccggccacgcccttggctttagagctgtgttgaaatccattttggtggttggtttttaacccaaactcagtgcattttttaaaatagttaagaatccaagtcgagaacacttgaacacacagaagggagaccccgcctagcatagatttgcagttacggcctggatgccagtcgccagcccagctgttcccctcgggaacatgaggtggtggtggcgcagcagactgcgatcaattctgcatggtcacagtagagatccccgcaactcgcttgtccttgggtcaccctgcattccatagccatgtgcttgtccctgtgctcccacggttcccaggggccaggctgggagcccacagccaccccactatgccgcaggccgccctacccaccttcaggcagcctatgggacgcagggccccatctgtccctcggtcgccgtgtggccagagtgggtccgtcgtccccaacactcgtgctcgctcagacactttggcaggatgtctggggcctcaccagcaggagcgcgtgcaagccgggcaggcggtccacctagacccacagcccctcgggagcaccccacctctgtgtgtgatgtagctttctctccctcagcctgcaagggtccgatttgccatcgaaaaagacaacctctacttttttcttttgtattttgataaacactgaagctggagctgttaaatttatcttggggaaacctcagaactggtctatttggtgtcgtggaacctcttactgctttcaatacacgattagtaatcaactgttttgtatacttgttttcagttttcatttcgacaaacaagcactgtaattatagctattagaataaaatctcttaactatttcaaaaaaaaaaaaaa

SEQ ID NO: 183 - protein, 181 aa, Homo sapiens; identical to SEQ ID NO: 177

SEQ ID NO: 184 - DNA, 1307 bp, Homo sapiens
tcgggcctgggtccgacggtagtgggtagcgggtctcgggttgcgggttgcaggttgcaagccgcaggccccaggcaactgccttcccggcgccatgttcggctccagtcgtggaggcgtgcgcggcgggcaggaccagttcaactgggaggacgtgaagactgacaagcagcgggagaactacctgggcaactcgctgatggcgccggtaggccgctggcagaagggccgcgacctcacctggtacgccaagggccgggcgccatgcgcgggcccgagccgcgaggaggaactggcagccgtgcgggaggcggagcgcgaggcgctgctggccgcccttggctacaagaacgtgaagaagcagcccacgggcctgagcaaggaggacttcgcggaggtctgcaagcgggaaggaggcgaccccgaggagaagggcgtggaccggctgctggggctggggagcgcaagtggctccgtgggccgcgtggcgatgtcccgagaggacaaggaggccgccaaactggggctgtctgtgttcacgcatcaccgcgtagagagcggcgggcccgggacctcggcagcctcggccaggaggaagccgcgggcggaggatcagacggaaagcagttgtgagagccacaggaaaagcaagaaggagaagaagaaaaagaaaaagaggaaacacaagaaagagaagaagaagaaagacaaagagcacaggcggccagctgaggccacctcctctcccacatctcctgagaggcccaggcaccaccaccatgactccgactccaactccccctgctgtaagaggaggaagcggggacacagtggggacaggaggagcccgtctcgcaggtggcatgacagaggctctgaggcctgatggctggaccctgctcactgctgttgtgggaccctgaaccctcccttcaccttgcttgcctcctgcctcggaagctccttgggtgtgggtgaagcccgaggctgctcctgtggaagtggctctgggcaccagcctgtggggctaaagacttgacagctagctctggagcagccggcttcctggaaaacctccaggtttcgcataccagggatggcccctggcttggcctgcgaaggtgaacctgcccagatttatcagtagaggctggactccctctgtgtcctgcccatggttgcagcagccatgggcctatgagcggtctaactgtggccaagtatggtgacctctatttttctttatattgactctttgtatttcaataaatatattttaaaaggaaggtaaaaaaaaaaaaaaaaaa

SEQ ID NO: 185 - protein, 263 aa, Homo sapiens
MFGSSRGGVRGGQDQFNWEDVKTDKQRENYLGNSLMAPVGRWQKGRDLTWYAKGRAPCAGPSREEELAAVREAEREALLAALGYKNVKKQPTGLSKEDFAEVCKREGGDPEEKGVDRLLGLGSASGSVGRVAMSREDKEAAKLGLSVFTHHRVESGGPGTSAASARRKPRAEDQTESSCESHRKSKKEKKKKKKRKHKKEKKKKDKEHRRPAEATSSPTSPERPRHHHHDSDSNSPCCKRRKRGHSGDRRSPSRRWHDRGSEA

SEQ ID NO: 186 - DNA, 698 bp, Homo sapiens
tgccagtgacgtcgtgggctgcagcgcagcagcacccaacgcagtgagtaccttgatctcctgcgtggcctcgtccctggtcttagttccaccgggcagcgggagtcaggaccgcctgtcctcagacccctccgcagcgactgtggcggccgcaggttgcacgccagggcctgtactgaccacctccacgtgccactggggctgtaaggaggaatggcggccgtgggcagcctgcttggccggctgaggcagagcaccgtgaaggccaccggacctgcactccgccgcctgcacacatcctcctggcgagctgacagcagcagggcctcactcactcgtgtgcaccgccaggcttatgcacgactctaccccgtgctgctggtgaagcaggatggctccaccatccacatccgctacagggagccacggcgcatgctggcgatgcccatagatctggacaccctgtctcctgaggagcgccgggccaggctgcggaagcgtgaggctcagctccagtcgaggaaggagtacgagcaggagctcagtgatgacttgcatgtggagcgctaccgacagttctggaccaggaccaagaagtgaccgtggctccagccaccccgggacattgctaagatgggagggctgttcttaaatcactcgttcttgaagctgccacctggaaaaaaaaaaaaaaaaaa

SEQ ID NO: 187 - protein, 128 aa, Homo sapiens
MAAVGSLLGRLRQSTVKATGPALRRLHTSSWRADSSRASLTRVHRQAYARLYPVLLVKQDGSTIHIRYREPRRMLAMPIDLDTLSPEERRARLRKREAQLQSRKEYEQELSDDLHVERYRQFWTRTKK

SEQ ID NO: 188 - DNA, 691 bp, Homo sapiens
tgccagtgacgtcgtgggctgcagcgcagcagcacccaacgcatctagcaggaaaggagagggagctttccccgaagaccctcctggaccagccccaggctcctgtgctggcggttctgagaagtccaagggttgctgggagaggttggttgcacgccagggcctgtactgaccacctccacgtgccactggggctgtaaggaggaatggcggccgtgggcagcctgcttggccggctgaggcagagcaccgtgaaggccaccggacctgcactccgccgcctgcacacatcctcctggcgagctgacagcagcagggcctcactcactcgtgtgcaccgccaggcttatgcacgactctaccccgtgctgctggtgaagcaggatggctccaccatccacatccgctacagggagccacggcgcatgctggcgatgcccatagatctggacaccctgtctcctgaggagcgccgggccaggctgcggaagcgtgaggctcagctccagtcgaggaaggagtacgagcaggagctcagtgatgacttgcatgtggagcgctaccgacagttctggaccaggaccaagaagtgaccgtggctccagccaccccgggacattgctaagatgggagggctgttcttaaatcactcgttcttgaagctgccacctggaaaaaaaaaaaaaaaaaa

SEQ ID NO: 189 - protein, 128 aa, Homo sapiens; identical to SEQ ID NO: 187

SEQ ID NO: 190 - DNA, 694 bp, Homo sapiens
tgccagtgacgtcgtgggctgcagcgcagcagcacccaacgcatctagcaggaaaggagagggagctttccccgaagaccctcctggaccagccccaggctcctgtgctggcggttctgagaagtccaagggttgctgggagaggttgcaggttgcacgccagggcctgtactgaccacctccacgtgccactggggctgtaaggaggaatggcggccgtgggcagcctgcttggccggctgaggcagagcaccgtgaaggccaccggacctgcactccgccgcctgcacacatcctcctggcgagctgacagcagcagggcctcactcactcgtgtgcaccgccaggcttatgcacgactctaccccgtgctgctggtgaagcaggatggctccaccatccacatccgctacagggagccacggcgcatgctggcgatgcccatagatctggacaccctgtctcctgaggagcgccgggccaggctgcggaagcgtgaggctcagctccagtcgaggaaggagtacgagcaggagctcagtgatgacttgcatgtggagcgctaccgacagttctggaccaggaccaagaagtgaccgtggctccagccaccccgggacattgctaagatgggagggctgttcttaaatcactcgttcttgaagctgccacctggaaaaaaaaaaaaaaaaaa

SEQ ID NO: 191 - protein, 128 aa, Homo sapiens; identical to SEQ ID NO: 187

SEQ ID NO: 192 - DNA, 736 bp, Homo sapiens
tgccagtgacgtcgtgggctgcagcgcagcagcacccaacgcagtgagtaccttgatctcctgcgtggcctcgtccctggtcttagttccaccgggcagcgggagtcaggaccgcctgtcctcagacccctccgcagcgactgtggcggccgcaggcggttctgagaagtccaagggttgctgggagaggttggttgcacgccagggcctgtactgaccacctccacgtgccactggggctgtaaggaggaatggcggccgtgggcagcctgcttggccggctgaggcagagcaccgtgaaggccaccggacctgcactccgccgcctgcacacatcctcctggcgagctgacagcagcagggcctcactcactcgtgtgcaccgccaggcttatgcacgactctaccccgtgctgctggtgaagcaggatggctccaccatccacatccgctacagggagccacggcgcatgctggcgatgcccatagatctggacaccctgtctcctgaggagcgccgggccaggctgcggaagcgtgaggctcagctccagtcgaggaaggagtacgagcaggagctcagtgatgacttgcatgtggagcgctaccgacagttctggaccaggaccaagaagtgaccgtggctccagccaccccgggacattgctaagatgggagggctgttcttaaatcactcgttcttgaagctgccacctggaaaaaaaaaaaaaaaaaa

SEQ ID NO: 193 - protein, 128 aa, Homo sapiens; identical to SEQ ID NO: 187

SEQ ID NO: 194 - DNA, 873 bp, Homo sapiens
tgccagtgacgtcgtgggctgcagcgcagcagcacccaacgcagtgagtaccttgatctcctgcgtggcctcgtccctggtcttagttccaccgggcagcgggagtcaggaccgcctgtcctcagacccctccgcagcgactgtggcggccgcagtctagcaggaaaggagagggagctttccccgaagaccctcctggaccagccccaggctcctgtgctggttgcacgccagggcctgtactgaccacctccacgtgccactggggctgtaaggaggaatggcggccgtgggcagcctgcttggcctggcagcctcttcctggctagggggccagaacgcctctgaccacagcctgtggctcctgaggaagccccgaggctcatcctgccccggcacgggtcaccagctctgccggctgaggcagagcaccgtgaaggccaccggacctgcactccgccgcctgcacacatcctcctggcgagctgacagcagcagggcctcactcactcgtgtgcaccgccaggcttatgcacgactctaccccgtgctgctggtgaagcaggatggctccaccatccacatccgctacagggagccacggcgcatgctggcgatgcccatagatctggacaccctgtctcctgaggagcgccgggccaggctgcggaagcgtgaggctcagctccagtcgaggaaggagtacgagcaggagctcagtgatgacttgcatgtggagcgctaccgacagttctggaccaggaccaagaagtgaccgtggctccagccaccccgggacattgctaagatgggagggctgttcttaaatcactcgttcttgaagctgccacctggaaaaaaaaaaaaaaaaaa

SEQ ID NO: 195 - protein, 55 aa, Homo sapiens
MLAMPIDLDTLSPEERRARLRKREAQLQSRKEYEQELSDDLHVERYRQFWTRTKK

SEQ ID NO: 196 - DNA, 765 bp, Homo sapiens
tgccagtgacgtcgtgggctgcagcgcagcagcacccaacgcagtgagtaccttgatctcctgcgtggcctcgtccctggtcttagttccaccgggcagcgggagtcaggaccgcctgtcctcagacccctccgcagcgactgtggcggccgcagtctagcaggaaaggagagggagctttccccgaagaccctcctggaccagccccaggctcctgtgctggttgcacgccagggcctgtactgaccacctccacgtgccactggggctgtaaggaggaatggcggccgtgggcagcctgcttggccggctgaggcagagcaccgtgaaggccaccggacctgcactccgccgcctgcacacatcctcctggcgagctgacagcagcagggcctcactcactcgtgtgcaccgccaggcttatgcacgactctaccccgtgctgctggtgaagcaggatggctccaccatccacatccgctacagggagccacggcgcatgctggcgatgcccatagatctggacaccctgtctcctgaggagcgccgggccaggctgcggaagcgtgaggctcagctccagtcgaggaaggagtacgagcaggagctcagtgatgacttgcatgtggagcgctaccgacagttctggaccaggaccaagaagtgaccgtggctccagccaccccgggacattgctaagatgggagggctgttcttaaatcactcgttcttgaagctgccacctggaaaaaaaaaaaaaaaaaa

SEQ ID NO: 197 - protein, 128 aa, Homo sapiens; identical to SEQ ID NO: 187

SEQ ID NO: 198 - DNA, 653 bp, Homo sapiens
tgccagtgacgtcgtgggctgcagcgcagcagcacccaacgcatctagcaggaaaggagagggagctttccccgaagaccctcctggaccagccccaggctcctgtgctggttgcacgccagggcctgtactgaccacctccacgtgccactggggctgtaaggaggaatggcggccgtgggcagcctgcttggccggctgaggcagagcaccgtgaaggccaccggacctgcactccgccgcctgcacacatcctcctggcgagctgacagcagcagggcctcactcactcgtgtgcaccgccaggcttatgcacgactctaccccgtgctgctggtgaagcaggatggctccaccatccacatccgctacagggagccacggcgcatgctggcgatgcccatagatctggacaccctgtctcctgaggagcgccgggccaggctgcggaagcgtgaggctcagctccagtcgaggaaggagtacgagcaggagctcagtgatgacttgcatgtggagcgctaccgacagttctggaccaggaccaagaagtgaccgtggctccagccaccccgggacattgctaagatgggagggctgttcttaaatcactcgttcttgaagctgccacctggaaaaaaaaaaaaaaaaaa

SEQ ID NO: 199 - protein, 128 aa, Homo sapiens; identical to SEQ ID NO: 187

SEQ ID NO: 200 - DNA, 586 bp, Homo sapiens
tgccagtgacgtcgtgggctgcagcgcagcagcacccaacgcagttgcacgccagggcctgtactgaccacctccacgtgccactggggctgtaaggaggaatggcggccgtgggcagcctgcttggccggctgaggcagagcaccgtgaaggccaccggacctgcactccgccgcctgcacacatcctcctggcgagctgacagcagcagggcctcactcactcgtgtgcaccgccaggcttatgcacgactctaccccgtgctgctggtgaagcaggatggctccaccatccacatccgctacagggagccacggcgcatgctggcgatgcccatagatctggacaccctgtctcctgaggagcgccgggccaggctgcggaagcgtgaggctcagctccagtcgaggaaggagtacgagcaggagctcagtgatgacttgcatgtggagcgctaccgacagttctggaccaggaccaagaagtgaccgtggctccagccaccccgggacattgctaagatgggagggctgttcttaaatcactcgttcttgaagctgccacctggaaaaaaaaaaaaaaaaaa

SEQ ID NO: 201 - protein, 128 aa, Homo sapiens; identical to SEQ ID NO: 187

SEQ ID NO: 202 - DNA, 210 bp, Homo sapiens
atggacaccagccacatgcagcctatcaagctggtcagggtcaccaagcttctgggcagaatgggctctaaaggacagtggtcgcaggtgtgcatggaatttatggaggatgcgagccgctccatcatccacaatgtaaaaggccccgtgtgcgagggcgatgtgctcaccctgttgcagtcagagtcagaggtcgggaggttgcgctga

SEQ ID NO: 203 - protein, 69 aa, Homo sapiens [sequence omitted]

SEQ ID NO: 204 - DNA, 1098 bp, Homo sapiens
tgggcggaagaggtggccccggatgctgcggcgcccgctggccgggctggctgcggccgccctgggccgggccccaccggacggcttgctctgctctttacctggggttgctgtcgaggaccctgtgcaagactcggccggtttttctttctccctgatggacagacccaaacatagccgcgcagcatcgtgaagggctggggccttcactcctctgtggctctggaagagcccgatttcctcaggaggcatgtcgggccccaggcctgtggtgctgagcgggccttcgggagctgggaagagcaccctgctgaagaggctgctccaggagcacagcggcatctttggcttcagcgtgtcccataccacgaggaacccgaggcccggcgaggagaacggcaaagattactactttgtaaccagggaggtgatgcagcgtgacatagcagccggcgacttcatcgagcatgccgagttctcggggaacctgtatggcacgagcaaggtggcggtgcaggccgtgcaggccatgaaccgcatctgtgtgctggacgtggacctgcagggtgtgcggaacatcaaggccaccgatctgcggcccatctacatctctgtgcagccgccttcactgcacgtgctggagcagcggctgcggcagcgcaacactgaaaccgaggagagcctggtgaagcggctggctgctgcccaggccgacatggagagcagcaaggagcccggcctgtttgatgtggtcatcattaacgacagcctggaccaggcctacgcagagctgaaggaggcgctctctgaggaaatcaagaaagctcaaaggaccggcgcctgaggcttgctgtctgttctcggcaccccgggcccatacaggaccagggcagcagcattgagccacccccttggcaggcgatacggcagctctgtgcccttggccagcatgtggagtggaggagatgctgcccctgtggttggaacatcctggggtgacccccgacccagcctcgctgggctgtcccctgtccctatctctcactctggacccagggctgacatcctaataaaataactgttggattagaaactcca

SEQ ID NO: 205 - protein, 197 aa, Homo sapiens
MSGPRPVVLSGPSGAGKSTLLKRLLQEHSGIFGFSVSHTTRNPRPGEENGKDYYFVTREVMQRDIAAGDFIEHAEFSGNLYGTSKVAVQAVQAMNRICVLDVDLQGVRNIKATDLRPIYISVQPPSLHVLEQRLRQRNTETEESLVKRLAAAQADMESSKEPGLFDVVIINDSLDQAYAELKEALSEEIKKAQRTGA

SEQ ID NO: 206 - DNA, 2259 bp, Homo sapiens
ggggaacaatggggcccttgagggcccctcctccagcccccattgtgcttggtggtgagaggtggccctggctcggccacacaccctcggggaggaccagcatccaagcaggtggaagggctctgagggagactggaattttctggcctggagaaggacccgcccgcccgcccctatgaccaacatgagctggagcttcctgacgcggctgctggaggagatccacaaccactccaccttcgtgggcaaggtgtggctcacggtgctggtggtcttccgcatcgtgctgacggctgtgggcggcgaggccatctactcggacgagcaggccaagttcacttgcaacacgcggcagccaggctgcgacaacgtctgctatgacgccttcgcgcccctgtcgcacgtgcgcttctgggtcttccagattgtggtcatctccacgccctcggtcatgtacctgggctacgccgtgcaccgcctggcccgtgcgtctgagcaggagcggcgccgcgccctccgccgccgcccggggccacgccgcgcgccccgagcgcacctgccgcccccgcacgccggctggcctgagcccgccgacctgggcgaggaggagcccatgctgggcctgggcgaggaggaggaggaggaggagacgggggcagccgagggcgccggcgaggaagcggaggaggcaggcgcggaggaggcgtgcactaaggcggtcggcgctgacggcaaggcggcagggaccccgggcccgaccgggcaacacgatgggcggaggcgcatccagcgggagggcctgatgcgcgtgtacgtggcccagctggtggccagggcagctttcgaggtggccttcctggtgggccagtacctgctgtacggcttcgaggtgcgaccgttctttccctgcagccgccagccctgcccgcacgtggtggactgcttcgtgtcgcgccctactgaaaagacggtcttcctgctggttatgtacgtggtcagctgcctgtgcctgctgctcaacctctgtgagatggcccacctgggcttgggcagcgcgcaggacgcggtgcgcggccgccgcggccccccggcctccgcccccgcccccgcgccgcggcccccgccctgcgccttccctgcggcggccgctggcttggcctgcccgcccgactacagcctggtggtgcgggcggccgagcgcgctcgggcgcatgaccagaacctggcaaacctggccctgcaggcgctgcgcgacggggcagcggctggggaccgcgaccgggacagttcgccgtgcgtcggcctccctgcggcctcccgggggccccccagagcaggcgcccccgcgtcccggacgggcagtgctacctctgcgggcactgtcggggagcagggccggcccggcacccacgagcggccaggagccaagcccagggctggctccgagaagggcagtgccagcagcagggacgggaagaccaccgtgtggatctgagggcgctggcttgcgagctgggccagggaggaggagggttggggggctccggtggaaacctgcgaccccttctcctcagccttctccttagccggtggcctcaggcagactctgcccagaggggcagccaggctgctcagggaaggggctgaaagcggcagaggagtgccctggcttggtcaccactggggccaaggtggggtggagagaggcctaggagccagaaagggccctctgctgtggtctgaaccccagggggagtggggcattgactccacccctgtcctgagctggaataggtcctctgggatgccagctctcccctttgtgcttccctgcagcaacccatggagggcccagggtgcctggtatgggcatcagttggtgggggtgcgggggtgcgtgtccccattccctgcaacagcaaatggggctccttcttcagccctccccttcccagccccaaactgagacagactgggagctgggagcctggggtggacaggaccataccctctttgagcttctgcgatgccggccttccgttcctctgggaggcttgaagttctgcaaagatgttgatatgccttgcagcttggacccaatgggtggtggtcagggcctgggggcttggccatgctgggggaatggggctctgggttcctgcctgtggcctgtctgtcctcctccctaattcagacccagcctcaagaggaaagggagtaaaataaaactaacttgtttataaaaaaaaaaaaaaaaaa

SEQ ID NO: 207 - protein, 439 aa, Homo sapiens
MTNMSWSFLTRLLEEIHNHSTFVGKVWLTVLVVFRIVLTAVGGEAIYSDEQAKFTCNTRQPGCDNVCYDAFAPLSHVRFWVFQIVVISTPSVMYLGYAVHRLARASEQERRRALRRRPGPRRAPRAHLPPPHAGWPEPADLGEEEPMLGLGEEEEEEETGAAEGAGEEAEEAGAEEACTKAVGADGKAAGTPGPTGQHDGRRRIQREGLMRVYVAQLVARAAFEVAFLVGQYLLYGFEVRPFFPCSRQPCPHVVDCFVSRPTEKTVFLLVMYVVSCLCLLLNLCEMAHLGLGSAQDAVRGRRGPPASAPAPAPRPPPCAFPAAAAGLACPPDYSLVVRAAERARAHDQNLANLALQALRDGAAAGDRDRDSSPCVGLPAASRGPPRAGAPASRTGSATSAGTVGEQGRPGTHERPGAKPRAGSEKGSASSRDGKTTVWI

SEQ ID NO: 208 - DNA, 7921 bp, Homo sapiens
ctccctccggcggccaccgccaggggccgctgtggcacccgcccctcccgcttccttgggcccttcccgctgccccactcttgtccaagatggcgaccgcggcgctgcttcgaggcgccactccggggcgcggcggcccggtctggcgctggcggctgcgcgcggccccaaggtgccgcctggcccacagctcctgcagtcctggtggcgacccaacggccggagcggcctgggcctgcttccggctggacgggcgcaccctgctgcgcgtgcgtggccccgacgcggcgcccttcctgctagggctgctgaccaatgaactgccgcttccgagtcctgcggccgcgggggccccgcctgctgcgcgcgcgggctacgcccacttcctgaacgtgcagggccggacgctctatgacgtcatcttgtacgggctccaggaacactcggaggtgtctggcttccttctggagtgtgacagctcggtgcagggcgcgctgcagaagcacctcgcgctatacaggatccggcggaaggtcacggtggagccgcacccggagctgcgagtgtgggcggtgttgcccagttcccctgaggcctgcggggctgcatcgctgcaggagagggcaggggctgccgccatcctcatccgcgacccgcgaacagcacgcatggggtggcggctcctcacccaggatgaaggcccagccctggtgcccgggggccggctcggggacttgtgggattatcaccagcaccgatacctgcaaggcgttcctgagggggtccgagacttgcctcctggggtggccctgcccctggagtccaacctggccttcatgaacggcgtgagcttcaccaaaggctgctacattggccaggagctgacggcccgcacccaccacatgggcgtcatccgcaagcgcctcttccctgtccggttcttggacccccttcccaccagtggcatcacccctggtgccacggtgctgactgcctcaggacagactgtgggcaagttcagggctggccagggcaacgtggggctggccctgctgtggtcagagaagatcaagggtcctctgcacatcagagcctctgagggtgcccaggtggccttagccgcatctgtgccagactggtggcctacagtctccaagtagtccgaagccttggctggcgcaggctgatggggaggctggggcctggggcctttggcctctgtccagggtcttcccgtcccatctgtctgctgcgcctactgggtgggagccctggtttccatctgggaaagtcccccttgtaggtgccctgcctggccccacccatgctcaggggccccaggcacgtgggttgttttctccctggacttcctgtggccccagaggagcccaccgtgtgagtgctgggctccagatggcgccgggtcccaatcgtggctccacacagggttgtctgggaggacgggacggtgtctctggccagcactggcagcttccgggccttgtaccccactctgcctggcatgagcctcatggggggttggtccctgtgcctggaagcggggtggtgtccagggtctgcaggctggggctcgggctttgggagttgtttcactgtgcttgcttccagcatgtctcagggtggggctatgcgtggtctagaggggtctggggcattggatcaggtggcatgtgggtgtctacacatcgagaagcacacagggatgagccactaggtatcccatgctggaggcttgtggaaggctgtgcccatctcccatgtttccccacctctgttcctcctcagagccctccaggagcgtggggtgggggccagcgcagggctcaggagccagcagggcagagttctgcctgtgtgtgctgggttttggcatagcctgtgtttgcagtgagagtgacttgctgtcagtcacggggcacagcctcctgttcacccactggcttcccccttcccactgaagtgtgagctctatgtttcagggcatctattaaagagtgagccacaggcagccccttgggagctctggtttcatttgggggagagggaggtgggggcttagtttttgtgatctggctgactggaccccgggaacagcgctcctttgagaacgcccagacctaccagatgaagcacttggcatggctgcaggccagcaggggaggcctcagaggcccaggctgggcacgtgggtgccgagtctgcaaaggacagccccatggctgtgagctgtcggctgcagggcgcagggcctggggggcaggcgtttgggccaccaagctggacgttagggtggccacagagggccaagcaggcagggagcctgtgccgccatcctggggggccacaggtgctctctagaaatctgcagccatggcggttttggggtcaggggtctaaaggcagctctgagctgcagtgtagtttgtgatcacccaggaggagggtgtagagcggatggacgggaggaagcggctgcagctggagggaagagaggggccgtccagcctcacccgctgcagtcagctctcctatgggcaaggaaacagctaggtggccctgacccctgcggtcctgagagccggtggccttcagcccctcttggacaggtcatggtctggaagcgcccagcgcaggatggattccagaccagcatccctgcaaccttttcagccccactggctgctgctttaaactggcatggagacatttgatcagcttcccagccagttttctctccagctcagccaggagtgggtgcctgtggcctgtgtcaccaagagctggtgtctcctgcatgaggggcatgcacccctggaatgagggtctgtgcctcgagctcaaagtgtcccggctctgtcatctgcctgaagttgcctggcttttccagtggggcctccttgagtgctgcagcatctgggagcatcctagcctgtcccgtgggtgtggctgggtgagggctaggaggtgagccaggaaggaagcactccactccagagtgaggtgccgcctgagccatcctgtgccccctcagtgtcttcaggtctctgcaggtgtcaggatctcaaaatacttggttcagatcaaacacatttcgtgttcttctgtgtccttttttttttttttttttttttttgagatggagtcttgctctgttggccaggctggagctcagtggcacaatctctgctcactgcaacctctgcctcccaggttccagtgattttcctgcctcagcctcctgggtagctgggactacaggcacatgccccatgcccggctaatttttgtatttttagtagagatggggttttaccatgttggccaggatggtctcaattacaggcatgagccactgtgcccagcctcttctgtgtctttaaaaaggaaagtgtcagtcaacaaaagagcccctctgtcatacaaaccaaatcagttttcaccaaaatgtccttagtcctctcagaaaggcctggcctttaggaccttggaagcaggccctaaagcgcatcggcagggtcagagctttgtgttcaggaacactgggatctgctgagagctggtgtagccgctccaaaactgcacactgcttttcctgtctgctttagtttgtgttgtaaaaacataggaagttcgtgtgtgtgtgtgtgtgtgtgaattcaaggcataaggtgcagttgtgttatgtgggtatagtgcatggtggtgcagtctgggcttcttaccctcacacctcctgcctcccctcgttagagtcccccacatccgccttccactttctgagcccacattgcctgttgggcagctcctggttatgaggcaggacgtgtggtgtttgactgtctgtttctgagctgttttacttaacacagtgtatatggtgcatctttaggaaagcatgcttgtattttcctttcaaagccagatatgggcgggtgtggtggctcatgcctgtgatcccagcactttgggaggccgaggcaggaggattgcttgagcccaggagtttgagagcagcctgggcaacatatcaagactctgtctcttaaaaaaaaaaaaattagccaggcatggtggtccacacctgtggtcccacctattcgggaggctgaagtgcgaggatcacttgagcccaggaggttgaggctgcagtgagctgtgattgtgccactgcactccagcctgggcaacagagcaagaccctgtcttaaaacaaagaaagaataaaaaagaagagaagttgcagttggtagtatttccagagcccggcagacagtgtagaaactgtgagaaacccacctccaaatcaggccttagatagaaaacatcctaagaagtatacgttcattgtaaaatcattatcatcatcatcttctaatccccaaggagacaagctccctgttctgtgttcttgtatgaggcggtcagtcaagcgcagcccgagaggagaggcaggagcctgggagagcctctgctagacctttcctggcacttccccaggaaaggcaaggcagggcagatgtgcggctggccagctggagtgatttccatgggctccaagctgtaggagtggtccctggctgccagagtgctctggccagatagaggtgggctctggactggtgaggctgcattgcggaggcgcgcacacccagctgggcccttatctgtaaggactggctggcctgggaggggcagtctcccagccagaaggtggaatttttttttttttttgagataccaaaacatcctaaggtacaggaaagaaattgtcaacacacacacacagtaccataaacaaggcccagcagaaaggcagacagaagcacacacaccaatgttctgatcttagagtaagcagacacatcacatggaatgaggatgtttaatatatttaaagaaaacaatttatgcacaggaagcaagagactataaaaatgaccaagcagattttaaaaagagaacttgttgaaataaaaataaaatactctaaaaaatattccatgatgtgtttcctgaagaatcgggaactgtttgaagaaatgacccaaagtgcagcacagaaagacagagctggaaaatatgagatgggatgagacaagaagatggagagtttagtatgacatccgcaatttacgagtaattccagaaggaggggaaagagaatatggggtggaggcaagtattcagagaaatacggctgagaactttcccaaaccaacaggagcccctgctccttaggttcaggaaccagcagctcccaagcagcatagttaaaaagctctacccaaacagtcacgtcttggtgaaagtacagaatctcatgacaaagagatcttaaggcagaaaagaaagagattatctggaaagaagaaaataagtagttgattaaaagcaacagtggaagccagaaagatagtaaataatatcttcaaagtcctgggagaaaatagtgatagcctagaattgtgtacccagaaaatccgtctttcaagaatgaggggccaggcgcagtggctcacgtctgtattcccagcactttgggaggccaaggcaggtggatcacctgaggtcaggagttcaagaccagcctgatcaacatggtgaaaccctgtctctactaaaaatataaaaattagctgggtgtggtggcatattcctgtaatcccagctactcgggaggctgaggcaggagaatcacttgaacccaggaggcagaggttgcagtgagccaagattgtgccattgcactccagcctgggcaatagaatgagactctgtctcaaaaaaaaaaaaaaaaaaaaaaaaaaaaagagggctaaacgcattttcataccacgaaactgccctcactccggagtttgctgccagcagagcctagagcgtctaaggcatgtctgggcttctggcgagggatcctgtggggaagctggagatggaagaaggagtgaataggcaggaaggtggatttgtgggcatgtctaaaacaccacatctagaagcttctacttagaatgcctacttttggagtttataaaaaagatgccacatgttgagttgggagagaggtgcccaaacctacagtgttctaaagtccccctactggtcggaaggagggcacggacactgacttcagcatctgttacaaggcttatcagagttttcagataatctctaaaagaatggaaatatatcttccaaactatagagggaagaccatggaatttaaaagccagtccttcaaggagaaatgaacaaactcaaaatcgtagttgggagtgttttttttttttttgagacagagtctcactcttgcccaggctggagtggagtggcataaacacagctcactacagcctcaaccttctgggctcagatgattctcctgcctcagcctcctgagtagcaggaactacaggtgtgagtcatcacactcagctaattttttttttttttttttactttttgtagagatggggttctcactgcattgcccaggctggtcttgaatttctgggctcaggtgatcttcccacctcagcctcctgagtagctgggaccacaggtgcatgctaatttttaaaattttttgtttttaaatgctggtcttcaactcttgtccccaagtagctgggattggggcatgaggcactgtgctaacttcatgttgaaattgaattgccattctaacagtgttaagagatggggcctgtaagaggtgattaggctgtgagggctccactctccaagggcggagttaatgttatgaaagggtaagtccagcccgcttgtgcctctcttgccctccagtgttcaaagcaccatcttggaggtggaattcccaagtcggccagttcctggatcttggactgtccggtctccagaaccgtgagccaataaacctctgttccttgtaaatgagtcagcctcaggtattctcttgtagcagcacaaatggaggcagacacttccttcaccaatctcatgggaggcccactcctgtgagctgcctctagttccccaggccacagactccatcagggctcacctggagccgtccctgtctcacctggaagctctcccactcctctggccagcctgggcatctccacccaatatgagtgatggcgactgattcccttactttagcaagctgggaataaggaatgtttgcctgttcttattcaggggtctctgcatctccacacttgcacaggttgtgtgtacatacattttcctgtctttctggtaagcccctggggtggagctctgggccacagggcaggaaaactcagtgttgctaggaactgccagacattttcccggagtgagtgcagcatttacattcccaccagaagtgtgccaggttcttgtcatactgcgtcctcgccagcgcttggtgctgtcagtcttcttagtttccatttagagattcagtgtttaaattttgaacgtcttgggtgaacaccttggtttgagaaaagtaagaaaaagggtctgtctggctatgggccatggagacccagggcagtgctccacgtgccaaccctggggcagggagcccaagctaggactgtgactgtctgggctgtgggcatctgaccatctccagtgtccccgtctttgatttccctggcgatggtgctagcttagtttgtgcgcatcggcatttgtgggagaaatgaaggattaatacattttgttttatgtcagactctctcagtgagaagttctcagggacaataatagcagggggtcctgctgaagaaaaactgggagatggctgagctctggtccatctttcattgattcattcatttcttcattcattcaaccatgtattgaatgcttatagccaatgaaaataaagtacacagtatattttaaaaaaaaaaaaaaaaaa

SEQ ID NO: 209 - protein, 356 aa, Homo sapiens
MATAALLRGATPGRGGPVWRWRLRAAPRCRLAHSSCSPGGDPTAGAAWACFRLDGRTLLRVRGPDAAPFLLGLLTNELPLPSPAAAGAPPAARAGYAHFLNVQGRTLYDVILYGLQEHSEVSGFLLECDSSVQGALQKHLALYRIRRKVTVEPHPELRVWAVLPSSPEACGAASLQERAGAAAILIRDPRTARMGWRLLTQDEGPALVPGGRLGDLWDYHQHRYLQGVPEGVRDLPPGVALPLESNLAFMNGVSFTKGCYIGQELTARTHHMGVIRKRLFPVRFLDPLPTSGITPGATVLTASGQTVGKFRAGQGNVGLALLWSEKIKGPLHIRASEGAQVALAASVPDWWPTVSK

SEQ ID NO: 210 - DNA, 20431 bp, Homo sapiens
gctgcccagagcccccatagagagaggtccccgccgccaccctcatggatcagccacagttcagcggggcgccccgctttctcacccggcccaaggccttcgtggtgtcggtgggcaaggacgccaccctcagctgccagatcgtgggtaatcccacgccacaggtgagctgggagaaggaccagcagccggtggcggccggcgcgcgcttccgtctggcccaggacggcgacctctaccgcctcactatcctggacctggcgctgggcgacagtgggcaatacgtgtgccgcgcgcgcaatgccataggcgaggccttcgctgctgtgggcctgcaggtggacgcggaggccgcgtgcgccgagcaggcgccgcacttcctgctgcggcccacgtccatccgcgtgcgcgagggctcagaggccaccttccgctgccgcgtgggtggctccccgaggccggcagtgagctggtccaaggacgggcggcgcctgggtgagcccgacggcccccgcgtgcgcgtggaggagctcggcgaggcaagtgcgctgcgcattcgggcggcgcggccgcgcgacggcggcacttacgaggtccgcgccgagaacccgctgggcgctgccagcgccgccgcggcgctagtggtggactcggacgccgcggacacggccagccggcccgggacctccacggccgcgctcctggcgcacctgcagcggcggcgcgaggctatgcgcgccgagggcgcccccgcctcaccgcccagcaccggcacgcgcacctgcacggtgactgaaggcaagcacgcgcgcctcagctgctacgtgaccggcgagcccaagcccgagacggtgtggaagaaggacggccagctggtgaccgagggccggcgccacgtggtgtacgaggacgcgcaggagaacttcgtgctcaagatcctcttctgcaagcagtcggaccgcggcctctacacctgcacggcgtccaacctcgtgggccagacctacagctctgtgctggtcgtagtgcgcgagcccgcggttcccttcaaaaagcggctgcaagatctggaggtgcgggagaaggagtcggccacgttcctatgtgaggtgccccagccgtccactgaggccgcgtggttcaaggaggagacgcggttgtgggcgagcgccaagtacggcatcgaggaggagggcaccgagcgccgcctgaccgtgcgcaatgtctcggccgacgacgacgcggtgtacatctgcgagacgccagagggcagccgcacggtggcggagctcgcagtccaaggaaacctcctccgaaagctccctcggaagacggcggtgcgcgtgggcgacacggctatgttttgcgtggagctggcggtcccggtgggccccgtccactggctgcggaaccaggaggaagtggtggcggggggccgcgtggccatctccgcggagggcacgcgccacacactaaccatctcccagtgctgcctggaggatgtgggccaggtggcctttatggctggcgactgccagacgtccacccagttctgcgtgtcggcccccaggaagcctcccctgcaaccccctgtggatcctgtggtaaaggccaggatggagagttccgtgattctcagctggtccccaccaccccatggggaacgccctgtcactatcgacggctacctggtagagaagaagaagcttggcacctacacctggatcaggtgccacgaggctgaatgggtggctacacctgagctgaccgtggctgatgtggcggaggaggggaacttccagttccgagtgtccgctctcaacagctttggtcagagtccctacctcgagttcccggggactgtccacctggcccccaagctggccgtgaggacaccgctgaaggcggtgcaggcggtagagggtggcgaggtcactttctccgtggacctcacggtggcctcagcgggtgagtggttcctggatgggcaggccctgaaggccagcagtgtgtatgagatccactgtgatcgcacccggcacacgctcaccatccgggaggtgcccgccagcctgcacggggcgcagctgaagttcgtggccaacggcattgagagcagcatccggatggaggtccgggcggccccagggctgactgccaacaagccgccagccgcagctgcccgggaggtgctggctcggctgcacgaggaggcgcagctgctggctgagctgtcagatcaggctgcggctgtgacgtggctgaaggatggtcgcacactgtccccaggccccaagtatgaggtgcaggcatcggccgggcggcgggtgctccttgtgcgagatgtggcccgggacgatgcaggcctctacgagtgcgtcagccgcgggggccgcatcgcctaccagctctccgtgcaaggcctcgcgcgctttctgcacaaggacatggcgggcagctgtgtggatgccgtggctgggggcccggcgcagtttgagtgtgagacctccgaagcccacgtccacgtgcactggtacaaggatggcatggagctgggccactccggtgagcgcttcttgcaggaggatgtggggacgcggcaccggctggtggcagccacagtcaccaggcaggatgaaggcacctactcctgccgcgtgggcgaggactctgtggacttccggctccgcgtctctgagcccaaggtggtgtttgctaaggagcagctggcacgcaggaagctgcaggcagaggcaggagccagtgccacactgagctgcgaggtggcccaggcccagacggaggtgacgtggtacaaggatgggaagaagctgagctccagctcgaaagtgtgcatggaggccacaggctgcacgcgcaggctggttgtgcagcaggcaggccaggcggatgccggggagtatagctgcgaggctgggggccagcggctctccttccatctggatgtcaaagagcccaaggtggtgtttgccaaggaccaggtggcacacagtgaggtgcaggctgaggcaggggccagtgccacgctgagctgcgaggtggcccaggcccagacggaggtgatgtggtacaaagatgggaagaagctgagctccagcttgaaagtgcatgtagaggccaagggctgcagacggaggctggtggtgcagcaggcaggcaagacagatgccggggactacagctgcgaggccaggggccagagggtctccttccgcctgcacatcacagagcccaagatgatgtttgcaaaggagcagtcagtgcataatgaggtgcaggctgaggcgggggccagtgccatgctgagctgtgaggtggcccaggcccagacggaggtgacgtggtacaaggatgggaagaagctgagctccagctcaaaagtgggcatggaggtcaaagggtgcacacggaggctggtgctgccacaggcgggcaaagcagatgctggggagtacagctgtgaggctgggggccagagagtctccttccacctgcacatcacagagcccaagggggtgtttgcgaaggagcagtcagtgcataatgaggtgcaggctgaggcggggaccactgccatgctgagctgtgaggtggcccagccccagacagaggtgacgtggtacaaggacgggaagaagctgagctccagctcaaaagtacgcatggaggtcaagggctgcacacgaaggctggtagtgcagcaggtgggcaaagcagatgctggggagtacagctgcgaggctgggggccagagagtctcctttcaactgcacatcacagagcccaaggcagtgtttgccaaggagcagttggtgcataatgaggtgcggactgaggcaggggccagtgccacactgagctgtgaggtggcccaggcccagacagaggtgacgtggtacaaggatgggaagaagctgagctccagttcgaaagtgcgcatagaggctgcgggctgcatgcggcagctggtggtgcagcaggcaggccaggcagatgctggggagtacacctgtgaggctgggggccagcggctctccttccacctggatgtttcagagcccaaggcggtgtttgcaaaggagcagctggcacacaggaaggtgcaggccgaggcgggggccattgccacgctgagctgcgaggtggcccaggcccagacagaggtgacgtggtacaaggacgggaagaagctgagctccagctcgaaagttcgaatggaggctgtgggctgcacacggaggctggtggtgcagcaggcatgccaggcggacaccggggagtatagctgcgaggccgggggccagcggctctccttcagcctggacgtggcagagcccaaggtggtgtttgccaaggagcagccagtgcacagggaggtgcaggcccaggcgggggccagcaccacactcagctgcgaggtggctcaggcccagacggaggtgatgtggtacaaggacgggaagaagctgagcttcagctcgaaagtgcgcatggaggctgtgggctgcacacggaggctggtggtgcagcaggcgggccaggcggtcgccggggagtacagctgcgaggcggggagccagcggctctccttccacctgcacgtggcagagcccaaggcggtgtttgccaaggagcagccagcgagcagggaggtgcaggctgaggcggggaccagtgccacgctgagctgcgaggtggcccaggcccagacagaggtgacgtggtacaaggacgggaagaaactgagctccagctcgaaagtgcgaatggaggccgtgggctgcacacggaggctggtggtgcaggaggcaggccaggcggacgccggggagtacagctgcaaggccggggatcagcggctgtccttccacctgcacgtggcagagcccaaggtggtgtttgccaaggagcagccagcacacagggaggtgcaggctgaggcgggggccagtgccacgctgagctgcgaggtggcccaggcccagacagaggtgacgtggtacaaggatgggaagaagctgagttccagctcgaaagtgcgcgtggaggccgtgggctgcacacggaggctggtggtgcagcaggcgggccaggcggatgctggggagtacagctgtgaggcggggggccaacggctgtccttccgcctgcacgtggcagagctggagccccaaatttcagagagaccctgccgcagggagcctctggtggtcaaggagcatgaagacatcatcctgaccgccacactggccacaccctctgcggccacggtgacctggctcaaggatggtgtggagattcgccgcagcaagcggcatgagacagccagccagggggacacccacaccctgaccgtgcatggcgcccaggttctggacagcgccatctacagctgccgtgtgggcgcagaggggcaggacttcccagtgcaggtggaagaggtggccgccaagttctgccggctgctggagcctgtgtgcggcgagctgggtggcacggtgacactggcctgcgagctaagcccagcgtgtgcagaggtggtgtggcgctgcggcaacacgcagcttcgggtgggcaagcgcttccagatggtggccgaggggcccgtgcgctcactcactgtgttggggctgcgcgcagaggacgcaggggagtacgtgtgtgagagccgtgatgaccacaccagtgcgcagctcaccgtcagtgtgccccgagtggtgaagtttatgtctgggctgagcaccgtggtcgcagaggagggcggcgaggccaccttccagtgcgtggtgtcccccagtgatgtggcagtcgtgtggttccgggacggtgccctgcttcagcccagcgagaagtttgccatatcacagagtggcgccagccacagcctgaccatctcagacctggtgctggaggacgcgggccagatcaccgtggaggctgagggcgcctcatcctctgctgccctgagggtccgagaggcgcctgtgctgttcaaaaagaagctggagccgcagacggtggaggagcggagctcggtgaccctggaggtggagctgacgcggccgtggccggagctgaggtggacacggaacgcgacggccctggcgccgggaaagaacgtggagatccacgccgagggcgcccgccaccgcctggttctgcacaacgtaggttttgccgaccgtggcttctttggctgcgagacgccggatgacaagacacaggccaaactcaccgtggagatgcgccaggtacggctcgtacggggcctgcaggcagtggaggcacgggagcagggcacggctaccatggaggtgcagctgtcgcatgcggacgtggatggcagctggactcgtgacggtctgcggttccagcaggggcccacgtgccacctggctgtgcggggccccatgcacaccctcacactctcggggctgcggccagaggatagtggccttatggtcttcaaggccgaaggagtgcacacgtcggcgcggctcgtggtcaccgagcttcccgtgagcttcagccgcccgctgcaggacgtggtgaccactgagaaggagaaggttaccctggagtgcgagctgtcgcgtcctaatgtggatgtgcgctggctgaaggacggtgtggagctgcgggcaggcaagacgatggccatcgcagcccagggcgcctgcaggagcctcaccatttaccggtgcgagttcgcggatcagggagtgtatgtgtgtgatgcccatgatgcccagagctctgcctccgtgaaggtacaaggaaggacatacactctcatctaccggagagtcctggcggaagatgcaggagagatccaatttgtagccgaaaatgcagaatcgcgagcccagctccgagtgaaggagctgccagtgaccctcgtgcgcccgctgcgggacaagattgccatggagaagcaccgcggtgtgctggagtgtcaggtgtcccgggccagcgcccaggtgcggtggttcaagggcagtcaggagctgcagcccgggcccaagtacgagctggtcagtgatggcctctaccgcaagctgatcatcagtgatgtccacgcagaggacgaggacacctacacctgtgacgccggtgatgtcaagaccagtgcacagttcttcgtggaagagcaatccatcaccattgtgcggggtctgcaggacgtgacagtgatggagcccgctcctgcctggtttgagtgtgagacctccatcccctcagtgcggccacctaagtggctcctggggaagacggtgttgcaggctggggggaacgtgggcctggagcaggagggcacggtgcaccggctgatgctgcggcggacctgctccaccatgaccgggcccgtgcacttcaccgttggcaagtcgcgctcctctgcccgcctggtggtctcagacatccccgtagtcctcacacggccgttggagcccaagacagggcgtgagctgcagtcagtggtcctgtcctgcgacttccggccagcccccaaggctgtgcagtggtacaaggatgacacgcccctgtctccctctgagaagtttaagatgagcctggagggtcagatggctgagctgcgcatcctccggctcatgcctgctgatgctggtgtctaccggtgccaggcgggcagtgcccacagcagcactgaggtcactgtggaagcgcgggaggtgacagtgacagggccgctacaggatgcagaggccacggaggagggctgggccagcttctcctgtgagctgtcccacgaggatgaggaggtcgagtggtcgctcaacgggatgcccctgtacaacgacagcttccatgagatctcacacaagggccggcgccacacgctggtactgaagagcatccagcgggctgatgcgggcatagtacgcgcctcctccctgaaggtgtcgacctctgcccgcctggaggtccgagtgaagccggtggtgttcctgaaggcgctggatgacctgtccgcagaggagcgcggcaccctggccctgcagtgtgaagtctctgaccccgaggcccatgtggtgtggcgcaaagatggcgtgcagctgggccccagtgacaagtatgacttcctgcacacggcgggcacgcgggggctcgtggtgcatgacgtgagccctgaagacgccggcctgtacacctgccacgtgggctccgaggagacccgggcccgggtccgcgtgcacgatctgcacgtgggcatcaccaagaggctgaagacaatggaggtgctggaaggggaaagctgcagctttgagtgcgtcctgtcccacgagagtgccagcgacccggccatgtggacagtcggtgggaagacagtgggcagctccagccgcttccaggccacacgtcagggccgaaaatacatcctggtggtccgggaggctgcaccaagtgatgccggggaggtggtcttctctgtgcggggcctcacctccaaggcctcactcattgtcagagagaggccggccgccatcatcaagcccctggaagaccagtgggtggcgccaggggaggacgtggagctgcgctgtgagctgtcacgggcgggaacgcccgtgcactggctgaaggacaggaaggccatccgcaagagccagaagtatgatgtggtctgcgagggcacgatggccatgctggtcatccgcggggcctcgctcaaggacgcgggcgagtacacgtgtgaggtggaggcttccaagagcacagccagcctccatgtggaagaaaaagcaaactgcttcacagaggagctgaccaatctgcaggtggaggagaaaggcacagctgtgttcacgtgcaagacggagcaccccgcggccacagtgacctggcgcaagggcctcttggagctacgggcctcagggaagcaccagcccagccaggagggcctgaccctgcggctcaccatcagtgccctggagaaggcagacagcgacacctatacctgcgacattggccaggcccagtcccgggcccagctcctagtgcaaggccggagagtgcacatcatcgaggacctggaggatgtggatgtgcaggagggctcctcggccaccttccgttgccggatctccccggccaactacgagcctgtgcactggttcctggacaagacacccctgcatgccaacgagctcaatgagatcgatgcccagcccgggggctaccacgtgctgaccctgcggcagctggcgctcaaggactcgggcaccatctactttgaggcgggtgaccagcgggcctcggccgccctgcgggtcactgagaagccaagcgtcttctcccgggagctcacagatgccaccatcacagagggtgaggacttgaccctggtgtgcgagaccagcacctgcgacattcctgtgtgctggaccaaggatgggaagaccctgcgggggtctgcccggtgccagctgagccatgagggccaccgggcccagctgctcatcactggggccaccctgcaggacagtggacgctacaagtgtgaggctgggggcgcctgcagcagctccattgtcagggtgcatgcgcggccagtgcggttccaggaggccctgaaggacctggaggtgctggagggtggtgctgccacactgcgctgtgtgctgtcatctgtggctgcgcccgtgaagtggtgctatggaaacaacgtcctgaggccaggtgacaaatacagcctacgccaggagggtgccatgctggagctggtggtccggaacctccggccgcaggacagcgggcggtactcatgctccttcggggaccagactacttctgccaccctcacagtgactgccctgcctgcccagttcatcgggaaactgagaaacaaggaggccacagaaggggccacggccacgctgcggtgtgagctgagcaaggcagcccctgtggagtggagaaaggggtccgagaccctcagagatggggacagatactgtctgaggcaggacggggccatgtgtgagctgcagatccgtggcctggccatggtggatgccgcggagtactcgtgtgtgtgtggagaggagaggacctcagcctcactcaccatcaggcccatgcctgcccacttcataggaagactgagacaccaagagagcatagaaggggccacagccacgctgcggtgtgagctgagcaaggcggcccccgtggagtggaggaaggggcgtgagagcctcagagatggggacagacatagcctgaggcaggacggggctgtgtgcgagctgcagatctgtggcctggctgtggcagatgctggggagtactcctgtgtgtgtggggaggagaggacctctgccactctcaccgtgaaggccctgccagccaagttcacagagggtctgaggaatgaagaggccgtggaaggggccacagccatgttgtggtgtgaactgagcaaggtggcccctgtggagtggaggaaggggcccgagaacctcagagatggggacagatacatcctgaggcaggaggggaccaggtgtgagctgcagatctgtggcctggccatggcggacgccggggagtacttgtgtgtgtgcgggcaggagaggacctcagccacgctcaccatcagggctctgcctgccaggttcatagaagatgtgaaaaaccaggaggccagagaaggggccacagctgtgctgcagtgtgagctgaacagtgcagcccctgtggagtggagaaaggggtctgagacccttagagatggggacagatacagcctgaggcaggacgggactaaatgtgagctgcagattcgtggcctggccatggcagacactggggagtactcgtgcgtgtgcgggcaggagaggacctcggctatgctcaccgtcagggctctacccatcaagttcacagagggtctgaggaacgaagaggccacagaaggggcaacagccgtgctgcggtgtgagctgagcaagatggcccccgtggagtggtggaaggggcatgagaccctcagagatggagacagacacagcctgaggcaggacggggccaggtgtgagctgcagatccgcggcctcgtggcagaggacgctggggagtacctgtgcatgtgcgggaaggagaggacctcagccatgctcaccgtcagggccatgccttccaagttcatagagggtctgaggaatgaagaggccacagaaggggacacggccacgctgtggtgtgagctgagcaaggcggcaccggtggagtggaggaaggggcatgagaccctcagagatggggacagacacagcctgaggcaggacgggtccaggtgtgagctgcagatccgtggcctggctgtggtggatgccggggagtactcgtgtgtgtgcgggcaggagaggacctcagccacactcactgtcagggccctgcctgccagattcatagaagatgtgaaaaaccaggaggccagagaaggggccacggccgtgctgcaatgtgagctgagcaaggcggcccccgtggagtggaggaaggggtctgagaccctcagaggtggggacagatacagcctgaggcaggatgggaccagatgtgagctgcagattcatggcctgtctgtggcagacactggggagtactcgtgtgtgtgcgggcaggagaggacctcggccacactcaccgtcagggccccacagccagtgttccgggagccgctgcagagtctgcaggcggaggagggctccacggccaccctgcagtgtgagctgtctgagcccactgctacagtggtctggagcaagggtggcctgcagctgcaggccaatgggcgccgggagccacggcttcagggctgcaccgcggagctggtgttacaggacctacaacgtgaagacactggcgaatacacttgcacctgtggctcccaggccaccagtgccaccctcactgtcacagctgcgcctgtgcggttcctccgagagctgcagcaccaggaggtggatgagggaggcaccgcacacttatgctgcgagctgagccgggcgggtgcgagcgtggagtggcgcaagggctccctacagctcttcccttgtgccaagtaccagatggtgcaggatggtgcagctgcagagctgctggtacgcggagtggagcaggaggatgcgggtgactacacgtgtgacacgggccacacgcagagcatggccagcctctctgtccgtgtccccaggcccaagttcaagacccggcttcagagtctggagcaggagacaggtgacatagcccggctgtgctgtcagctgagtgatgcagagtcgggggccgtggtgcaatggctcaaggagggcgtggagctgcatgcgggccccaagtacgagatgcggagccagggggccacgcgggagctgctgatccaccaactggaggccaaggacacgggcgagtatgcctgtgtgacaggcggccagaaaaccgctgcctccctcagggtcacagagcctgaggtgaccattgtacgggggctggttgatgcggaggtgacggccgatgaggatgttgagttcagctgtgaggtgtccagggctggagccacaggcgtgcagtggtgcctacagggcctgccactgcaaagcaatgaggtgacagaggtggctgtgcgggatggccgcatccacaccctgcggctgaagggcgtgacgcccgaggacgctggcactgtctccttccatttgggaaaccatgcttcctctgcccagctcaccgtcagagctcctgaggtgaccatcctggagcccctgcaggacgtgcagctcagtgagggccaggatgccagcttccagtgccggctatccagagcttcaggccaggaggcccgctgggctttaggaggggtgcccctgcaggccaacgagatgaatgacatcactgtggagcagggcacactccacctgctcaccctgcacaaggtgacccttgaggatgctggaactgtcagtttccacgtgggcacgtgtagctctgaggcccagctgaaagtcacagccaagaacacggtggtgcgggggctggagaatgtggaggcgctggagggcggcgaggcgctgttcgagtgccagctgtcccagcccgaggtggccgcccacacctggctgctggacgacgaacccgtgcacacctcggagaacgccgaggtggtcttcttcgagaacggcctgcgccacctgctgctgctcaaaaacttgcggccacaagacagctgccgggtgaccttcctggctggggatatggtgacgtccgcattcctcacggtccgaggctggcgcctggagatcctggagcctctgaaaaacgcggcggtccgggccggcgcacaggcatgcttcacctgcacgctcagcgaggcggtgcccgtgggagaggcgtcctggtacatcaatggcgcggcagtgcagccggatgacagcgactggactgtcaccgccgacggcagtcaccacgccctactgctgcgcagcgcccagccccaccacgccggggaggtcaccttcgcttgccgcgacgccgtggcctctgcgcggctcaccgtgctgggcctccctgatcccccagaggatgctgaggtggtggctcgcagcagccacactgtgacactgtcttgggcagctcccatgagtgatggaggcggtggtctctgtggctaccgcgtggaggtgaaggagggggccacaggccagtggcggctgtgccacgagctggtgcctggacccgagtgtgtggtggatggcctggcccccggggagacctaccgcttccgtgtggcagctgtgggccctgtgggtgctggggaaccggttcacctgccccagacagtgcggcttgcagagccaccgaagcctgtgcctccccagccctcagcccctgagagccggcaggtggcagctggtgaagatgtctctctggagcttgaggtggtggctgaggctggtgaggtcatctggcacaagggaatggagcgcatccagcccggtgggcggttcgaggtggtctcccagggtcggcaacagatgctggtgatcaagggcttcacggcagaagaccagggcgagtaccactgtggcctggctcagggctccatctgccctgcggctgccaccttccaggtggcactgagcccagcctctgtggatgaggcccctcagcccagcttgccccccgaggcagcccaggagggtgacctgcacctactgtgggaggccctggctcggaaacgtcgcatgagccgtgagcccacgctggactccattagcgagctgccagaggaggacggccgctcgcagcgcctgccacaggaggcagaggaggtggcacctgatctctctgaaggctactccacggccgatgagctggcccgcactggagatgctgacctctcacacaccagctctgatgatgagtcccgggcaggcaccccttccctggtcacctacctcaagaaggctgggaggccaggcacctcaccactggccagcaaggttggggccccagcagccccctctgtgaagccacagcagcagcaggagccactggctgctgtgcgcccaccactgggagacctgagcaccaaagacctgggtgatccctcaatggacaaggcagctgtgaagatccaggctgcctttaagggctacaaggtccggaaggagatgaagcagcaggaagggcccatgttctcccacacatttggggacaccgaggcacaggtgggggatgccctgcggctggagtgtgtcgtggccagcaaggcagatgtgcgagcccgctggctgaaggatggtgtggagctgaccgatgggcggcaccatcacatcgaccagcttggggatggcacctgctctctgctgatcactggcctggaccgtgctgatgctggctgctacacctgtcaggtgagcaacaagtttggccaggtgacccacagtgcctgtgtggtggtcagtgggtcagagagtgaagccgagagctcctctgggggtgagctggacgatgccttccgccgggctgcccgtcggctgcaccggctcttccgcaccaaaagtccggctgaagtttcagatgaggagctcttcctgagtgcagacgagggccctgcagagccagaggagcccgcggactggcagacataccgcgaagatgagcatttcatctgcatccgttttgaggcgctcactgaggcccgccaggcggtaactcgcttccaggagatgtttgccacactgggcattggggtggagatcaagctggtggaacaggggcctcggagggtagagatgtgcatcagcaaagagactcctgcccctgtggtgcctccagagccattgcccagcctactgacttctgacgctgccccagtgttcctgactgagttgcagaaccaagaagtgcaggatgggtatcctgtgagctttgactgcgtggtgacaggtcagcccatgcccagtgtgcgctggttcaaggatgggaagttgttggaggaggatgatcactacatgattaatgaagaccaacagggtggccatcagctcatcatcacagccgtggtgccagcagacatgggcgtctaccgctgcctggccgagaacagcatgggtgtctcctccaccaaggctgagctccgtgtggacttgacaagcacagactatgacactgcagcagatgccacggagtcctcatcctacttcagtgcccaaggctacctgtccagccgggagcaggagggaacagagtccaccactgatgagggccagctgccccaggtggtggaggagctgagagacctccaggtggcccctggcacacgcctggccaagttccagctcaaggtgaaaggctaccctgctcccagattatactggttcaaagatggccagcccctgaccgcatctgcccacatccgcatgactgacaagaagatcctgcacaccctggagatcatctccgtcacccgggaggactctggccagtatgcagcctatatcagcaatgccatgggtgctgcctactcgtctgcccggctgctggttcgaggccctgatgagccagaagagaagcctgcatcagatgtgcatgagcagctggtgccgccccgaatgctggagaggttcacccccaagaaagtgaagaaaggctccagcatcaccttctctgtgaaggtagaaggacgcccggtgcccaccgtgcactggctcagggaggaggctgagagaggcgtgctgtggattggccctgacacaccgggctacaccgtggccagctctgcgcagcagcacagcctggtcctgctggacgtgggccggcagcaccagggcacctacacatgcattgccagcaacgctgccggccaggccctctgctccgccagcctgcacgtctcgggcctgcctaaggtggaggagcaggagaaagtgaaggaagcgctgatttccactttcctgcaggggaccacacaagccatctcagcacaggggttggaaactgcgagttttgctgaccttggtgggcagaggaaagaagagcctctggctgccaaggaggccctcggccacctgtccctcgctgaggtgggcacagaggagttcctgcagaaactgacctcccagatcactgagatggtatcggccaagatcacgcaggccaagctgcaggtgcccggaggtgacagtgatgaggactccaagacaccatctgcatccccccgccatggccgatcacggccatcctccagcatccaggagtcttcctcagagtcagaggacggcgatgcccgaggcgagatctttgacatctacgtggtcaccgctgactacctgcccctaggggctgagcaggatgccatcacgctgcgggaaggccagtatgtggaggtcctggatgcagcccacccactgcgctggcttgtccgcaccaagcccaccaagtccagcccctcacggcagggctgggtgtcaccagcctacctggacaggaggctcaagctgtcacctgagtggggggccgctgaggcccctgagttccctggggaggctgtgtctgaagacgaatacaaggcaaggctgagctctgtgatccaggagctgctgagttctgagcaggccttcgtggaggagctgcagttcctgcagagccaccacctgcagcacctggagcgctgcccccacgtgcccatagctgtggccggccagaaggcagtcatcttccgcaatgtgcgggacatcggccgcttccacagcagcttcctgcaggagttgcagcagtgcgacacggacgacgacgtggccatgtgcttcatcaagaaccaggcggcctttgagcagtacctggagttcctggtggggcgtgtgcaggctgagtcggtggtcgtcagcacggccatccaggagttctacaagaaatacgcggaggaggccctgttggcaggggacccctctcagcccccgccaccacctctgcagcactacctggagcagccagtggagcgggtgcagcgctaccaggccttgctgaaggagctgatccgcaacaaggcgcggaacagacagaactgcgcgctgctggagcaggcctatgccgtggtgtctgccctgccacagcgcgctgagaacaagctgcacgtgtccctcatggagaactacccaggcaccctgcaggccctgggcgagcccatccgccagggccacttcatcgtgtgggagggtgcaccgggggcccgcatgccctggaagggccacaaccgtcacgtgttcctcttccgcaaccacctggtaatctgcaagccccggcgagactcccgcaccgataccgtcagctacgtgttccggaacatgatgaagctgagcagcatcgacctgaacgaccaggtggagggggatgaccgcgccttcgaggtgtggcaggagcgggaggactcggtgcgcaagtacctgctgcaggcacggacagccattatcaagagctcgtgggtgaaggagatctgtggcatccagcagcgtctggccctgcctgtgtggcggcccccggactttgaagaggagctggccgactgcacagccgagctgggtgagacagtcaagctggcctgccgcgtgacgggcacacccaagcctgtcatcagctggtacaaagatgggaaagcagtgcaggtggacccccaccacatcctcattgaagaccctgatggctcgtgtgcactcatcctggacagcctgaccggtgtggactctggccagtacatgtgcttcgcggccagcgccgctggcaactgcagtaccctgggcaagatcctggtgcaagtcccaccacggttcgtgaacaaggtccgggcctcaccctttgtggagggagaggacgcccagttcacctgcaccatcgaaggcgccccgtacccgcagatcaggtggtacaaggacggggccctgctgaccactggcaacaagttccagacactgagtgagcctcgcagcggcctgctagtgctggtgatccgggcggccagcaaggaggacctggggctctacgagtgtgagctggtgaaccggctgggctccgcgcgggctagtgcggagctgcgcattcagagccccatgctgcaggcccaggagcagtgtcacagggagcagctcgtggctgcagtggaagtcactgagcaagagactaaagtccccaagaaaaccgtcatcatagaagagaccatcaccactgtggtgaagagcccacgtggccaacgacggtcccccagcaagtccccctcccgctcaccttcccgctgctctgccagcccgctgaggccaggcctactggcccccgacctgctgtacctgccaggtgctggccagccccgcaggccggaggcagaaccaggccagaagcccgtggtgcccacactgtatgtgacggaggccgaggcccactctccagctctgcccggactctcggggccccagcccaagtgggtggaggtggaggagaccattgaagtccgggtgaagaagatgggcccgcagggtgtgtctcccaccacagaggtgcccaggagctcatcggggcatctcttcacactgcccggtgcgacccccggaggggaccccaattccaacaactccaacaacaagctgctggcccaggaggcctgggcccagggcacagccatggtcggcgtcagagagccccttgtcttccgcgtggatgccagaggcagtgtggactgggctgcttctggcatgggcagcctggaggaggagggcaccatggaggaggcgggagaggaagagggggaagacggagacgcctttgtgacggaggagtcccaggacacacacagccttggggatcgtgaccccaagatcctcacgcacaacggccgcatgctgacactggctgacctggaagattacgtgcctggggaaggggagaccttccactgtggtggccctgggcctggcgcccctgatgaccctccctgcgaggtctcggtgatccagagagagatcggggagcccacggtggggcagcctgtgctgctcagcgtggggcatgcactgggtccccgaggccctctcggcctctttaggcctgagccccgtggggcgtcaccaccgggaccccaggtccgtagccttgagggcacctccttcctcttgcgggaggccccggctcggcctgtgggcagtgctccctggacgcagtctttctgcacccgcatccggcgttctgcggacagtggccagagcagcttcaccacagagctttccacccagaccgtcaacttcgggacagtgggggagacggtcacccttcacatctgcccagacagggatggggatgaggcggcacagccctgatgctgctgccatggtggcttggggcagcggggagaaaggagtgtccttgaggcctaggacgctgcccggcctcagcagcagccctgggagcctcctgagggccctccctgtccctggccacgggcccttcttacctcactcaacttcagccaggaggactgggtggtgcttgcaatgttggaatgaccggctcaaagacctcagctctgggctgtttcctgtcagcctggcaggagcctcaggactgtggacgaaggatgtggccttgggcatttgtcctgttcccacatgggcctggtccctccctcctggccccagccacagctgccaggcctgacatggccttgcctctcctgcagtcttggtgactgagacccttgggtggcgcttcccagctctgcaggccctcctggccttttctgcagggtggacacagggtctgtgtgtgggcagcagcccctgtctctcagcaagaataaagcagcttcctgtgcaaaaaaaaaaaaaaaaaaaaaaaaaaaaaa

SEQ ID NO: 211 - protein, 6620 aa, Homo sapiens
MDQPQFSGAPRFLTRPKAFVVSVGKDATLSCQIVGNPTPQVSWEKDQQPVAAGARFRLAQDGDLYRLTILDLALGDSGQYVCRARNAIGEAFAAVGLQVDAEAACAEQAPHFLLRPTSIRVREGSEATFRCRVGGSPRPAVSWSKDGRRLGEPDGPRVRVEELGEASALRIRAARPRDGGTYEVRAENPLGAASAAAALVVDSDAADTASRPGTSTAALLAHLQRRREAMRAEGAPASPPSTGTRTCTVTEGKHARLSCYVTGEPKPETVWKKDGQLVTEGRRHVVYEDAQENFVLKILFCKQSDRGLYTCTASNLVGQTYSSVLVVVREPAVPFKKRLQDLEVREKESATFLCEVPQPSTEAAWFKEETRLWASAKYGIEEEGTERRLTVRNVSADDDAVYICETPEGSRTVAELAVQGNLLRKLPRKTAVRVGDTAMFCVELAVPVGPVHWLRNQEEVVAGGRVAISAEGTRHTLTISQCCLEDVGQVAFMAGDCQTSTQFCVSAPRKPPLQPPVDPVVKARMESSVILSWSPPPHGERPVTIDGYLVEKKKLGTYTWIRCHEAEWVATPELTVADVAEEGNFQFRVSALNSFGQSPYLEFPGTVHLAPKLAVRTPLKAVQAVEGGEVTFSVDLTVASAGEWFLDGQALKASSVYEIHCDRTRHTLTIREVPASLHGAQLKFVANGIESSIRMEVRAAPGLTANKPPAAAAREVLARLHEEAQLLAELSDQAAAVTWLKDGRTLSPGPKYEVQASAGRRVLLVRDVARDDAGLYECVSRGGRIAYQLSVQGLARFLHKDMAGSCVDAVAGGPAQFECETSEAHVHVHWYKDGMELGHSGERFLQEDVGTRHRLVAATVTRQDEGTYSCRVGEDSVDFRLRVSEPKVVFAKEQLARRKLQAEAGASATLSCEVAQAQTEVTWYKDGKKLSSSSKVCMEATGCTRRLVVQQAGQADAGEYSCEAGGQRLSFHLDVKEPKVVFAKDQVAHSEVQAEAGASATLSCEVAQAQTEVMWYKDGKKLSSSLKVHVEAKGCRRRLVVQQAGKTDAGDYSCEARGQRVSFRLHITEPKMMFAKEQSVHNEVQAEAGASAMLSCEVAQAQTEVTWYKDGKKLSSSSKVGMEVKGCTRRLVLPQAGKADAGEYSCEAGGQRVSFHLHITEPKGVFAKEQSVHNEVQAEAGTTAMLSCEVAQPQTEVTWYKDGKKLSSSSKVRMEVKGCTRRLVVQQVGKADAGEYSCEAGGQRVSFQLHITEPKAVFAKEQLVHNEVRTEAGASATLSCEVAQAQTEVTWYKDGKKLSSSSKVRIEAAGCMRQLVVQQAGQADAGEYTCEAGGQRLSFHLDVSEPKAVFAKEQLAHRKVQAEAGAIATLSCEVAQAQTEVTWYKDGKKLSSSSKVRMEAVGCTRRLVVQQACQADTGEYSCEAGGQRLSFSLDVAEPKVVFAKEQPVHREVQAQAGASTTLSCEVAQAQTEVMWYKDGKKLSFSSKVRMEAVGCTRRLVVQQAGQAVAGEYSCEAGSQRLSFHLHVAEPKAVFAKEQPASREVQAEAGTSATLSCEVAQAQTEVTWYKDGKKLSSSSKVRMEAVGCTRRLVVQEAGQADAGEYSCKAGDQRLSFHLHVAEPKVVFAKEQPAHREVQAEAGASATLSCEVAQAQTEVTWYKDGKKLSSSSKVRVEAVGCTRRLVVQQAGQADAGEYSCEAGGQRLSFRLHVAELEPQISERPCRREPLVVKEHEDIILTATLATPSAATVTWLKDGVEIRRSKRHETASQGDTHTLTVHGAQVLDSAIYSCRVGAEGQDFPVQVEEVAAKFCRLLEPVCGELGGTVTLACELSPACAEVVWRCGNTQLRVGKRFQMVAEGPVRSLTVLGLRAEDAGEYVCESRDDHTSAQLTVSVPRVVKFMSGLSTVVAEEGGEATFQCVVSPSDVAVVWFRDGALLQPSEKFAISQSGASHSLTISDLVLEDAGQITVEAEGASSSAALRVREAPVLFKKKLEPQTVEERSSVTLEVELTRPWPELRWTRNATALAPGKNVEIHAEGARHRLVLHNVGFADRGFFGCETPDDKTQAKLTVEMRQVRLVRGLQAVEAREQGTATMEVQLSHADVDGSWTRDGLRFQQGPTCHLAVRGPMHTLTLSGLRPEDSGLMVFKAEGVHTSARLVVTELPVSFSRPLQDVVTTEKEKVTLECELSRPNVDVRWLKDGVELRAGKTMAIAAQGACRSLTIYRCEFADQGVYVCDAHDAQSSASVKVQGRTYTLIYRRVLAEDAGEIQFVAENAESRAQLRVKELPVTLVRPLRDKIAMEKHRGVLECQVSRASAQVRWFKGSQELQPGPKYELVSDGLYRKLIISDVHAEDEDTYTCDAGDVKTSAQFFVEEQSITIVRGLQDVTVMEPAPAWFECETSIPSVRPPKWLLGKTVLQAGGNVGLEQEGTVHRLMLRRTCSTMTGPVHFTVGKSRSSARLVVSDIPVVLTRPLEPKTGRELQSVVLSCDFRPAPKAVQWYKDDTPLSPSEKFKMSLEGQMAELRILRLMPADAGVYRCQAGSAHSSTEVTVEAREVTVTGPLQDAEATEEGWASFSCELSHEDEEVEWSLNGMPLYNDSFHEISHKGRRHTLVLKSIQRADAGIVRASSLKVSTSARLEVRVKPVVFLKALDDLSAEERGTLALQCEVSDPEAHVVWRKDGVQLGPSDKYDFLHTAGTRGLVVHDVSPEDAGLYTCHVGSEETRARVRVHDLHVGITKRLKTMEVLEGESCSFECVLSHESASDPAMWTVGGKTVGSSSRFQATRQGRKYILVVREAAPSDAGEVVFSVRGLTSKASLIVRERPAAIIKPLEDQWVAPGEDVELRCELSRAGTPVHWLKDRKAIRKSQKYDVVCEGTMAMLVIRGASLKDAGEYTCEVEASKSTASLHVEEKANCFTEELTNLQVEEKGTAVFTCKTEHPAATVTWRKGLLELRASGKHQPSQEGLTLRLTISALEKADSDTYTCDIGQAQSRAQLLVQGRRVHIIEDLEDVDVQEGSSATFRCRISPANYEPVHWFLDKTPLHANELNEIDAQPGGYHVLTLRQLALKDSGTIYFEAGDQRASAALRVTEKPSVFSRELTDATITEGEDLTLVCETSTCDIPVCWTKDGKTLRGSARCQLSHEGHRAQLLITGATLQDSGRYKCEAGGACSSSIVRVHARPVRFQEALKDLEVLEGGAATLRCVLSSVAAPVKWCYGNNVLRPGDKYSLRQEGAMLELVVRNLRPQDSGRYSCSFGDQTTSATLTVTALPAQFIGKLRNKEATEGATATLRCELSKAAPVEWRKGSETLRDGDRYCLRQDGAMCELQIRGLAMVDAAEYSCVCGEERTSASLTIRPMPAHFIGRLRHQESIEGATATLRCELSKAAPVEWRKGRESLRDGDRHSLRQDGAVCELQICGLAVADAGEYSCVCGEERTSATLTVKALPAKFTEGLRNEEAVEGATAMLWCELSKVAPVEWRKGPENLRDGDRYILRQEGTRCELQICGLAMADAGEYLCVCGQERTSATLTIRALPARFIEDVKNQEAREGATAVLQCELNSAAPVEWRKGSETLRDGDRYSLRQDGTKCELQIRGLAMADTGEYSCVCGQERTSAMLTVRALPIKFTEGLRNEEATEGATAVLRCELSKMAPVEWWKGHETLRDGDRHSLRQDGARCELQIRGLVAEDAGEYLCMCGKERTSAMLTVRAMPSKFIEGLRNEEATEGDTATLWCELSKAAPVEWRKGHETLRDGDRHSLRQDGSRCELQIRGLAVVDAGEYSCVCGQERTSATLTVRALPARFIEDVKNQEAREGATAVLQCELSKAAPVEWRKGSETLRGGDRYSLRQDGTRCELQIHGLSVADTGEYSCVCGQERTSATLTVRAPQPVFREPLQSLQAEEGSTATLQCELSEPTATVVWSKGGLQLQANGRREPRLQGCTAELVLQDLQREDTGEYTCTCGSQATSATLTVTAAPVRFLRELQHQEVDEGGTAHLCCELSRAGASVEWRKGSLQLFPCAKYQMVQDGAAAELLVRGVEQEDAGDYTCDTGHTQSMASLSVRVPRPKFKTRLQSLEQETGDIARLCCQLSDAESGAVVQWLKEGVELHAGPKYEMRSQGATRELLIHQLEAKDTGEYACVTGGQKTAASLRVTEPEVTIVRGLVDAEVTADEDVEFSCEVSRAGATGVQWCLQGLPLQSNEVTEVAVRDGRIHTLRLKGVTPEDAGTVSFHLGNHASSAQLTVRAPEVTILEPLQDVQLSEGQDASFQCRLSRASGQEARWALGGVPLQANEMNDITVEQGTLHLLTLHKVTLEDAGTVSFHVGTCSSEAQLKVTAKNTVVRGLENVEALEGGEALFECQLSQPEVAAHTWLLDDEPVHTSENAEVVFFENGLRHLLLLKNLRPQDSCRVTFLAGDMVTSAFLTVRGWRLEILEPLKNAAVRAGAQACFTCTLSEAVPVGEASWYINGAAVQPDDSDWTVTADGSHHALLLRSAQPHHAGEVTFACRDAVASARLTVLGLPDPPEDAEVVARSSHTVTLSWAAPMSDGGGGLCGYRVEVKEGATGQWRLCHELVPGPECVVDGLAPGETYRFRVAAVGPVGAGEPVHLPQTVRLAEPPKPVPPQPSAPESRQVAAGEDVSLELEVVAEAGEVIWHKGMERIQPGGRFEVVSQGRQQMLVIKGFTAEDQGEYHCGLAQGSICPAAATFQVALSPASVDEAPQPSLPPEAAQEGDLHLLWEALARKRRMSREPTLDSISELPEEDGRSQRLPQEAEEVAPDLSEGYSTADELARTGDADLSHTSSDDESRAGTPSLVTYLKKAGRPGTSPLASKVGAPAAPSVKPQQQQEPLAAVRPPLGDLSTKDLGDPSMDKAAVKIQAAFKGYKVRKEMKQQEGPMFSHTFGDTEAQVGDALRLECVVASKADVRARWLKDGVELTDGRHHHIDQLGDGTCSLLITGLDRADAGCYTCQVSNKFGQVTHSACVVVSGSESEAESSSGGELDDAFRRAARRLHRLFRTKSPAEVSDEELFLSADEGPAEPEEPADWQTYREDEHFICIRFEALTEARQAVTRFQEMFATLGIGVEIKLVEQGPRRVEMCISKETPAPVVPPEPLPSLLTSDAAPVFLTELQNQEVQDGYPVSFDCVVTGQPMPSVRWFKDGKLLEEDDHYMINEDQQGGHQLIITAVVPADMGVYRCLAENSMGVSSTKAELRVDLTSTDYDTAADATESSSYFSAQGYLSSREQEGTESTTDEGQLPQVVEELRDLQVAPGTRLAKFQLKVKGYPAPRLYWFKDGQPLTASAHIRMTDKKILHTLEIISVTREDSGQYAAYISNAMGAAYSSARLLVRGPDEPEEKPASDVHEQLVPPRMLERFTPKKVKKGSSITFSVKVEGRPVPTVHWLREEAERGVLWIGPDTPGYTVASSAQQHSLVLLDVGRQHQGTYTCIASNAAGQALCSASLHVSGLPKVEEQEKVKEALISTFLQGTTQAISAQGLETASFADLGGQRKEEPLAAKEALGHLSLAEVGTEEFLQKLTSQITEMVSAKITQAKLQVPGGDSDEDSKTPSASPRHGRSRPSSSIQESSSESEDGDARGEIFDIYVVTADYLPLGAEQDAITLREGQYVEVLDAAHPLRWLVRTKPTKSSPSRQGWVSPAYLDRRLKLSPEWGAAEAPEFPGEAVSEDEYKARLSSVIQELLSSEQAFVEELQFLQSHHLQHLERCPHVPIAVAGQKAVIFRNVRDIGRFHSSFLQELQQCDTDDDVAMCFIKNQAAFEQYLEFLVGRVQAESVVVSTAIQEFYKKYAEEALLAGDPSQPPPPPLQHYLEQPVERVQRYQALLKELIRNKARNRQNCALLEQAYAVVSALPQRAENKLHVSLMENYPGTLQALGEPIRQGHFIVWEGAPGARMPWKGHNRHVFLFRNHLVICKPRRDSRTDTVSYVFRNMMKLSSIDLNDQVEGDDRAFEVWQEREDSVRKYLLQARTAIIKSSWVKEICGIQQRLALPVWRPPDFEEELADCTAELGETVKLACRVTGTPKPVISWYKDGKAVQVDPHHILIEDPDGSCALILDSLTGVDSGQYMCFAASAAGNCSTLGKILVQVPPRFVNKVRASPFVEGEDAQFTCTIEGAPYPQIRWYKDGALLTTGNKFQTLSEPRSGLLVLVIRAASKEDLGLYECELVNRLGSARASAELRIQSPMLQAQEQCHREQLVAAVEVTEQETKVPKKTVIIEETITTVVKSPRGQRRSPSKSPSRSPSRCSASPLRPGLLAPDLLYLPGAGQPRRPEAEPGQKPVVPTLYVTEAEAHSPALPGLSGPQPKWVEVEETIEVRVKKMGPQGVSPTTEVPRSSSGHLFTLPGATPGGDPNSNNSNNKLLAQEAWAQGTAMVGVREPLVFRVDARGSVDWAASGMGSLEEEGTMEEAGEEEGEDGDAFVTEESQDTHSLGDRDPKILTHNGRMLTLADLEDYVPGEGETFHCGGPGPGAPDDPPCEVSVIQREIGEPTVGQPVLLSVGHALGPRGPLGLFRPEPRGASPPGPQVRSLEGTSFLLREAPARPVGSAPWTQSFCTRIRRSADSGQSSFTTELSTQTVNFGTVGETVTLHICPDRDGDEAAQP

SEQ ID NO: 212 - DNA, 4885 bp, Homo sapiens
cggtgccacagggacgaggcctggagagcagtcgctcctagaaccggggcgcgaagggcacccccgcctccagcacgcgccctccgccctcccggcctcgctccccccggagtgggggcctcgccggcccctggtccccgtcactcagcaacgtcgggtcagccttcgccgggttagtggcgacgcggccgcgcgaattcgcacaggggcagtagaatgaaagagggcatgtctaataacagcaccactagcatctcccaagccaggaaagctgtggagcagctaaagatggaagcctgtatggacagggtcaaggtctcccaggcagctgcggacctcctggcctactgtgaagctcacgtgcgggaagatcctctcatcattccagtgcctgcatcagaaaacccctttcgcgagaagaagttcttttgtaccattctctaactccgtgtgtgatgaaaacgcctccttttctgaccttcaaagtcccctgtagagaccatgcatgctctaagccttagggagtgagaccaacacccatccctgcccagccaacagtggccggggcttgtcttatgtttccatctgttttcttcgtggcattcaatttcatttttttccttttcattttcatgttattttcattattggcaaagaaaatcaaaatgtttatagccaaataacaaatgtgccatgtaaaagtaagtctggacttaagagtttaaaatttttaaacatcagtttccaagtttatatcatattaatacatttcagtggataatttattttaaaaaaaaaactatgcctaaatatcccttatttgcaatattcagtatcaaattagagcattttgaccaactgaaacatataacgttttcatctcctttcctggagaaagcagctgcagaggttctgtatttcctgcatttccatcatcctagtaaaaagacaacaacccacaggattggaatggttttcttttgttttttttttgttgttgttgttgttttgagatggagtctcgctctgtcacccaggctggagtgcaatggcgtgacctcagctcactgcgacctccacctcctgggttcaagcgattctcctgcctcagcctcctgagtagctgggatcataggcacgcgccaccacacccagctaattttttgtatttttagtaaagacggggtttcaccatgttggtcaggctggtctcaaactcctgacctcgtgatccacccgcctcggcctcccaaagcgctgggattacaggcgtgagccaccacacccggccgtggaatggttttcttagcatatcctcctggggccgtggcgccccggctgtgggccgtggtggatgtcccttgtttcagtggtcctacaaaggtagatggtgggcggacaccgaagtcaacttgactgtaaaagtaccccataccgttgacgcgctgtggcagacctgtgggtgcggtctcccctctccaaatgccacctcttcctgctccctcctcttttggctcctactcagtagttccattgtgggctgcagtaatataaggacctgttctggacacagcactgggcccgctggggttttagtagggcagccccttccctgcaggagtgaggcatggtgacagcagtcccctatgtgcccccaagtcatctgagcattggtgtgcattaaggtactcaatcttccaacaataaataccataagtgcatgtctgttttattttatttatttatctttttgagacagagtcttgctctgtcgcccgggctggaatgcaatggcacaatctcagctcaccgcaacctccactcgcaggttcaagtgatcctcatgtctcagcctccctagtagctgggatgacaagcacacgccaacatgcctggctcatttttgtatttttagtagagacggggtttcaccatgtcggccaggctggtctccaactactggcctcgagtgatctgcccaccttggcctcccaaagtgctgggattgcaggtgtgagccagtgcacccggccgtatgtcttagagtgaggggaaactgaggcacaaagcgtttatgtagtttgcccaaggttacacatggtaagcagaaaaactgggatttgagggcaggcagcccggccccagagttcccttagccccctgaactgtgctaccttccaggtctacctgtttgcaggtagggagacccacaaactatcataactgcacaccgtgaagcaaacacctttgttgcagtaacccgtggcacacttcacttcccacattctccaggaggaagccgtattctggtagtttaaggaaggtgattcatggatgccccaaggaaaggctagacatcgatgaattagctcttggattgtctaagatcaacctgaaggtcctacctaaaccaaactcatatgatcccgatgaaagaggagaatacacagtgggagcagagctctttgtgtaagtttgttctattctgtttatttggaaactgcctctctccctagttctgaaagagacttgctgtgtgatagagaacaggccatttgtgcctgaaatgttctaacctgcaaattgggtttaatggtaattatcctgcctttctgtctgggaggaaacagagatgctacatagatgaaagctctgattatcatttaaaacaaataaatgtactaaatgccgtggtataatatagggaagaatggatgacttcaaagagaccatggttccgttggaggcataaaattgcctgcaaagaggcaaatgtaatttccagaccaattaatgacttgctgccctcgtaaatggatttaggacatctttgttccttgcttcttttgttaaaactcattcttagtttcattatcagctcactaataataccagtgttgttaagatgctcaaactagagcagaattgtatgctggatgtgacgctaggacctcagatcctttgatagtgcagttatgaccaggatctctttattctgtgcttcacgtcaacatcattaacccgatgaagcgaagcacaagtcataaaggcacatcagagaagccgagaaagcggggccgtacagagagcatcaaaatcaggtcagaaaaatgctgctttcctcttccaccaaaccttctccctgttgtttttacatgccccgtccctccagattcagcctccgttttgttctctctccttttccttttcctcctctcttccttaccttcccctgtgagatgcttttctgtccttttactgcacctcttccagacctatggcatttggggacgggtcacccttcctagagtgatcctgaatccagctgcctcttctttttttgtttttgtttttgtttttgagacagagtctctttctgtcgtccaggctggagtgcagtagcgcaatcttggctcactgcaacctctgcctcctgggttcaagcgattcttgtgcctcaacctcacgaggagctgggattgcaggcgcccgccaccacacccggctaatttttgtatttttagtagagacggagtttcaccatgttggccacgctggtcttgaagcccagacctcaagtgatccgcccgccttggcctcccaaagtgctgggattacaggcatgagccaccgcgcctggcctagttccctcttcttagatggagatttctgcacatgagctgtgagatccacagacatgtcactgagctcccccactctgtcagtggaagatgaatggaataaagcctgcttgcattgtggagtgcagctgtggggacagttgtcatttttgtgttttcagcttaactgtccagcatctcccctcccttcctacagcagggacatcatgccttagatataaacttagtggtgtgcagtacccaccgtggaagctgaagaagggaagtatttcctgtctctcaggcacaccccgcttccagccccataccagtcgggaagtggtcattgacctggggtggactacctggacccttgcttggggctatgagcctggagaatgtgacacaaatgaagggatgctgagactcatttcaaggaagccaccgtggtccggggttggtagtcatacagcaaggcaggtgggtagggctggcaggctgcagggatggtgtgtccactggtagcaatgtccagggatggcagcgtcctgggaatgtcatttctgctccactccttggactcgctgagctgtctccgcctccacctatcttcctacagacctcccttctagttttctgtcaattctttgagccagcaaactccatccagtacattctttcttctttcatgaaagagcttgagttggatgtaaatatatatgacctaacaattccacccctaggtgtataccctacagaaatgtgtacatgtgttcatccagagacatgctctaaatcttcacaaaaacactctccataataaccccgaacaggaaagcaccccaatgcccatgttggctggataagcacattagggtatattcacacgatggaatcccagactgcaatgggaatgagctgcaactccacccccaacttggagtgtattcaccaaccctagtgttgaacgagataaggcaaaaatgcaccataggattccatttatataaagtttaaaacccagcaaaattcatccatgcggttgcaagtagagatcagtcctaagaagacagtaaccagaagcgggcatgaggtggtgcttctggggtgttctgtttcttgatctggttgccggttacctgggtgctttccgtttgtgaacattcttggagctgtacacttttgatctgggcacttttctgtgtgtatgttatacttcaataaaaagttgggctttgtgactagcaaaaaaaaaaaaaaaaaaa

SEQ ID NO: 213 - protein, 75 aa, Homo sapiens
MKEGMSNNSTTSISQARKAVEQLKMEACMDRVKVSQAAADLLAYCEAHVREDPLIIPVPASENPFREKKFFCTIL

SEQ ID NO: 214 - DNA, 16365 bp, Homo sapiens
gcgcggccccctccagcccccggctcccggcagcagaagcagaaggcagcgccaggggccgccgccgccgccgagctccgcggggctcgggagccggccccggcgaggaggcgcggaaccatggccgatgggggcgagggcgaagacgagatccagttcctgcgaactgatgatgaagtggttctgcagtgcaccgcaaccatccacaaagaacaacagaagctatgcttggcagcagaaggatttggcaacagactttgtttcttggagtccacttccaattccaagaatgtgcccccagacctctccatctgcacctttgtgctggagcagtccctctctgtccgggcgctgcaggagatgctggctaacaccgtggagaaatcagaagggcaagttgatgtggaaaaatggaaattcatgatgaagactgctcaaggtggtggtcatcgaacactcctctacggacatgccatattgctgcgccattcctatagtggcatgtatctgtgctgcctgtccacctcccggtcttcaactgataagctggcttttgatgttggcttgcaagaggacaccacaggggaggcttgttggtggaccatacaccctgcctctaagcagcgatcagaaggagaaaaagtacgagttggagatgacctcatcttagttagcgtgtcctctgaaaggtacttgcacttgtcttatggcaacggcagcttacacgtggatgccgctttccagcagactctctggagcgtggccccaatcagctcaggaagtgaggcagcccaagggtatctcattggtggtgatgtcctcaggttgctgcatggacacatggacgagtgtctcactgtcccttcaggagaacatggtgaagagcagcggagaactgttcattatgaaggtggcgctgtgtctgttcatgcacgttccctttggagactagagacgctaagagttgcgtggagtggaagccacataagatggggacagccattccgactacgccatgtcacaacaggaaaatacttgagtctcatggaagacaaaaaccttctactcatggacaaagagaaagctgatgtaaaatcaacagcatttaccttccggtcttccaaggaaaaattggatgtaggggtgagaaaagaagtagatggcatgggaacatctgaaataaaatacggtgactcagtatgctatatacaacatgtagacacaggcctatggcttacttaccagtctgtggacgtgaaatccgtgagaatgggatctatacaacgtaaggctattatgcatcatgaaggccacatggatgatggcataagtttgtcgagatcccagcatgaagaatcacgcacagcccgagttatccggagcacagtcttccttttcaatagatttataaggggccttgatgctctcagcaagaaagcgaaggcttccacagtcgatttgcctatagagtccgtaagcctaagtctgcaggatctcattggctacttccaccccccagatgagcatttagagcatgaagacaaacagaacagactacgagccctgaagaatcggcaaaatctcttccaggaagagggaatgatcaacctcgtgcttgagtgcatagaccgtttgcacgtctacagcagtgcagcacactttgctgatgttgctgggcgagaagcaggagagtcttggaaatccattctgaattctctgtatgagttgctggcggctctaattagaggaaatcgtaaaaactgtgctcaattttctggctccctcgactggttgatcagcagattggaaagactggaagcttcttcaggcattctggaagttttacactgtgttttagtagaaagtccagaagctctaaatattattaaagaaggacatattaaatctattatctcacttttagacaaacatggaagaaatcacaaggttctggatgtcttgtgctcactctgtgtttgccacggggttgcagtccgttctaaccagcatctcatctgtgacaatctcctaccaggaagagacttgttattgcagacacgtcttgtgaaccatgtcagcagcatgagacccaatatttttctgggcgtcagtgaaggttctgctcagtataagaaatggtactatgaattgatggtggaccacacagagccctttgtgacagctgaagcaactcacctgcgagtgggctgggcttccactgaaggatattctccctaccctggagggggcgaagagtggggtggaaatggtgttggagatgatctcttctcctatggatttgatggccttcatctctggtcaggttgtattgctcgtactgtaagctcaccaaaccaacatctgttaagaactgatgatgtcatcagttgctgtttagatctgagtgccccaagcatctcgttccgaattaatggacaacctgttcaaggaatgtttgagaatttcaacatcgatggcctcttctttccagtcgttagtttctctgcaggaataaaagtacgctttctgcttggagggcgacatggagaattcaaatttcttcctccacctgggtatgctccttgttatgaagctgttctgccaaaagaaaagttgaaagtggaacacagccgagagtacaagcaagaaagaacttacacacgcgacctgctgggccccacagtttccctgacgcaagctgccttcacacccatccctgtggataccagccagatcgtgttgcctcctcatctagaaagaataagagaaaaactggcagagaatatccatgaactctgggttatgaataaaattgagcttggctggcagtatggtccggttagagatgacaacaagagacaacacccatgcctggtggagttctccaagctgcctgaacaggagcgcaattacaacttacaaatgtcgcttgagaccctgaagactttgttggcattaggatgtcatgtgggtatatcagatgaacatgctgaagacaaggtgaaaaaaatgaagctacccaagaattaccagctgacaagtggatacaagcctgcccctatggacctgagctttatcaaactcaccccatcacaagaagcaatggtggacaagttggcagaaaatgcacataatgtgtgggcgcgggatcgaatccggcagggctggacttatggcatccaacaggacgtaaagaacagaagaaatcctcgccttgttccctacactcttctggatgaccgaaccaagaaatccaacaaggacagcctccgcgaggctgtgcgcacgctgctggggtacggctacaacttggaagcaccagatcaagatcatgcagccagagccgaagtgtgcagcggcaccggggaaaggttccgaatcttccgtgccgagaagacctatgcagtgaaggccggacggtggtattttgaatttgagacggtcactgctggagacatgagggttggttggagtcgtcctggttgtcaaccggatcaggagcttggctcagatgaacgtgcctttgcctttgatggcttcaaggcccagcggtggcatcagggcaatgaacactatgggcgctcttggcaagcaggcgatgtcgtggggtgtatggttgacatgaacgaacacaccatgatgttcacactgaatggtgaaatccttcttgatgattcaggctcagaactggctttcaaggactttgatgttggcgatggattcatacctgtgtgtagccttggagtggctcaagtgggtaggatgaactttggaaaggatgtcagcaccttgaaatatttcaccatctgtggcttacaagagggctatgaaccatttgccgttaatacaaacagggatattaccatgtggctgagcaagaggcttcctcagtttcttcaagttccatcaaaccatgaacatatagaggtgaccagaatagacggcaccatagacagttccccatgtttaaaggtcactcagaagtcttttggttctcagaacagcaacactgatatcatgttttatcgcctgagcatgccgatcgagtgcgcggaggtcttctccaagacggtggctggagggctccctggggctggcctttttgggcccaagaatgacttggaagattatgatgctgattctgactttgaggttctgatgaagacagctcatggccatctagtgcccgatcgtgttgacaaagacaaagaagctactaaaccagagtttaacaaccacaaagattatgcccaggaaaagccctctcgtctgaaacaaagatttttgcttagaagaacaaagccagattacagcacaagccattctgcaagactcaccgaagatgtccttgctgatgatcgggatgactatgatttcttgatgcaaacgtccacgtactattactcagtgagaatctttcctggacaagaacctgctaatgtctgggtgggctggattacatcagatttccatcagtatgacacaggctttgacttggacagagttcgcacagtaacagttactctaggagatgaaaaaggaaaagtgcatgaaagcatcaaacgcagcaactgctatatggtatgtgcgggtgagagcatgagccccgggcaaggacgcaacaataatggactggagattggctgtgtggtggatgctgccagcgggctgctcacattcattgccaatggcaaggaactgagcacatactatcaggtggaaccgagtacaaaattatttcctgcggtttttgcacaagctacaagtcccaatgttttccagtttgagttgggaagaataaagaatgtgatgcctctctcggcgggattattcaagagtgagcacaagaaccccgtgccgcagtgccccccgcgcctccacgtgcagttcctgtcacacgtcctgtggagcagaatgcccaaccagtttttgaaggtagatgtgtctcgaataagtgaacgccaaggctggttggtgcagtgtttggatcctctgcagttcatgtctcttcatatccctgaggaaaacagatctgttgacatcttagagttgacagagcaggaggaattgctgaaatttcactatcacactctccggctctactcagccgtctgtgctcttgggaaccaccgggtggcccatgccctgtgcagccatgtggatgaacctcagctcctctatgccattgagaacaagtacatgcctggtttgctgcgtgctggctactatgacctgctgattgacatccacctgagctcctatgccactgccaggctcatgatgaacaacgagtacattgtccccatgacggaggagacgaagagcatcaccctgttccctgatgagaacaaaaaacacggccttccagggatcggcctcagcacctccctcaggccacggatgcagttttcctcccccagttttgtaagcattagtaatgaatgttaccagtacagtccagagttcccactggacatcctcaagtccaaaaccatacagatgctgacagaagctgttaaagagggcagtcttcatgcccgggacccagttggagggactactgaattcctctttgtacctctcatcaagcttttctataccctgctgatcatgggcatctttcacaacgaggacttgaagcacatcttgcagttgattgagcccagtgtgtttaaagaagctgccactccggaggaggagagtgacacgctggagaaagagctcagtgtggacgatgcaaagctgcaaggagctggtgaggaagaagccaaggggggcaagcggcccaaggaaggcctgctccaaatgaaactgccagagccagttaaattgcagatgtgcctactgcttcagtacctctgtgactgccaggtccggcaccggatagaagccattgtagccttttcagatgattttgtggctaagctccaagacaatcaacgtttccgatacaacgaagtcatgcaagccttaaacatgtcagctgcactcacagccaggaagacaaaggaatttagatcaccacctcaagaacagatcaatatgcttctcaattttaaggatgacaaaagtgaatgtccatgtccagaagaaattcgtgaccaactattggatttccatgaagatttgatgacacattgtggaattgagctggatgaagatgggtctctggatggaaacagtgatttaacaattagagggcgtctgctatccctggtagaaaaggtgacatatctgaagaagaagcaagcagaaaaaccagttgagagtgactccaaaaagtcctccactctgcagcagctgatttctgagaccatggtccgatgggctcaggagtctgtcattgaagaccccgagctggtgagggccatgtttgtgttgctccatcggcagtatgacggcattgggggtcttgttcgggccctgccaaagacctacacgataaatggtgtgtccgtggaggacaccatcaacctgctggcatcccttggtcagattcggtccctgctgagtgtgagaatgggcaaagaagaagagaagctcatgattcgtggattaggggatattatgaataacaaagtgttttaccagcaccctaatctcatgagggcactggggatgcacgagactgtgatggaggtcatggtgaacgtccttggaggtggagagtccaaggaaatcacctttcccaagatggtggccaactgttgccgttttctctgttacttctgtcgtataagtaggcagaatcaaaaagctatgtttgatcatctcagttatttactggaaaacagcagtgttggtcttgcctccccagctatgagaggttcaacaccactggatgtggctgcagcttcggtgatggataataatgaactagcattagctctgcgtgagccggatctagaaaaggtagttcgttatttggctggttgtggactgcaaagttgccagatgctggtgtctaagggctatccagacattgggtggaacccagttgaaggagagagatatcttgactttcttagatttgctgtcttctgtaatggggagagtgtggaggaaaatgcaaatgtcgtggtgagattgctcattcggaggcctgagtgttttggtcctgctttgagaggagaaggtgggaatgggcttcttgcagcaatggaagaagccatcaaaatcgccgaggatccttcccgagatggtccctcaccaaatagcggatccagtaaaacacttgacacagaggaggaggaagatgacactatccacatggggaacgcgatcatgaccttctattcagctttgattgacctcttgggacgctgtgctcctgagatgcatttgattcatgccgggaagggagaagccatcagaattaggtccattttgagatccctcattcccctgggagatttggtgggcgttatcagcatcgcttttcagatgccaacaatagccaaagatgggaatgtggtggaacctgacatgtctgcggggttttgcccagatcacaaggcagccatggttttattccttgacagggtctatgggattgaggttcaagacttcctcctccatcttcttgaggttggctttctgccagatctccgggcggctgcttctttagatacggcagctttgagtgctacagacatggccttggccctcaatcggtacctttgcacagccgtcttgccattgttaacaagatgtgctcctctctttgctggcacagagcaccacgcttctctcattgactcattacttcatactgtgtatagactttctaagggctgttcacttaccaaagctcagcgggattccatagaagtttgtttactctctatttgtggacaactgagaccttctatgatgcagcacttactcagaagattagtatttgatgttccattattaaatgaacacgcaaagatgcctcttaaactgctgacaaatcattatgaaagatgctggaaatattactgcctgcctggagggtggggaaactttggtgctgcctcagaagaagaacttcatttatcaagaaagttgttctggggcatttttgatgccctgtctcaaaagaaatatgaacaagaacttttcaaactggcactgccttgcctgagtgcagttgcgggagctttgcctccagactacatggagtcaaattatgtcagtatgatggaaaaacagtcatcaatggattctgaagggaactttaacccacaacctgttgatacctcaaatattacaattcctgagaaattggaatacttcattaacaaatatgcagaacactcccatgacaaatggtcaatggacaagttggcaaatggatggatttatggagaaatatattcagactcttctaaggttcagccattaatgaagccatataagctattgtctgaaaaggaaaaagaaatttatcgctggccaatcaaagaatctttaaaaactatgctggcttggggctggagaattgaaagaactcgggagggagacagcatggccctttacaaccggactcgtcgtatttctcagacaagccaggtttctgtggacgctgcccatggttacagtccccgggccattgacatgagcaatgttacactatctagagacctgcatgctatggcagaaatgatggctgaaaactaccataatatatgggcaaagaaaaagaaaatggagttggagtccaaaggaggaggaaaccatcctctgctggtgccctatgatacactgacagccaaagagaaagccaaggatagagaaaaagcacaggacatcctcaagttcttgcagatcaatggatatgctgtatccagaggatttaaggacctggaactggacacgccttctattgagaaacgatttgcctatagtttcctccaacaactcattcgctatgtggatgaagcccatcagtatatcctggagtttgatggtggcagcagaggcaaaggagaacatttcccttatgaacaagaaatcaagttctttgcaaaagtcgttcttcctttaattgatcagtatttcaaaaaccatcgtttatacttcttatctgcagcaagcagacctctctgctctggaggacatgcttccaacaaagagaaagaaatggtgactagcctattctgcaaacttggagttcttgtcaggcataggatttcactatttggcaatgatgcaacatcaattgtcaactgtcttcatattttgggtcagactttggatgcaaggacagtgatgaagactggcctggagagtgttaaaagtgcactcagagcttttctggacaacgctgcagaggatctggagaagaccatggaaaacctcaagcagggccagttcactcacacccgaaaccagcccaaaggggttactcagattatcaattacaccacagtggccctgctgccaatgctgtcttcattatttgaacatattggccagcatcagttcggagaagacctaatattggaagatgtccaggtgtcttgttatagaattctgactagcttatatgctttgggaaccagcaagagtatttacgtggagaggcaacgttctgcattaggagaatgtctagctgcctttgctggtgcttttcctgtagcatttttggaaactcatctggacaaacataatatttactccatctacaataccaagtcttcacgagaaagagcagctctcagtttgccaactaatgtggaagatgtttgtccaaacataccgtctttggagaaactcatggaagaaatcgtggaattagccgagtccggcattcgctacactcaaatgccacatgtcatggaagtcatactgcccatgctttgcagctacatgtctcgttggtgggagcatggacctgagaacaatccagaacgggccgagatgtgctgcacagccctgaactcagagcacatgaacacacttctagggaacatattgaaaatcatatataataacttggggattgatgagggagcctggatgaagaggctagcagtgttttcccagcctataataaataaagtgaaacctcagctcttgaaaactcatttcttgccgttaatggagaaactcaagaaaaaggcagctacggtggtgtctgaggaagaccacctgaaagctgaggccaggggggacatgtcggaggcagaactcctcatcctagatgagttcaccacactggccagagatctctatgccttctaccctctcttgattagatttgtggactataacagggcaaagtggctaaaggagcctaacccagaagcagaggagctcttccgcatggtggctgaagtgtttatctactggtcgaagtcccataatttcaaaagagaagagcagaacttcgttgtacagaatgaaatcaacaatatgtctttccttattactgataccaagtcaaagatgtcaaaggcagctgtttctgatcaggaaaggaagaaaatgaagcgcaaaggagatcggtattccatgcagacctctctgattgtagcagctctgaagcggttactgcccattgggttgaacatctgtgcccctggggaccaggagctcattgctctggccaaaaatcgatttagcctgaaagataccgaggatgaagtacgagatataatccgcagcaatattcatttacaaggcaagttggaggatcctgctattagatggcaaatggctctttacaaagacttaccaaacaggactgatgatacctcagatccagagaagacggtagaaagagtattggatatagcaaatgtgctttttcatcttgaacagaagtctaaacgtgtgggtcggagacattactgtctggtggaacatcctcagagatctaaaaaggctgtatggcataaactactgtccaagcagaggaaaagggctgttgtagcctgcttccggatggcccccttatataatctgccaaggcatcgggctgtcaatctctttcttcagggatatgaaaagtcttggattgaaacagaagaacattactttgaagataaactgatagaagatttagcaaaacctggggctgaacctccagaagaagatgaaggcactaagagagttgatcctctacatcagctgatccttctgtttagtcggacagctttaacagagaaatgcaaactggaggaagattttttatatatggcctatgcagatattatggcaaagagttgtcatgatgaggaagatgacgatggtgaagaggaagtgaagagttttgaagaaaaagaaatggaaaagcaaaagcttctataccagcaagcccgactccacgatcgtggcgcggctgagatggtgctacagacaatcagtgccagcaaaggtgaaactggaccaatggtagcagctactctgaaacttggaattgctattttaaatggtgggaactccacagtacagcagaaaatgcttgactacctcaaggagaaaaaggatgtgggcttctttcagagcctggccggcctgatgcagtcatgtagtgtccttgacctaaatgcatttgagcgacaaaacaaagctgaaggtcttgggatggtgacagaggaaggatcaggagaaaaggttctgcaggacgatgagttcacctgtgacctcttccgattcctgcaactactctgtgagggacacaactcagattttcagaattatctgagaactcagactggcaataatacaactgtcaacataattatctccactgtagactacctactgagagttcaggaatcaattagtgacttttattggtattactctgggaaagatgttattgatgaacaaggacaacggaatttctccaaagctatccaagtggcaaaacaagtctttaacactcttacagagtatattcagggtccttgcactgggaatcaacagagtttggcacacagcaggctgtgggatgctgtggtcggctttcttcatgtgtttgcccatatgcagatgaagctgtcgcaggattccagtcaaattgagctattaaaagaattaatggatctgcagaaggatatggtggtcatgttgctgtccatgttagaaggtaatgttgttaatggaacgattggcaaacagatggtggatatgcttgtggaatcttccaacaacgtggagatgattctcaaattttttgacatgttcttaaaactaaaggatttgacgtcgtctgatacttttaaagaatatgaccccgatggcaagggagtcatttccaagagggacttccacaaagcgatggagagccataagcactacacgcagtcagaaacggaatttcttttgtcttgtgcggagacggatgagaatgaaaccctcgactacgaagagttcgtcaaacgcttccacgaacctgcgaaggacatcggcttcaacgtcgccgtccttctgacaaacctctctgagcacatgcccaacgatacccgacttcagacttttctggaattagcagagagcgtcctgaattatttccagccctttctgggccgcatcgaaatcatgggaagcgccaaacgcatcgagagggtctattttgaaatcagtgagtccagccgaacccagtgggagaagccccaggtcaaggagtccaaaagacagttcatatttgacgtggtcaacgaaggcggagagaaagagaagatggaactctttgtgaacttctgcgaggacaccatctttgaaatgcagctggcggctcagatctcggagtcggacttgaacgagaggtcagcgaataaggaagaaagcgagaaggagaggccggaagagcaggggccgaggatggctttcttctccattctgacggtcaggtcggccctgtttgcgctcaggtacaatatcttgacccttatgcgaatgctcagtctgaagagcctgaagaagcagatgaaaaaagtaaaaaagatgaccgtgaaggacatggtcacggccttcttttcatcctactggagtattttcatgaccctcttgcacttcgtggccagcgttttcagaggctttttccgcatcatttgcagcctgctgcttgggggaagcctcgtcgaaggtgctaaaaagatcaaagttgcagaactgttagccaacatgccagaccccactcaggatgaggttagaggagatggggaggagggagagaggaaacccctggaagccgccctgccctccgaggatctgaccgacttaaaggagctgacagaggaaagtgaccttctttcggacatctttggcctggatctgaagagagaaggaggacagtacaaactgattcctcataatccaaatgctgggctcagtgacctcatgagcaacccagtccccatgcctgaggtgcaggaaaaatttcaggaacagaaggcaaaagaagaagaaaaggaagaaaaagaagaaaccaaatctgaacctgaaaaagccgagggagaagatggagaaaaagaagagaaagccaaggaagacaagggcaaacaaaagttgaggcagcttcacacacacagatacggagaaccagaagtgccagagtcagcattctggaagaaaatcatagcatatcaacagaaacttctaaactattttgctcgcaacttttacaacatgagaatgttagccttatttgtcgcatttgctatcaatttcatcttgctcttttataaggtctccacttcttctgtggttgaaggaaaggagctccccacgagaagttcaagtgaaaatgccaaagtgacaagcctggacagcagctcccatagaatcatcgcagttcactatgtactagaggagagcagcggctacatggagcccacgttgcgtatcttagctattctgcacacggtcatttctttcttctgcatcattggatactactgcttgaaagtcccattggttatttttaagcgagaaaaggaagtggcacggaaattggaatttgatgggctttatattacagaacagccttcagaagatgatattaaaggccagtgggatagactcgtaatcaacacacagtcatttcccaacaactactgggacaaatttgttaaaagaaaggttatggataaatatggagagttctacggccgagacagaatcagtgaattacttggcatggacaaggcagctctggacttcagtgatgccagagaaaagaagaagccaaagaaagacagctccttatcagctgtactgaactccattgatgtgaagtatcagatgtggaaactaggagtcgttttcactgacaactccttcctctacctagcctggtatatgactatgtctgttcttggacactataacaactttttttttgccgctcaccttctcgacattgctatgggattcaagacattaagaaccatcttgtcctcagtaactcacaatggcaaacagctcgtattaaccgttggcttattagctgttgttgtatacctatacactgtggtggcattcaattttttccgaaaattctacaataaaagtgaagatggtgatacaccagatatgaaatgtgacgatatgctaacatgctatatgttccacatgtatgttggagttcgtgctggaggagggatcggggatgaaatcgaagacccagcaggagatgaatatgagatctatcgaatcatctttgacatcactttcttcttctttgttattgtcattctcttggccataatacaaggtctaattattgatgcttttggagaactaagagaccaacaggaacaagtcaaagaagacatggagaccaaatgcttcatctgtgggataggcaatgattacttcgacacagtgccacatggctttgaaacccacactttacaggagcacaacttggctaattacttgttttttctgatgtatcttataaacaaagatgaaacagaacacacaggacaggaatcttatgtctggaagatgtatcaagaaaggtgttgggaatttttcccagcaggggattgcttccggaaacagtatgaagaccagctaaattaaactcagacccaatcacctctaaaaaccaaaaccctacccctctctctccctctctcaatttctctgctctcttggaaacattttgctgattttgtgaattgccagcgttgtgtgttttctgggagcatcgaagctctgtttcggaagagctgtttcctccccccaccttttgtatttactttgagactaaagactgaagaataatctaaattcatactcagacaaaaaaaggaattctggaaagaaaaccattctggacactgtcataacacacatagatagattttcttctgagactcccggagtcttctcgagctacgagaccttcacagagacacgtggcagccacactcacccagcctctttatttcaccatcctggaaggaaactgtctgtctaatggtcacagagcactgtagcacttaacagattgccatggacaccagttgcgaagggaaatagtgccttactatatgtgggttgagctatgcagaagatacgtgcatgaaaaaacatctttattttctttatgtcgacctttcttttcttagattgattttgtgaggttttttttttttcctttagtcttttctttagtgggggagggtaagaaaagcagtttgcacttaaaaagaaaaaaaaaaaacgggtggtgtgtctcaggacaaaaggaggctcttctcattcagctaaattcacatttgccccccccccccgcccccgcccccatatgctcctgctattattttggtaatgctctgatgcaacattgcaactttatgaaatctttgtatgaaaacaaaaagactgcaaaaaatacactttcaaaagaaaccattcattgcatgtttattatgcaagtttaaatgaacaaagaaaaccttcagaaacaagttgatcaacgtgagagaaatttcatgataattattcatagtaataaagtgtcgtgggcttaattgtatatctggagccagtgtcatccaccaacaatgtgatacaatatgaacttgacagtagttttgggttttgctcattctttcagccacctgtgatcagttttgttgattaaggacttcttgtcaggccattttttaatatcaaagctgaagcaatatccattcagggatttcatcagttgcatcacaaaacacggatgataatatacatcactccattttttccattttgagtccttttaaatgtaatgctaacctttacaattaaaaagtcagattcagaatggaaacaaggtcattttgcaaacattggagctcttttattacaagtctgcttgttaattttagaactgtaaaaccgctctgattaaactatttaactaac

SEQ ID NO: 215 - protein, 4967 aa, Homo sapiens
MADGGEGEDEIQFLRTDDEVVLQCTATIHKEQQKLCLAAEGFGNRLCFLESTSNSKNVPPDLSICTFVLEQSLSVRALQEMLANTVEKSEGQVDVEKWKFMMKTAQGGGHRTLLYGHAILLRHSYSGMYLCCLSTSRSSTDKLAFDVGLQEDTTGEACWWTIHPASKQRSEGEKVRVGDDLILVSVSSERYLHLSYGNGSLHVDAAFQQTLWSVAPISSGSEAAQGYLIGGDVLRLLHGHMDECLTVPSGEHGEEQRRTVHYEGGAVSVHARSLWRLETLRVAWSGSHIRWGQPFRLRHVTTGKYLSLMEDKNLLLMDKEKADVKSTAFTFRSSKEKLDVGVRKEVDGMGTSEIKYGDSVCYIQHVDTGLWLTYQSVDVKSVRMGSIQRKAIMHHEGHMDDGISLSRSQHEESRTARVIRSTVFLFNRFIRGLDALSKKAKASTVDLPIESVSLSLQDLIGYFHPPDEHLEHEDKQNRLRALKNRQNLFQEEGMINLVLECIDRLHVYSSAAHFADVAGREAGESWKSILNSLYELLAALIRGNRKNCAQFSGSLDWLISRLERLEASSGILEVLHCVLVESPEALNIIKEGHIKSIISLLDKHGRNHKVLDVLCSLCVCHGVAVRSNQHLICDNLLPGRDLLLQTRLVNHVSSMRPNIFLGVSEGSAQYKKWYYELMVDHTEPFVTAEATHLRVGWASTEGYSPYPGGGEEWGGNGVGDDLFSYGFDGLHLWSGCIARTVSSPNQHLLRTDDVISCCLDLSAPSISFRINGQPVQGMFENFNIDGLFFPVVSFSAGIKVRFLLGGRHGEFKFLPPPGYAPCYEAVLPKEKLKVEHSREYKQERTYTRDLLGPTVSLTQAAFTPIPVDTSQIVLPPHLERIREKLAENIHELWVMNKIELGWQYGPVRDDNKRQHPCLVEFSKLPEQERNYNLQMSLETLKTLLALGCHVGISDEHAEDKVKKMKLPKNYQLTSGYKPAPMDLSFIKLTPSQEAMVDKLAENAHNVWARDRIRQGWTYGIQQDVKNRRNPRLVPYTLLDDRTKKSNKDSLREAVRTLLGYGYNLEAPDQDHAARAEVCSGTGERFRIFRAEKTYAVKAGRWYFEFETVTAGDMRVGWSRPGCQPDQELGSDERAFAFDGFKAQRWHQGNEHYGRSWQAGDVVGCMVDMNEHTMMFTLNGEILLDDSGSELAFKDFDVGDGFIPVCSLGVAQVGRMNFGKDVSTLKYFTICGLQEGYEPFAVNTNRDITMWLSKRLPQFLQVPSNHEHIEVTRIDGTIDSSPCLKVTQKSFGSQNSNTDIMFYRLSMPIECAEVFSKTVAGGLPGAGLFGPKNDLEDYDADSDFEVLMKTAHGHLVPDRVDKDKEATKPEFNNHKDYAQEKPSRLKQRFLLRRTKPDYSTSHSARLTEDVLADDRDDYDFLMQTSTYYYSVRIFPGQEPANVWVGWITSDFHQYDTGFDLDRVRTVTVTLGDEKGKVHESIKRSNCYMVCAGESMSPGQGRNNNGLEIGCVVDAASGLLTFIANGKELSTYYQVEPSTKLFPAVFAQATSPNVFQFELGRIKNVMPLSAGLFKSEHKNPVPQCPPRLHVQFLSHVLWSRMPNQFLKVDVSRISERQGWLVQCLDPLQFMSLHIPEENRSVDILELTEQEELLKFHYHTLRLYSAVCALGNHRVAHALCSHVDEPQLLYAIENKYMPGLLRAGYYDLLIDIHLSSYATARLMMNNEYIVPMTEETKSITLFPDENKKHGLPGIGLSTSLRPRMQFSSPSFVSISNECYQYSPEFPLDILKSKTIQMLTEAVKEGSLHARDPVGGTTEFLFVPLIKLFYTLLIMGIFHNEDLKHILQLIEPSVFKEAATPEEESDTLEKELSVDDAKLQGAGEEEAKGGKRPKEGLLQMKLPEPVKLQMCLLLQYLCDCQVRHRIEAIVAFSDDFVAKLQDNQRFRYNEVMQALNMSAALTARKTKEFRSPPQEQINMLLNFKDDKSECPCPEEIRDQLLDFHEDLMTHCGIELDEDGSLDGNSDLTIRGRLLSLVEKVTYLKKKQAEKPVESDSKKSSTLQQLISETMVRWAQESVIEDPELVRAMFVLLHRQYDGIGGLVRALPKTYTINGVSVEDTINLLASLGQIRSLLSVRMGKEEEKLMIRGLGDIMNNKVFYQHPNLMRALGMHETVMEVMVNVLGGGESKEITFPKMVANCCRFLCYFCRISRQNQKAMFDHLSYLLENSSVGLASPAMRGSTPLDVAAASVMDNNELALALREPDLEKVVRYLAGCGLQSCQMLVSKGYPDIGWNPVEGERYLDFLRFAVFCNGESVEENANVVVRLLIRRPECFGPALRGEGGNGLLAAMEEAIKIAEDPSRDGPSPNSGSSKTLDTEEEEDDTIHMGNAIMTFYSALIDLLGRCAPEMHLIHAGKGEAIRIRSILRSLIPLGDLVGVISIAFQMPTIAKDGNVVEPDMSAGFCPDHKAAMVLFLDRVYGIEVQDFLLHLLEVGFLPDLRAAASLDTAALSATDMALALNRYLCTAVLPLLTRCAPLFAGTEHHASLIDSLLHTVYRLSKGCSLTKAQRDSIEVCLLSICGQLRPSMMQHLLRRLVFDVPLLNEHAKMPLKLLTNHYERCWKYYCLPGGWGNFGAASEEELHLSRKLFWGIFDALSQKKYEQELFKLALPCLSAVAGALPPDYMESNYVSMMEKQSSMDSEGNFNPQPVDTSNITIPEKLEYFINKYAEHSHDKWSMDKLANGWIYGEIYSDSSKVQPLMKPYKLLSEKEKEIYRWPIKESLKTMLAWGWRIERTREGDSMALYNRTRRISQTSQVSVDAAHGYSPRAIDMSNVTLSRDLHAMAEMMAENYHNIWAKKKKMELESKGGGNHPLLVPYDTLTAKEKAKDREKAQDILKFLQINGYAVSRGFKDLELDTPSIEKRFAYSFLQQLIRYVDEAHQYILEFDGGSRGKGEHFPYEQEIKFFAKVVLPLIDQYFKNHRLYFLSAASRPLCSGGHASNKEKEMVTSLFCKLGVLVRHRISLFGNDATSIVNCLHILGQTLDARTVMKTGLESVKSALRAFLDNAAEDLEKTMENLKQGQFTHTRNQPKGVTQIINYTTVALLPMLSSLFEHIGQHQFGEDLILEDVQVSCYRILTSLYALGTSKSIYVERQRSALGECLAAFAGAFPVAFLETHLDKHNIYSIYNTKSSRERAALSLPTNVEDVCPNIPSLEKLMEEIVELAESGIRYTQMPHVMEVILPMLCSYMSRWWEHGPENNPERAEMCCTALNSEHMNTLLGNILKIIYNNLGIDEGAWMKRLAVFSQPIINKVKPQLLKTHFLPLMEKLKKKAATVVSEEDHLKAEARGDMSEAELLILDEFTTLARDLYAFYPLLIRFVDYNRAKWLKEPNPEAEELFRMVAEVFIYWSKSHNFKREEQNFVVQNEINNMSFLITDTKSKMSKAAVSDQERKKMKRKGDRYSMQTSLIVAALKRLLPIGLNICAPGDQELIALAKNRFSLKDTEDEVRDIIRSNIHLQGKLEDPAIRWQMALYKDLPNRTDDTSDPEKTVERVLDIANVLFHLEQKSKRVGRRHYCLVEHPQRSKKAVWHKLLSKQRKRAVVACFRMAPLYNLPRHRAVNLFLQGYEKSWIETEEHYFEDKLIEDLAKPGAEPPEEDEGTKRVDPLHQLILLFSRTALTEKCKLEEDFLYMAYADIMAKSCHDEEDDDGEEEVKSFEEKEMEKQKLLYQQARLHDRGAAEMVLQTISASKGETGPMVAATLKLGIAILNGGNSTVQQKMLDYLKEKKDVGFFQSLAGLMQSCSVLDLNAFERQNKAEGLGMVTEEGSGEKVLQDDEFTCDLFRFLQLLCEGHNSDFQNYLRTQTGNNTTVNIIISTVDYLLRVQESISDFYWYYSGKDVIDEQGQRNFSKAIQVAKQVFNTLTEYIQGPCTGNQQSLAHSRLWDAVVGFLHVFAHMQMKLSQDSSQIELLKELMDLQKDMVVMLLSMLEGNVVNGTIGKQMVDMLVESSNNVEMILKFFDMFLKLKDLTSSDTFKEYDPDGKGVISKRDFHKAMESHKHYTQSETEFLLSCAETDENETLDYEEFVKRFHEPAKDIGFNVAVLLTNLSEHMPNDTRLQTFLELAESVLNYFQPFLGRIEIMGSAKRIERVYFEISESSRTQWEKPQVKESKRQFIFDVVNEGGEKEKMELFVNFCEDTIFEMQLAAQISESDLNERSANKEESEKERPEEQGPRMAFFSILTVRSALFALRYNILTLMRMLSLKSLKKQMKKVKKMTVKDMVTAFFSSYWSIFMTLLHFVASVFRGFFRIICSLLLGGSLVEGAKKIKVAELLANMPDPTQDEVRGDGEEGERKPLEAALPSEDLTDLKELTEESDLLSDIFGLDLKREGGQYKLIPHNPNAGLSDLMSNPVPMPEVQEKFQEQKAKEEEKEEKEETKSEPEKAEGEDGEKEEKAKEDKGKQKLRQLHTHRYGEPEVPESAFWKKIIAYQQKLLNYFARNFYNMRMLALFVAFAINFILLFYKVSTSSVVEGKELPTRSSSENAKVTSLDSSSHRIIAVHYVLEESSGYMEPTLRILAILHTVISFFCIIGYYCLKVPLVIFKREKEVARKLEFDGLYITEQPSEDDIKGQWDRLVINTQSFPNNYWDKFVKRKVMDKYGEFYGRDRISELLGMDKAALDFSDAREKKKPKKDSSLSAVLNSIDVKYQMWKLGVVFTDNSFLYLAWYMTMSVLGHYNNFFFAAHLLDIAMGFKTLRTILSSVTHNGKQLVLTVGLLAVVVYLYTVVAFNFFRKFYNKSEDGDTPDMKCDDMLTCYMFHMYVGVRAGGGIGDEIEDPAGDEYEIYRIIFDITFFFFVIVILLAIIQGLIIDAFGELRDQQEQVKEDMETKCFICGIGNDYFDTVPHGFETHTLQEHNLANYLFFLMYLINKDETEHTGQESYVWKMYQERCWEFFPAGDCFRKQYEDQLN

SEQ ID NO: 216 - DNA, 4199 bp, Homo sapiens
aggattcagagctaagtctccgggctcctttcacatctgcaggagcagccagcctgggaccgcgcggcgcggggcgcgctctcgcctctcctgcaccctcagccggcgcgcttctcttatgggcgtctgctgcagtctggctgcggtcgaactgaaagcggcggcgggagaccaaacttagaccccgctgtggactagagaactcagagaaggcagagggagagggagagagagagagagaagggacccgaggaggaggcttccatcacgtcattgcaggatgttctggaagctttccctgtccttgttcctggtggcggtgctggtgaaggtggcggaagcccggaagaaccggccggcgggcgccatcccctcgccttacaaggacggcagcagcaacaactcggagagatggcagcaccagatcaaggaggtgctggcctccagccaggaggccctggtggtcaccgagcgcaagtacctcaagagtgactggtgcaagacgcagccgctgcggcagacggtgagcgaggagggctgccggagccgcaccatcctcaaccgcttctgctacggccagtgcaactccttctacatcccgcggcacgtgaagaaggaggaggagtccttccagtcctgcgccttctgcaagccccagcgcgtcacctccgtcctcgtggagctcgagtgccccggcctggacccacccttccgactcaagaaaatccagaaggtgaagcagtgccggtgcatgtccgtgaacctgagcgactcggacaagcagtgagcgccgggccggacgcagctcagccccgcgcgcgcccggccgctgggtggcgccgccgccgcctctgtccctgccctccgagcccactgtcacgctgcctggtgttccccctcagcagcaagcacttctcttagggctgacggtgtccttgtcacagacgtggatcgcaagtggagcttttgctgatgtgttcctgaccgaccccgggtcccacctgtgccccctaaaccaggcggtggatcaggcccgaaggaaaatgctggaaaaccaccaccgccacccagcagtcagagaggacctttcgaggtgatgcactgtaaatccggcattgatgtttccaccatgtggaaaagcaaggatttccctggccccgccctgcactccagctcgcccctttcccgcgcgaagtgaaggatgcgtcacttttctgagcggcccctcagacctctcctgctggtccctggacctctggctgggagcgctcattcttgtgactggcaggctgccctcggtcgctgctgtgatgaggatatgtgcaacctccataaatatgtcggtggacggggcgtctcctaataaacctgataccaagaagacaacttgagccacttggatcccgaagtgggcttcccgggaaacctcgagcagagcaggctacacaatcccccatcctcaagtccccaccgcctcttcttcctcactgtccccgccccctatttgtggactaaagatgaactctggtgtgcatgctattattgctgcaattagaatattatcacacacaaaggtctctatattaacgctggttttataagtgaccgtatattgtaaagagctgttaaaaagtattatagacctattcatgtattatttcacatgttttgactctggcttgcagcaccattcggagtaaggatgacagcaggcccagaaggtgtcttactcagaaaaaaaaatgcctggtcagcaattcactgtcatgcacctatttttagattgggcagggagatgggaggagtcgtgatttttactttgaatactatttcactgacgttactaagcattgcagcacaatgtagaaattggcttgggatggataggtatagggaagggcattcgttgggaaattgatgaccggaaactagaaagcccctataatgtggaatatgcatatgtggggtgaaaccgtatactactttcactgccatgacactaggcaaaaaatatttcctgttaaaagaaagagaaaaagagagggatattgaaaaatataaggagttgagtcgctttgtggtatagaagggagtaaggaataaaagatatagaatagtaatctagttgaactgttctgcacaaaacatgcttccttttcaaagaatagacttcaaaagggacgaacaaacattaggtcaccttttgtgtttataatgaattgttgacgtttccatgctgtggtctcttgatatacggaagtagacgtaacttattttccagcgaaattatatacttcttctgggctcctttgctcagttgccccaggaaggcttccctgtgagtaatgcttatggaatctgacaaatgtgaatgagctgccattggtgggaatcagtaaactttgaaaacctttcactgatgattccctggtaagtgctcctgtgaggggccacttccctagtatgtgagagagaccctctgcaagccgctgtggggacttagcttcctgatactaggtagtgatggtggatctagagacattcacttgaagagcaaggattggggtggggtgggttggtgaatctatctcaggccactgcactgcaaggtgcatttctgtcatttctgcaacaccatgagacctgagcaagaatgtgctgtggcagagggggtcttggtttcataaatgggtatatacagcctgaactcaggaggcagaaatcaaaagaaatccttgagggctggaacctgaggatagagcgaaaatggagagaagggtgttcaaggtcaggagtgatttttgcatttggtggaaaacctcaagtcagactcagtggcagaacatgcagcagaaaagctgtgaaggaaggaaatttacgtgattgtaatggaggctaggggtggattgggaggtgagtggaggagagtctctgaccagctgcagagccaacccctatcattttattaacatggaacccacacagataggggagggattaagctaagaacttacagaatgcaaacacgagcacactctcttcgaacccaattgtgggtgtagcaatgaaagcaatatgatatgctgcagtgtgaagctccttctggggttatcgtatgtacaaagtttaccttataatggctcaaattgtatttaatttttttgttttgtttataaatgaagaaaagctataagtataatgtaattattttataggtatactattaaattatagaacaaataaagataatctaggattatatgtgatcccggtgtgacgtgccataaaagtggaatttttgacttgttgcagtgagctgtgaagcagcactatgcgttcagagagtttttgttcaaccatggtgagttcaacctctagcttatgtcacatgatctcctttggggtctggaatcttctaagagaaatagaatcaggcatccaaggagcagaagtgatggaggtggccctcaatcctggtctttggaagcttccaagcctcttccacatcccctgccagctgaagacagagtattctcactgtgctggctgaaggagaaacactaaacaaggaaaccttgagaaactgcagcaatggaagtccactgttagtctctccgttagcaccagggacacacttgttctgagttttgttcattttcacatttactcctcatgagttccaacatttcttaatttaaatatttcttagtttatagcatctccatttttctattaattgacttaatctgccatttaagaaaactccgtaatcaataaaaaataaaatccacaatcaaactgcacatggttgatccactgtgtaggcttcaaaggaattaaactcaacttcctaggaaataattcatcttagtttattaaatgggacagaatatttcactgctaacgtattctaactcacttgtttttgaaattggccagatgatttttaagttataaagtcaatgaaaatgacttttgctattgtgtgaacaacttagaatgtatatattcccagaaggcttatttaatgattgacctatcaccactgattattaatgtctgcatgaatgataacaataagaccaagtcatcaataatgcaatgaaaattttttaagtgaaagcaagtttattaagaaagtaaaggaataaagaatgcctacttcataggcagagcagcctaaaaaaaaaaaaaaaaaa

SEQ ID NO: 217 - protein, 168 aa, Homo sapiens
MFWKLSLSLFLVAVLVKVAEARKNRPAGAIPSPYKDGSSNNSERWQHQIKEVLASSQEALVVTERKYLKSDWCKTQPLRQTVSEEGCRSRTILNRFCYGQCNSFYIPRHVKKEEESFQSCAFCKPQRVTSVLVELECPGLDPPFRLKKIQKVKQCRCMSVNLSDSDKQ

SEQ ID NO: 218 - DNA, 2344 bp, Homo sapiens
cgcgggccaccccgctctcctcgccgccgcggcggcaggcgcggggccgcgccgcgaggcctgatccctgcagcgcgggcaggcggcgtcgcagagcggagctagctggatgcgtccggactcctgcaggtgagagtgattttccagtgattgctttggcctgtacaaccagagaacaggattcttcccttctttttggccaccaaatgcctatgtgcaccacacattccagtgtgctgagaagggcagagcttcttggatgatgatggacgtcccaccgggcaggatgaaggcagagcgtgtggcatctccacctcaagggtgcagcctgatcttcctcttctcccttgccagccagcactctgccttctgtatccaccatggtgtttggtgagtttttccatcgccctggacaagacgaggaacttgtcaacctgaatgtggggggctttaagcagtctgttgaccaaagcaccctcctgcggtttcctcacaccagactggggaagctgcttacttgccattctgaagaggccattctggagctgtgtgatgattacagtgtggccgataaggaatactactttgatcggaatccctccttgttcagatatgttttgaatttttattacacggggaagctgcatgtcatggaggagctgtgcgtattctcattctgccaggagatcgagtactggggcatcaacgagctcttcattgattcttgctgcagcaatcgctaccaggaacgcaaggaggaaaaccacgagaaggactgggaccagaaaagccatgatgtgagtaccgactcctcgtttgaagagtcgtctctgtttgagaaagagctggagaagtttgacacactgcgatttggtcagctccggaagaaaatctggattagaatggagaatccagcgtactgcctgtccgctaagcttatcgctatctcctccttgagcgtggtgctggcctccatcgtggccatgtgcgttcacagcatgtcggagttccagaatgaggatggagaagtggatgatccggtgctggaaggagtggagatcgcgtgcattgcctggttcaccggggagcttgccgtccggctggctgccgctccttgtcaaaagaaattctggaaaaaccctctgaacatcattgactttgtctctattattcccttctatgccacgttggctgtagacaccaaggaggaagagagtgaggatattgagaacatgggcaaggtggtccagatcctacggcttatgaggattttccgaattctaaagcttgcccggcactcggtaggacttcggtctctaggtgccacactgagacacagctaccatgaagttgggcttctgcttctcttcctctctgtgggcatttccattttctctgtgcttatctactccgtggagaaagatgaccacacatccagcctcaccagcatccccatctgctggtggtgggccaccatcagcatgacaactgtgggctatggagacacccacccggtcaccttggcgggaaagctcatcgccagcacatgcatcatctgtggcatcttggtggtggcccttcccatcaccatcatcttcaacaagttttccaagtactaccagaagcaaaaggacattgatgtggaccagtgcagtgaggatgcaccagagaagtgtcatgagctaccttactttaacattagggatatatatgcacagcggatgcacaccttcattaccagtctctcttctgtaggcattgtggtgagcgatcctgactccacagatgcttcaagcattgaagacaatgaggacatttgtaacaccacctccttggagaattgcacagcaaaatgagcgggggtgtttgtgcctgtttctcttatcctttcccgacattaggttaacacagctttataaacctcagtgggttcgttaaaatcatttaattctcagggtgtacctttcagccatagttggacattcattgctgaattctgaaatgatagaattgtctttatttttctctgtgaggtcaattaaatgccttgttctgaaatttattttttacaagagagagttgtgatatagtttggaatataagataaatggtattgggtggggtttgtggctacagcttatgcatcattctgtgtttgtcatttactcacattgagctaactttaaattactgacaagtagaatcaaaggtgcagctgactgagacgacatgcatgtaagatccacaaaatgagacaatgcatgtaaatccatgctcatgttctaaacatggaaactaggagcctaataaacttcctaattcagtatggaaaaaaaaaaaaaaa

SEQ ID NO: 219 - protein, 491 aa, Homo sapiens
MVFGEFFHRPGQDEELVNLNVGGFKQSVDQSTLLRFPHTRLGKLLTCHSEEAILELCDDYSVADKEYYFDRNPSLFRYVLNFYYTGKLHVMEELCVFSFCQEIEYWGINELFIDSCCSNRYQERKEENHEKDWDQKSHDVSTDSSFEESSLFEKELEKFDTLRFGQLRKKIWIRMENPAYCLSAKLIAISSLSVVLASIVAMCVHSMSEFQNEDGEVDDPVLEGVEIACIAWFTGELAVRLAAAPCQKKFWKNPLNIIDFVSIIPFYATLAVDTKEEESEDIENMGKVVQILRLMRIFRILKLARHSVGLRSLGATLRHSYHEVGLLLLFLSVGISIFSVLIYSVEKDDHTSSLTSIPICWWWATISMTTVGYGDTHPVTLAGKLIASTCIICGILVVALPITIIFNKFSKYYQKQKDIDVDQCSEDAPEKCHELPYFNIRDIYAQRMHTFITSLSSVGIVVSDPDSTDASSIEDNEDICNTTSLENCTAK

SEQ ID NO: 220 - DNA, 2496 bp, Homo sapiens
gggcgcgcgcccgcccatccgccctccgccctccgccctcgcgccctcgcgccgggggcgggcgctgcgcgtgccgggcggagaagcggcgcgagccgggcgctgcgaacgttcgccgcgggggtggctccggggcctgagtaggcgctgccgctgcctcagccgagggggctgggccggagcgtgcggaggagtgaggccgcaggagaccttcccgacgacccctgctccggcggggaagtgagcaaggatgattgaggaaagtgggaacaagcggaagaccatggcagagaagaggcagctgttcatagaaatgcgtgctcagaattttgatgtcatacgactatcaacttacagaacagcctgcaaattacgatttgtacaaaaacgatgcaaccttcatcttgttgatatctggaacatgattgaagccttccgagacaatggccttaatacactggaccataccaccgagatcagtgtgtcccgcctcgaaactgtcatctcctccatctactatcagttgaacaagcgccttccttctactcaccaaattagtgtggaacaatctatcagcctcctcctcaactttatgattgctgcatatgacagtgagggccgaggcaagttgacggtattttcagttaaagctatgttagcaaccatgtgtggtggaaaaatgctggacaaattgagatatgttttctcccagatgtcagattccaatggcttaatgatatttagcaagtttgaccagtttctgaaggaagttctgaagctcccaacagctgtctttgaagggccatcttttggttacacagagcactcagtccgcacctgttttccacagcagagaaagataatgctaaatatgtttttagacacaatgatggctgaccctcctccccagtgccttgtctggctacctctcatgcacaggcttgcccatgttgagaatgtcttccatcccgtggagtgctcctactgccgatgtgagagtatgatgggtttccggtaccgatgccagcagtgccacaactatcagctctgccagaattgcttttggcgtggccatgccggcggccctcacagcaaccagcaccagatgaaggagcattcctcttggaaatctcctgcaaagaagctgagccatgcaattagtaaatctttggggtgtgtacccacgagagaacccccgcatcctgtttttcctgagcaaccagagaaaccacttgaccttgcacatatagttcctcctcgccctctgactaatatgaatgacaccatggttagccacatgtcctctggagtgcccactcccaccaagaggttacagtatagccaggatatacccagtcacttggccgatgagcatgcgctgatagcctcctatgtggcccgtctgcagcactgtgcacgtgttctggacagtcctagccgactggatgaggaacaccgtcttatagctcgctatgctgcccggctggctgcagaagcaggaaacgtgactcgtcctcccactgacttgagctttaactttgatgccaacaaacaacaaagacagcttattgcagaactggaaaacaaaaacagagagatcctgcaggagattcagcgtctccgcctggaacacgagcaggcctcccagcccacccctgagaaggcacagcagaaccccacgctgctggcagagctgcggctgctgaggcaaaggaaggatgaactggagcagaggatgtcggccctgcaggagagcaggcgggagctgatggtccagctggaagagctgatgaagttgctgaaggaggaagagcaaaagcaggcagctcaggccacagggtcaccacatacatcgcccacccatggaggcggccggccaatgcccatgccagtgcgctccacgtctgccggctccacccccacccactgtccgcaggactcgctgagcggagtcgggggagacgtgcaggaggccttcgcacaaggtacgaggagaaacctccgcaatgacctgctggtggcagctgactccatcaccaacaccatgtcatccctggtgaaggagctccattcagcagaggaaggtgcagaggaagaagaagagaagatgcagaatgggaaagacagaggttagcagaggagccggacacagaggaagctcaggcacagaggacgaggagcaagctggcgccgacatggcgaaggcaaggtcttcccccagaggcacattcctctccatctttccaccgcacacctggaccaggcttgcaggctgccagacgtcactccacccgccagggagaggggagccagagccggtgggaagcggggaggggctgcgtggcacagctagtgggcctccccctgcacagccctgcatgtactagcaccttcatcactcccctcagggcatggtctcatctccgcatcaggaattcacctggaggttgaaaagagaaaagaaaaagcaccaaaaaaaaaaaaaaaaaaaaaaaa

SEQ ID NO: 221 - protein, 627 aa, Homo sapiens
MIEESGNKRKTMAEKRQLFIEMRAQNFDVIRLSTYRTACKLRFVQKRCNLHLVDIWNMIEAFRDNGLNTLDHTTEISVSRLETVISSIYYQLNKRLPSTHQISVEQSISLLLNFMIAAYDSEGRGKLTVFSVKAMLATMCGGKMLDKLRYVFSQMSDSNGLMIFSKFDQFLKEVLKLPTAVFEGPSFGYTEHSVRTCFPQQRKIMLNMFLDTMMADPPPQCLVWLPLMHRLAHVENVFHPVECSYCRCESMMGFRYRCQQCHNYQLCQNCFWRGHAGGPHSNQHQMKEHSSWKSPAKKLSHAISKSLGCVPTREPPHPVFPEQPEKPLDLAHIVPPRPLTNMNDTMVSHMSSGVPTPTKRLQYSQDIPSHLADEHALIASYVARLQHCARVLDSPSRLDEEHRLIARYAARLAAEAGNVTRPPTDLSFNFDANKQQRQLIAELENKNREILQEIQRLRLEHEQASQPTPEKAQQNPTLLAELRLLRQRKDELEQRMSALQESRRELMVQLEELMKLLKEEEQKQAAQATGSPHTSPTHGGGRPMPMPVRSTSAGSTPTHCPQDSLSGVGGDVQEAFAQGTRRNLRNDLLVAADSITNTMSSLVKELHSAEEGAEEEEEKMQNGKDRG

SEQ ID NO: 222 - DNA, 2406 bp, Homo sapiens
gggcgcgcgcccgcccatccgccctccgccctccgccctcgcgccctcgcgccgggggcgggcgctgcgcgtgccgggcggagaagcggcgcgagccgggcgctgcgaacgttcgccgcgggggtggctccggggcctgagtaggcgctgccgctgcctcagccgagggggctgggccggagcgtgcggaggagtgaggccgcaggagaccttcccgacgacccctgctccggcggggaagtgagcaaggatgattgaggaaagtgggaacaagcggaagaccatggcagagaagaggcagctgttcatagaaatgcgtgctcagaattttgatgtcatacgactatcaacttacagaacagcctgcaaattacgatttgtacaaaaacgatgcaaccttcatcttgttgatatctggaacatgattgaagccttccgagacaatggccttaatacactggaccataccaccgagatcagtgtgtcccgcctcgaaactgtcatctcctccatctactatcagttgaacaagcgccttccttctactcaccaaattagtgtggaacaatctatcagcctcctcctcaactttatgattgctgcatatgacagtgagggccgaggcaagttgacggtattttcagttaaagctatgttagcaaccatgtgtggtggaaaaatgctggacaaattgagatatgttttctcccagatgtcagattccaatggcttaatgatatttagcaagtttgaccagtttctgaaggaagttctgaagctcccaacagctgtctttgaagggccatcttttggttacacagagcactcagtccgcacctgttttccacagcagagaaagataatgctaaatatgtttttagacacaatgatggctgaccctcctccccagtgccttgtctggctacctctcatgcacaggcttgcccatgttgagaatgtcttccatcccgtggagtgctcctactgccgatgtgagagtatgatgggtttccggtaccgatgccagcagtgccacaactatcagctctgccagaattgcttttggcgtggccatgccggcggccctcacagcaaccagcaccagatgaaggagcattcctcttggaaatctcctgcaaagaagctgagccatgcaattagtaaatctttggggtgtgtacccacgagagaacccccgcatcctgtttttcctgagcaaccagagaaaccacttgaccttgcacatatagttcctcctcgccctctgactaatatgaatgacaccatggttagccacatgtcctctggagtgcccactcccaccaagaggttacagtatagccaggatatacccagtcacttggccgatgagcatgcgctgatagcctcctatgtggcccgtctgcagcactgtgcacgtgttctggacagtcctagccgactggatgaggaacaccgtcttatagctcgctatgctgcccggctggctgcagaagcaggaaacgtgactcgtcctcccactgacttgagctttaactttgatgccaacaaacaacaaagacagcttattgcagaactggaaaacaaaaacagagagatcctgcaggagattcagcgtctccgcctggaacacgagcaggcctcccagcccacccctgagaaggcacagcagaaccccacgctgctggcagagctgcggctgctgaggcaaaggaaggatgaactggagcagaggatgtcggccctgcaggagagcaggcgggagctgatggtccagctggaagagctgatgaagttgctgaaggaggaagagcaaaagcaggcagctcaggccacagggtcaccacatacatcgcccacccatggaggcggccggccaatgcccatgccagtgcgctccacgtctgccggctccacccccacccactgtccgcaggactcgctgagcggagtcgggggagacgtgcaggaggccttcgcacaagcagaggaaggtgcagaggaagaagaagagaagatgcagaatgggaaagacagaggttagcagaggagccggacacagaggaagctcaggcacagaggacgaggagcaagctggcgccgacatggcgaaggcaaggtcttcccccagaggcacattcctctccatctttccaccgcacacctggaccaggcttgcaggctgccagacgtcactccacccgccagggagaggggagccagagccggtgggaagcggggaggggctgcgtggcacagctagtgggcctccccctgcacagccctgcatgtactagcaccttcatcactcccctcagggcatggtctcatctccgcatcaggaattcacctggaggttgaaaagagaaaagaaaaagcaccaaaaaaaaaaaaaaaaaaaaaaaa

SEQ ID NO: 223 - protein, 597 aa, Homo sapiens
MIEESGNKRKTMAEKRQLFIEMRAQNFDVIRLSTYRTACKLRFVQKRCNLHLVDIWNMIEAFRDNGLNTLDHTTEISVSRLETVISSIYYQLNKRLPSTHQISVEQSISLLLNFMIAAYDSEGRGKLTVFSVKAMLATMCGGKMLDKLRYVFSQMSDSNGLMIFSKFDQFLKEVLKLPTAVFEGPSFGYTEHSVRTCFPQQRKIMLNMFLDTMMADPPPQCLVWLPLMHRLAHVENVFHPVECSYCRCESMMGFRYRCQQCHNYQLCQNCFWRGHAGGPHSNQHQMKEHSSWKSPAKKLSHAISKSLGCVPTREPPHPVFPEQPEKPLDLAHIVPPRPLTNMNDTMVSHMSSGVPTPTKRLQYSQDIPSHLADEHALIASYVARLQHCARVLDSPSRLDEEHRLIARYAARLAAEAGNVTRPPTDLSFNFDANKQQRQLIAELENKNREILQEIQRLRLEHEQASQPTPEKAQQNPTLLAELRLLRQRKDELEQRMSALQESRRELMVQLEELMKLLKEEEQKQAAQATGSPHTSPTHGGGRPMPMPVRSTSAGSTPTHCPQDSLSGVGGDVQEAFAQAEEGAEEEEEKMQNGKDRG

SEQ ID NO: 224 - DNA, 2314 bp, Homo sapiens
gggcgcgcgcccgcccatccgccctccgccctccgccctcgcgccctcgcgccgggggcgggcgctgcgcgtgccgggcggagaagcggcgcgagccgggcgctgcgaacgttcgccgcgggggtggctccggggcctgagtaggcgctgccgctgcctcagccgagggggctgggccggagcgtgcggaggagtgaggccgcaggagaccttcccgacgacccctgctccggcggggaagtgagcaaggatgattgaggaaagtgggaacaagcggaagaccatggcagagaagaggcagctgttcatagaaatgcgtgctcagaattttgatgtcatacgactatcaacttacagaacagcctgcaaattacgatttgtacaaaaacgatgcaaccttcatcttgttgatatctggaacatgattgaagccttccgagacaatggccttaatacactggaccataccaccgagatcagtgtgtcccgcctcgaaactgtcatctcctccatctactatcagttgaacaagcgccttccttctactcaccaaattagtgtggaacaatctatcagcctcctcctcaactttatgattgctgcatatgacagtgagggccgaggcaagttgacggtattttcagttaaagctatgttagcaaccatgtgtggtggaaaaatgctggacaaattgagatatgttttctcccagatgtcagattccaatggcttaatgatatttagcaagtttgaccagtttctgaaggaagttctgaagctcccaacagctgtctttgaagggccatcttttggttacacagagcactcagtccgcacctgttttccacagcagagaaagataatgctaaatatgtttttagacacaatgatggctgaccctcctccccagtgccttgtctggctacctctcatgcacaggcttgcccatgttgagaatgtcttccatcccgtggagtgctcctactgccgatgtgagagtatgatgggtttccggtaccgatgccagcagtgccacaactatcagctctgccagaattgcttttggcgtggccatgccggcggccctcacagcaaccagcaccagatgaaggagcattcctcttggaaatctcctgcaaagaagctgagccatgcaattagtaaatctttggggtgtgtacccacgagagaacccccgcatcctgtttttcctgagcaaccagagaaaccacttgaccttgcacatatagttcctcctcgccctctgactaatatgaatgacaccatggttagccacatgtcctctggagtgcccactcccaccaagagtgttctggacagtcctagccgactggatgaggaacaccgtcttatagctcgctatgctgcccggctggctgcagaagcaggaaacgtgactcgtcctcccactgacttgagctttaactttgatgccaacaaacaacaaagacagcttattgcagaactggaaaacaaaaacagagagatcctgcaggagattcagcgtctccgcctggaacacgagcaggcctcccagcccacccctgagaaggcacagcagaaccccacgctgctggcagagctgcggctgctgaggcaaaggaaggatgaactggagcagaggatgtcggccctgcaggagagcaggcgggagctgatggtccagctggaagagctgatgaagttgctgaaggaggaagagcaaaagcaggcagctcaggccacagggtcaccacatacatcgcccacccatggaggcggccggccaatgcccatgccagtgcgctccacgtctgccggctccacccccacccactgtccgcaggactcgctgagcggagtcgggggagacgtgcaggaggccttcgcacaagcagaggaaggtgcagaggaagaagaagagaagatgcagaatgggaaagacagaggttagcagaggagccggacacagaggaagctcaggcacagaggacgaggagcaagctggcgccgacatggcgaaggcaaggtcttcccccagaggcacattcctctccatctttccaccgcacacctggaccaggcttgcaggctgccagacgtcactccacccgccagggagaggggagccagagccggtgggaagcggggaggggctgcgtggcacagctagtgggcctccccctgcacagccctgcatgtactagcaccttcatcactcccctcagggcatggtctcatctccgcatcaggaattcacctggaggttgaaaagagaaaagaaaaagcaccaaaaaaaaaaaaaaaaaaaaaa

SEQ ID NO: 225 - protein, 567 aa, Homo sapiens
MIEESGNKRKTMAEKRQLFIEMRAQNFDVIRLSTYRTACKLRFVQKRCNLHLVDIWNMIEAFRDNGLNTLDHTTEISVSRLETVISSIYYQLNKRLPSTHQISVEQSISLLLNFMIAAYDSEGRGKLTVFSVKAMLATMCGGKMLDKLRYVFSQMSDSNGLMIFSKFDQFLKEVLKLPTAVFEGPSFGYTEHSVRTCFPQQRKIMLNMFLDTMMADPPPQCLVWLPLMHRLAHVENVFHPVECSYCRCESMMGFRYRCQQCHNYQLCQNCFWRGHAGGPHSNQHQMKEHSSWKSPAKKLSHAISKSLGCVPTREPPHPVFPEQPEKPLDLAHIVPPRPLTNMNDTMVSHMSSGVPTPTKSVLDSPSRLDEEHRLIARYAARLAAEAGNVTRPPTDLSFNFDANKQQRQLIAELENKNREILQEIQRLRLEHEQASQPTPEKAQQNPTLLAELRLLRQRKDELEQRMSALQESRRELMVQLEELMKLLKEEEQKQAAQATGSPHTSPTHGGGRPMPMPVRSTSAGSTPTHCPQDSLSGVGGDVQEAFAQAEEGAEEEEEKMQNGKDRG

SEQ ID NO: 226 - DNA, 2433 bp, Homo sapiens
gggcgcgcgcccgcccatccgccctccgccctccgccctcgcgccctcgcgccgggggcgggcgctgcgcgtgccgggcggagaagcggcgcgagccgggcgctgcgaacgttcgccgcgggggtggctccggggcctgagtaggcgctgccgctgcctcagccgagggggctgggccggagcgtgcggaggagtgaggccgcaggagaccttcccgacgacccctgctccggcggggaagtgagcaaggatgattgaggaaagtgggaacaagcggaagaccatggcagagaagaggcagctgttcatagaaatgcgtgctcagaattttgatgtcatacgactatcaacttacagaacagcctgcaaattacgatttgtacaaaaacgatgcaaccttcatcttgttgatatctggaacatgattgaagccttccgagacaatggccttaatacactggaccataccaccgagatcagtgtgtcccgcctcgaaactgtcatctcctccatctactatcagttgaacaagcgccttccttctactcaccaaattagtgtggaacaatctatcagcctcctcctcaactttatgattgctgcatatgacagtgagggccgaggcaagttgacggtattttcagttaaagctatgttagcaaccatgtgtggtggaaaaatgctggacaaattgagatatgttttctcccagatgtcagattccaatggcttaatgatatttagcaagtttgaccagtttctgaaggaagttctgaagctcccaacagctgtctttgaagggccatcttttggttacacagagcactcagtccgcacctgttttccacagcagagaaagataatgctaaatatgtttttagacacaatgatggctgaccctcctccccagtgccttgtctggctacctctcatgcacaggcttgcccatgttgagaatgtcttccatcccgtggagtgctcctactgccgatgtgagagtatgatgggtttccggtaccgatgccagcagtgccacaactatcagctctgccagaattgcttttggcgtggccatgccggcggccctcacagcaaccagcaccagatgaaggagcattcctcttggaaatctcctgcaaagaagctgagccatgcaattagtaaatctttggggtgtgtacccacgagagaacccccgcatcctgtttttcctgagcaaccagagaaaccacttgaccttgcacatatagttcctcctcgccctctgactaatatgaatgacaccatggttagccacatgtcctctggagtgcccactcccaccaagaggttacagtatagccaggatatacccagtcacttggccgatgagcatgcgctgatagcctcctatgtggcccgtctgcagcactgtgcacgtgttctggacagtcctagccgactggatgaggaacaccgtcttatagctcgctatgctgcccggctggctgcagaagcaggaaacgtgactcgtcctcccactgacttgagctttaactttgatgccaacaaacaacaaagacagcttattgcagaactggaaaacaaaaacagagagatcctgcaggagattcagcgtctccgcctggaacacgagcaggcctcccagcccacccctgagaaggcacagcagaaccccacgctgctggcagagctgcggctgctgaggcaaaggaaggatgaactggagcagaggatgtcggccctgcaggagagcaggcgggagctgatggtccagctggaagagctgatgaagttgctgaaggaggaagagcaaaagcaggcagctcaggccacagggtcaccacatacatcgcccacccatggaggcggccggccaatgcccatgccagtgcgctccacgtctgccggctccacccccacccactgtccgcaggactcgctgagcggagtcgggggagacgtgcaggaggccttcgcacaaggtacgaggagaaacctccgcaatgacctgctggtggcagctgactccatcaccaacaccatgtcatccctggtgaaggagctccattcaggttagcagaggagccggacacagaggaagctcaggcacagaggacgaggagcaagctggcgccgacatggcgaaggcaaggtcttcccccagaggcacattcctctccatctttccaccgcacacctggaccaggcttgcaggctgccagacgtcactccacccgccagggagaggggagccagagccggtgggaagcggggaggggctgcgtggcacagctagtgggcctccccctgcacagccctgcatgtactagcaccttcatcactcccctcagggcatggtctcatctccgcatcaggaattcacctggaggttgaaaagagaaaagaaaaagcaccaaaaaaaaaaaaaaa

SEQ ID NO: 227 - protein, 609 aa, Homo sapiens
MIEESGNKRKTMAEKRQLFIEMRAQNFDVIRLSTYRTACKLRFVQKRCNLHLVDIWNMIEAFRDNGLNTLDHTTEISVSRLETVISSIYYQLNKRLPSTHQISVEQSISLLLNFMIAAYDSEGRGKLTVFSVKAMLATMCGGKMLDKLRYVFSQMSDSNGLMIFSKFDQFLKEVLKLPTAVFEGPSFGYTEHSVRTCFPQQRKIMLNMFLDTMMADPPPQCLVWLPLMHRLAHVENVFHPVECSYCRCESMMGFRYRCQQCHNYQLCQNCFWRGHAGGPHSNQHQMKEHSSWKSPAKKLSHAISKSLGCVPTREPPHPVFPEQPEKPLDLAHIVPPRPLTNMNDTMVSHMSSGVPTPTKRLQYSQDIPSHLADEHALIASYVARLQHCARVLDSPSRLDEEHRLIARYAARLAAEAGNVTRPPTDLSFNFDANKQQRQLIAELENKNREILQEIQRLRLEHEQASQPTPEKAQQNPTLLAELRLLRQRKDELEQRMSALQESRRELMVQLEELMKLLKEEEQKQAAQATGSPHTSPTHGGGRPMPMPVRSTSAGSTPTHCPQDSLSGVGGDVQEAFAQGTRRNLRNDLLVAADSITNTMSSLVKELHSG

SEQ ID NO: 228 - DNA, 2315 bp, Homo sapiens
gggcgcgcgcccgcccatccgccctccgccctccgccctcgcgccctcgcgccgggggcgggcgctgcgcgtgccgggcggagaagcggcgcgagccgggcgctgcgaacgttcgccgcgggggtggctccggggcctgagtaggcgctgccgctgcctcagccgagggggctgggccggagcgtgcggaggagtgaggccgcaggagaccttcccgacgacccctgctccggcggggaagtgagcaaggatgattgaggaaagtgggaacaagcggaagaccatggcagagaagaggcagctgttcatagaaatgcgtgctcagaattttgatgtcatacgactatcaacttacagaacagcctgcaaattacgatttgtacaaaaacgatgcaaccttcatcttgttgatatctggaacatgattgaagccttccgagacaatggccttaatacactggaccataccaccgagatcagtgtgtcccgcctcgaaactgtcatctcctccatctactatcagttgaacaagcgccttccttctactcaccaaattagtgtggaacaatctatcagcctcctcctcaactttatgattgctgcatatgacagtgagggccgaggcaagttgacggtattttcagttaaagctatgttagcaaccatgtgtggtggaaaaatgctggacaaattgagatatgttttctcccagatgtcagattccaatggcttaatgatatttagcaagtttgaccagtttctgaaggaagttctgaagctcccaacagctgtctttgaagggccatcttttggttacacagagcactcagtccgcacctgttttccacagcagagaaagataatgctaaatatgtttttagacacaatgatggctgaccctcctccccagtgccttgtctggctacctctcatgcacaggcttgcccatgttgagaatgtcttccatcccgtggagtgctcctactgccgatgtgagagtatgatgggtttccggtaccgatgccagcagtgccacaactatcagctctgccagaattgcttttggcgtggccatgccggcggccctcacagcaaccagcaccagatgaaggagcattcctcttggaaatctcctgcaaagaagctgagccatgcaattagtaaatctttggggtgtgtacccacgagagaacccccgcatcctgtttttcctgagcaaccagagaaaccacttgaccttgcacatatagttcctcctcgccctctgactaatatgaatgacaccatggttagccacatgtcctctggagtgcccactcccaccaagagtgttctggacagtcctagccgactggatgaggaacaccgtcttatagctcgctatgctgcccggctggctgcagaagcaggaaacgtgactcgtcctcccactgacttgagctttaactttgatgccaacaaacaacaaagacagcttattgcagaactggaaaacaaaaacagagagatcctgcaggagattcagcgtctccgcctggaacacgagcaggcctcccagcccacccctgagaaggcacagcagaaccccacgctgctggcagagctgcggctgctgaggcaaaggaaggatgaactggagcagaggatgtcggccctgcaggagagcaggcgggagctgatggtccagctggaagagctgatgaagttgctgaaggctcaggccacagggtcaccacatacatcgcccacccatggaggcggccggccaatgcccatgccagtgcgctccacgtctgccggctccacccccacccactgtccgcaggactcgctgagcggagtcgggggagacgtgcaggaggccttcgcacaagcagaggaaggtgcagaggaagaagaagagaagatgcagaatgggaaagacagaggttagcagaggagccggacacagaggaagctcaggcacagaggacgaggagcaagctggcgccgacatggcgaaggcaaggtcttcccccagaggcacattcctctccatctttccaccgcacacctggaccaggcttgcaggctgccagacgtcactccacccgccagggagaggggagccagagccggtgggaagcggggaggggctgcgtggcacagctagtgggcctccccctgcacagccctgcatgtactagcaccttcatcactcccctcagggcatggtctcatctccgcatcaggaattcacctggaggttgaaaagagaaaagaaaaagcaccaaaaaaaaaaaaaaaaaaaaaaaaaaaaaaaaaaaaaaaaaaaa

SEQ ID NO: 229 - protein, 560 aa, Homo sapiens
MIEESGNKRKTMAEKRQLFIEMRAQNFDVIRLSTYRTACKLRFVQKRCNLHLVDIWNMIEAFRDNGLNTLDHTTEISVSRLETVISSIYYQLNKRLPSTHQISVEQSISLLLNFMIAAYDSEGRGKLTVFSVKAMLATMCGGKMLDKLRYVFSQMSDSNGLMIFSKFDQFLKEVLKLPTAVFEGPSFGYTEHSVRTCFPQQRKIMLNMFLDTMMADPPPQCLVWLPLMHRLAHVENVFHPVECSYCRCESMMGFRYRCQQCHNYQLCQNCFWRGHAGGPHSNQHQMKEHSSWKSPAKKLSHAISKSLGCVPTREPPHPVFPEQPEKPLDLAHIVPPRPLTNMNDTMVSHMSSGVPTPTKSVLDSPSRLDEEHRLIARYAARLAAEAGNVTRPPTDLSFNFDANKQQRQLIAELENKNREILQEIQRLRLEHEQASQPTPEKAQQNPTLLAELRLLRQRKDELEQRMSALQESRRELMVQLEELMKLLKAQATGSPHTSPTHGGGRPMPMPVRSTSAGSTPTHCPQDSLSGVGGDVQEAFAQAEEGAEEEEEKMQNGKDRG

SEQ ID NO: 230 - DNA, 1985 bp, Homo sapiens
cacatgcagcttgagcattcagtcttctgacctgttccacctctacagggcattttatggcttaaggatgacggcctagaagggaagggagagacttactttggattaaatttacaatgggaaagtgcttaagctgctgcaaagaggaccagagcttccaacgatgttctccagaagatcaagttagtacagacgcccagcatcgtggagcctcttctatttcacaaccaagtatatctcttggtcataaaacatcttattcccctgtaacacataaagtcaatgcagccaaagcaagtagaaggttattatctgtatcaagtccatctttctctgaaagaagatattctttatttgttggatttcaaaaaagaaatgcttccccttactggcaacaaagtagagctaactttgattctgaagaagacacaggcttcactgatataaaatcttcctcagaccattgtggtagctttatttcccgcagaagacgtttctcatcccgtaaactaagtatagtttcctattacaagagtgccattttttttgatcctcaagcaagtggccagaatgtgtttaatctaaatgaaatcgaaatcttttctaaaacttcaagtaatactgatgctaaaaaacatataaccatctctgctcctgaatataacactaaaaattttaagaattttgaaacaaacactacttctccagcctttgggaacactattgatacagcctcctatcaacaaagcacatcatccttcttttctcttgcaagtgatatttcctctcccgatcaacaaaatggaattgccaatgatattcaacaaaggggccaattatgtaaagatttaaaagatttccttcatcctcgtcctgaaagttacagcacagatcattctccaatcatgattccacagcatccctctcaaagtggaactttcccattcctccataaagctggattttcttcatcttataaaaattctggttgctttatcccacctcaaagcgaattaacttcaggcctgtttgaagatgaagactttgctgtcttgtttcaagatgaagacagatcttcacctattgaaattcctaaaataaggtatattacagctaatactgacacagaagaacagagttttccagtccctaaggcatttaacacacgtgtagaggaattaaatttagatgtccttcttcagaaggtagatcatttacgtatgagtgagtctggcaagtcggagagttttgaactacttcgtgaccacaaagaaaagtttagagatgaaatagagtttatgtggcgatttgctcgtgcttatggagacatgtatgaactatctacaaacacacaagaaaagaaacattatgctaatattggaaaaactttaagtgaaagagctattaatagagcacccatgaatggacattgtcatctgtggtatgcagttttgtgtggctatgtatctgagtttgagggtttacaaaacaaaatcaactatgggcacctcttcaaggaacatctagatatagcaatcaaacttttaccagaggaaccctttctatattacctcaaagggagatactgctatactgtctcaaaactgagctggattgagaaaaaaatggctgctactctgtttggaaaaataccatcttcaactgtacaagaagctttacacaatttccttaaggctgaagaactatgccctggttattctaatcccaattacatgtacttagcaaagtgttatactgatcttgaggaaaaccagaatgctttgaagttctgtaatttggctttattgcttcctactgttaccaaagaggagctgtagtctggaagataaagagcctttggtaccgcaagccctgtcatctgtgagtgtggcacagtgaaggcctggagagtcatgacctaggccctgtgaagtcaagtatttttaccaagtaaaaagattggcaataaaacatttccacatagt

SEQ ID NO: 231 - protein, 573 aa, Homo sapiens
MGKCLSCCKEDQSFQRCSPEDQVSTDAQHRGASSISQPSISLGHKTSYSPVTHKVNAAKASRRLLSVSSPSFSERRYSLFVGFQKRNASPYWQQSRANFDSEEDTGFTDIKSSSDHCGSFISRRRRFSSRKLSIVSYYKSAIFFDPQASGQNVFNLNEIEIFSKTSSNTDAKKHITISAPEYNTKNFKNFETNTTSPAFGNTIDTASYQQSTSSFFSLASDISSPDQQNGIANDIQQRGQLCKDLKDFLHPRPESYSTDHSPIMIPQHPSQSGTFPFLHKAGFSSSYKNSGCFIPPQSELTSGLFEDEDFAVLFQDEDRSSPIEIPKIRYITANTDTEEQSFPVPKAFNTRVEELNLDVLLQKVDHLRMSESGKSESFELLRDHKEKFRDEIEFMWRFARAYGDMYELSTNTQEKKHYANIGKTLSERAINRAPMNGHCHLWYAVLCGYVSEFEGLQNKINYGHLFKEHLDIAIKLLPEEPFLYYLKGRYCYTVSKLSWIEKKMAATLFGKIPSSTVQEALHNFLKAEELCPGYSNPNYMYLAKCYTDLEENQNALKFCNLALLLPTVTKEEL

SEQ ID NO: 232 - DNA, 5128 bp, Homo sapiens
actctggagtgggagtgggagcgagcgcttctgcgactccagttgtgagagccgcaagggcatgggaattgacgccactcaccgacccccagtctcaatctcaacgctgtgaggaaacctcgactttgccaggtccccaagggcagcggggctcggcgagcgaggcacccttctccgtccccatcccaatccaagcgctcctggcactgacgacgccaagagactcgagtgggagttaaagcttccagtgagggcagcaggtgtccaggccgggcctgcgggttcctgttgacgtcttgccctaggcaaaggtcccagttccttctcggagccggctgtcccgcgccactggaaaccgcacctccccgcagcatgggcaccagcctcagcccgaacgacccttggccgctaaacccgctgtccatccagcagaccacgctcctgctactcctgtcggtgctggccactgtgcatgtgggccagcggctgctgaggcaacggaggcggcagctccggtccgcgcccccgggcccgtttgcgtggccactgatcggaaacgcggcggcggtgggccaggcggctcacctctcgttcgctcgcctggcgcggcgctacggcgacgttttccagatccgcctgggcagctgccccatagtggtgctgaatggcgagcgcgccatccaccaggccctggtgcagcagggctcggccttcgccgaccggccggccttcgcctccttccgtgtggtgtccggcggccgcagcatggctttcggccactactcggagcactggaaggtgcagcggcgcgcagcccacagcatgatgcgcaacttcttcacgcgccagccgcgcagccgccaagtcctcgagggccacgtgctgagcgaggcgcgcgagctggtggcgctgctggtgcgcggcagcgcggacggcgccttcctcgacccgaggccgctgaccgtcgtggccgtggccaacgtcatgagtgccgtgtgtttcggctgccgctacagccacgacgaccccgagttccgtgagctgctcagccacaacgaagagttcgggcgcacggtgggcgcgggcagcctggtggacgtgatgccctggctgcagtacttccccaacccggtgcgcaccgttttccgcgaattcgagcagctcaaccgcaacttcagcaacttcatcctggacaagttcttgaggcactgcgaaagccttcggcccggggccgccccccgcgacatgatggacgcctttatcctctctgcggaaaagaaggcggccggggactcgcacggtggtggcgcgcggctggatttggagaacgtaccggccactatcactgacatcttcggcgccagccaggacaccctgtccaccgcgctgcagtggctgctcctcctcttcaccaggtatcctgatgtgcagactcgagtgcaggcagaattggatcaggtcgtggggagggaccgtctgccttgtatgggtgaccagcccaacctgccctatgtcctggccttcctttatgaagccatgcgcttctccagctttgtgcctgtcactattcctcatgccaccactgccaacacctctgtcttgggctaccacattcccaaggacactgtggtttttgtcaaccagtggtctgtgaatcatgacccagtgaagtggcctaacccggagaactttgatccagctcgattcttggacaaggatggcctcatcaacaaggacctgaccagcagagtgatgattttttcagtgggcaaaaggcggtgcattggcgaagaactttctaagatgcagctttttctcttcatctccatcctggctcaccagtgcgatttcagggccaacccaaatgagcctgcgaaaatgaatttcagttatggtctaaccattaaacccaagtcatttaaagtcaatgtcactctcagagagtccatggagctccttgatagtgctgtccaaaatttacaagccaaggaaacttgccaataagaagcaagaggcaagctgaaattttagaaatattcacatcttcggagatgaggagtaaaattcagtttttttccagttcctcttttgtgctgcttctcaattagcgtttaaggtgagcataaatcaactgtccatcaggtgaggtgtgctccatacccagcggttcttcatgagtagtgggctatgcaggagcttctgggagatttttttgagtcaaagacttaaagggcccaatgaattattatatacatactgcatcttggttatttctgaaggtagcattctttggagttaaaatgcacatatagacacatacacccaaacacttacaccaaactactgaatgaagaagtattttggtaaccaggccatttttggtgggaatccaagattggtctcccatatgcagaaatagacaaaaagtatattaaacaaagtttcagagtatattgttgaagagacagagacaagtaatttcagtgtaaagtgtgtgattgaaggtgataagggaaaagataaagaccagaaattcccttttcaccttttcaggaaaataacttagactctagtatttatgggtggatttatccttttgccttctggtatacttccttacttttaaggataaatcataaagtcagttgctcaaaaagaaatcaatagttgaattagtgagtatagtggggttccatgagttatcatgaattttaaagtatgcattattaaattgtaaaactccaaggtgatgttgtacctcttttgcttgccaaagtacagaatttgaattatcagcaaagaaaaaaaaaaaagccagccaagctttaaattatgtgaccataatgtactgatttcagtaagtctcataggttaaaaaaaaaagtcaccaaatagtgtgaaatatattacttaactgtccgtaagcagtatattagtattatcttgttcaggaaaaggttgaataatatatgccttgtgtaatattgaaaattgaaaagtacaactaacgcaaccaagtgtgctaaaaatgagcttgattaaatcaaccacctatttttgacatggaaatgaagcagggtttcttttcttcactcaaattttggcgaatctcaaaattagatcctaagatgtgttcttatttttataacatctttattgaaattctatttataatacagaatcttgttttgaaaataacctaattaatatattaaaattccaaattcatggcatgcttaaattttaactaaattttaaagccattctgattattgagttccagttgaagttagtggaaatctgaacattctcctgtggaaggcagagaaatctaagctgtgtctgcccaatgaataatggaaaatgccatgaattacctggatgttctttttacgaggtgacaagagttggggacagaactcccattacaactgaccaagtttctcttctagatgattttttgaaagttaacattaatgcctgctttttggaaagtcagaatcagaagatagtcttggaagctgtttggaaaagacagtggagatgaggtcagttgtgttttttaagatggcaattactttggtagctgggaaagcataaagctcaaatgaaatgtatgcattcacatttagaaaagtgaattgaagtttcaagttttaaagttcattgcaattaaacttccaaagaaagttctacagtgtcctaagtgctaagtgcttattacattttattaagctttttggaatctttgtaccaaaattttaaaaaagggagtttttgatagttgtgtgtatgtgtgtgtggggtggggggatggtaagagaaaagagagaaacactgaaaagaaggaaagatggttaaacattttcccactcattctgaattaattaatttggagcacaaaattcaaagcatggacatttagaagaaagatgtttggcgtagcagagttaaatctcaaataggctattaaaaaagtctacaacatagcagatctgttttgtggtttggaatattaaaaaacttcatgtaattttattttaaaatttcatagctgtacttcttgaatataaaaaatcatgccagtatttttaaaggcattagagtcaactacacaaagcaggcttgcccagtacatttaaattttttggcacttgccattccaaaatattatgccccaccaaggctgagacagtgaatttgggctgctgtagcctatttttttagattgagaaatgtgtagctgcaaaaataatcatgaaccaatctggatgcctcattatgtcaaccaggtccagatgtgctataatctgtttttacgtatgtaggcccagtcgtcatcagatgcttgcggcaaaagaaagctgtgtttatatggaagaaagtaaggtgcttggagtttacctggcttatttaatatgcttataacctagttaaagaaaggaaaagaaaacaaaaaacgaatgaaaataactgaatttggaggctggagtaatcagattactgctttaatcagaaaccctcattgtgtttctaccggagagagaatgtatttgctgacaaccattaaagtcagaagttttactccaggttattgcaataaagtataatgtttattaaatgcttcatttgtatgtcaaagctttgactctataagcaaattgcttttttccaaaacaaaaagatgtctcaggtttgttttgtgaattttctaaaagctttcatgtcccagaacttagcctttacctgtgaagtgttactacagccttaatattttcctagtagatctatattagatcaaatagttgcatagcagtatatgttaatttgtgtgtttttagctgtgacacaactgtgtgattaaaaggtatactttagtagacatttataactcaaggataccttcttatttaatcttttcttatttttgtactttatcatgaatgcttttagtgtgtgcataatagctacagtgcatagttgtagacaaagtacattctggggaaacaacatttatatgtagcctttactgtttgatataccaaattaaaaaaaaattgtatctcattacttatactgggacaccattaccaaaataataaaaatcactttcataatcttgaaaaaa

SEQ ID NO: 233 - protein, 543 aa, Homo sapiens
MGTSLSPNDPWPLNPLSIQQTTLLLLLSVLATVHVGQRLLRQRRRQLRSAPPGPFAWPLIGNAAAVGQAAHLSFARLARRYGDVFQIRLGSCPIVVLNGERAIHQALVQQGSAFADRPAFASFRVVSGGRSMAFGHYSEHWKVQRRAAHSMMRNFFTRQPRSRQVLEGHVLSEARELVALLVRGSADGAFLDPRPLTVVAVANVMSAVCFGCRYSHDDPEFRELLSHNEEFGRTVGAGSLVDVMPWLQYFPNPVRTVFREFEQLNRNFSNFILDKFLRHCESLRPGAAPRDMMDAFILSAEKKAAGDSHGGGARLDLENVPATITDIFGASQDTLSTALQWLLLLFTRYPDVQTRVQAELDQVVGRDRLPCMGDQPNLPYVLAFLYEAMRFSSFVPVTIPHATTANTSVLGYHIPKDTVVFVNQWSVNHDPVKWPNPENFDPARFLDKDGLINKDLTSRVMIFSVGKRRCIGEELSKMQLFLFISILAHQCDFRANPNEPAKMNFSYGLTIKPKSFKVNVTLRESMELLDSAVQNLQAKETCQ

SEQ ID NO: 234 - DNA, 5537 bp, Homo sapiens
gaacccggcgaggaaatacatgcactggctgagaatcgcccgcgccagggcgcaacgccacaaggtgtagggagtgtgcggggtggggcgaaaggggacccaagagtccctgtggctcggagtgccgggccgtcggttcttcattcctgccctcggggcagacggagtgaccccggcccccactccccgccccgaccatggtagtgttcaatggccttcttaagatcaaaatctgcgaggccgtgagcttgaagcccacagcctggtcgctgcgccatgcggtgggaccccggccgcagactttccttctcgacccctacattgccctcaatgtggacgactcgcgcatcggccaaacggccaccaagcagaagaccaacagcccggcctggcacgacgagttcgtcaccgatgtgtgcaacggacgcaagatcgagctggctgtctttcacgatgcccccataggctacgacgacttcgtggccaactgcaccatccagtttgaggagctgctgcagaacgggagccgccacttcgaggactggattgatctggagccagaaggaagagtgtatgtgatcatcgatctctcagggtcgtcgggtgaagcccctaaagacaatgaagagcgtgtgttcagggaacgcatgcggccgaggaagcggcagggggccgtcaggcgcagggtccatcaggtcaacggccacaagttcatggccacctatcttcggcagcccacctactgctcccattgcagagacttcatctggggtgtcataggaaagcagggataccagtgtcaagtctgcacctgcgtggtccacaagcggtgccacgagctcataatcacaaagtgtgctgggttaaagaagcaggagacccccgaccaggtgggctcccagcggttcagcgtcaacatgccccacaagttcggtatccacaactacaaggtccctaccttctgcgatcactgtgggtccctgctctggggactcttgcggcagggtttgcagtgtaaagtctgcaaaatgaatgttcaccgtcgatgtgagaccaacgtggctcccaactgtggagtggatgccagaggaatcgccaaagtactggccgacctgggcgttaccccagacaaaatcaccaacagcggccagagaaggaaaaagctcattgctggtgccgagtccccgcagcctgcttctggaagctcaccatctgaggaagatcgatccaagtcagcacccacctccccttgtgaccaggaaataaaagaacttgagaacaacattcggaaagccttgtcatttgacaaccgaggagaggagcaccgggcagcatcgtctcctgatggccagctgatgagccccggtgagaatggcgaagtccggcaaggccaggccaagcgcctgggcctggatgagttcaacttcatcaaggtgttgggcaaaggcagctttggcaaggtcatgttggcagaactcaagggcaaagatgaagtatatgctgtgaaggtcttaaagaaggacgtcatccttcaggatgatgacgtggactgcacaatgacagagaagaggattttggctctggcacggaaacacccgtaccttacccaactctactgctgcttccagaccaaggaccgcctctttttcgtcatggaatatgtaaatggtggagacctcatgtttcagattcagcgctcccgaaaattcgacgagcctcgttcacggttctatgctgcagaggtcacatcggccctcatgttcctccaccagcatggagtcatctacagggatttgaaactggacaacatccttctggatgcagaaggtcactgcaagctggctgacttcgggatgtgcaaggaagggattctgaatggtgtgacgaccaccacgttctgtgggactcctgactacatagctcctgagatcctgcaggagttggagtatggcccctccgtggactggtgggccctgggggtgctgatgtacgagatgatggctggacagcctccctttgaggccgacaatgaggacgacctatttgagtccatcctccatgacgacgtgctgtacccagtctggctcagcaaggaggctgtcagcatcttgaaagctttcatgacgaagaatccccacaagcgcctgggctgtgtggcatcgcagaatggcgaggacgccatcaagcagcacccattcttcaaagagattgactgggtgctcctggagcagaagaagatcaagccacccttcaaaccacgcattaaaaccaaaagagacgtcaataattttgaccaagactttacccgggaagagccggtactcacccttgtggacgaagcaattgtaaagcagatcaaccaggaggaattcaaaggtttctcctactttggtgaagacctgatgccctgagagcccactgcagttggactttgccgatgctgcaagaaggggtgcagagaagactcctgtgttggagacactcagcaggtcttgaactacttctcctcctcggagccccagtcccatgtccactgtctatttattgcattcccttgccccaggccacctcctccccctcccacctggtgaccagaaggcgctctcggttcttgtctcaccagtaatgcagactcattgggtcagcaattagctgtatacactgccgtgtttggaccattggcaagcctggttccactcctcaggggctcctggcagtgaagcaacttcagttcttttactgcaaagaacagaaaaaagaaagaaagcaaacaagaagactccggctctgctatcggacacagatcctgatccctcttgcttcttttccctcctgcaccgcagcttgccatccctgcccttctgtcctggagaagagactggtgcttctccgcacacacgagggagggcgcccttgaggcatgccctctgagggagggagaccagagatgcagggattggccagctgggttggtttgctctggaatggctaactcttgcctgctttggttttagcttttcagcatgccaaagtcatgtaagtttgtgtcttgtggaagaaatcctctttgtggaaaaagaaacagggttttgaactctgttaacatttgaaaaatatattttcaaattcactttctaattggccaaaagagatgagttccagtctgaatacaggtagatattaaagggctaataaaaaatgagaaaccggtcgtccaaggtggatgctgtcaatgcccgagtgacacatgagagctgtatgaattgagagaaaaggcaacaagtagcattcttcatcattcaagttctacctggacacaaaggcgaggaccctggggttccaacaaagctcagctcccagattctctttccagtttcatcctaagttcctagcataaacactatttattttctgcagcagtgtgttatttttgcgcacttatacaaaatggtagtactactgtgttgtggtttttaaacattaaacatgtaaagttatatacgaaatatctgcttttggaataagcagaatgaggctaaacatgggttatacaaagggtatctggaaactgaagagcaacttgttagaaaactgacaatgtcgcaagatgtactcagttttgtttctgtgtgacatgcaatggcaactcatgtggacactattgaagggatgtgacattacctcctgtagatatgctaacagtgttattctttcatttccaagggttctctgtggctttgtgtatatgtttcccagaggtcatttgattacctaatttactgaactgatttagcagggaatggaatccattccaactattgcacgtggatttcccagctgcccctaaatatatatacttgtgagtggcaaagtggcactaatgaagcttttgccttttgtacatttgagatttttgtatatagtgtttgctgcaaggcctgtggaattaattcgttgcatatagaggtatcaactgctgcatgttcaggcatattataaaactttagtctatgaaagaataattataataatgtccaggtgcaatactctgtaagtctattggttcaagttaccgagagataggtgtgttcctttatgggggatgggggggtgtgttggggattctttgtattgtttatttcattttggtttattttaaaagatgtaaacatatattaagctatattaaatctcacatacagttcttctgtgctctattataccctgatagagatgggggagagaaaggaatgtttttgatggtggtttcaaagctcggacagtaactatcttgagcccattagagagtctgtgtccatatttgcatctggctggtcatagcctttgttactaatgatgacattcagttctcttttgtttttattttttaaaaactcaggtgtaattattatctgttcttaagataattgcaaatattaaatattatgatatatcaattcatgtgtttggcataccagtgaatgatgaagaacatgagattaatttaatttatcttcggtaacttgacattctggagagagactatcttctggagttgagtacaagcacagaaacatctttacggtggcatcatctcattttttaggaagacatgataatactgcccatcatattcatgtgtaactactgttctttcttctgctttcttcaccataataaactttggacaaccaagcaagctctaaccgcaatgccagatggccttgtccgagggcctagtgtttgcacggcagtgggaactgggcctttcctacaggacaactggcaagtttgctgggaagtcaaataatacattccacctggcagctgaaggcagccagtcagtctgtcccagaaagggcccttttcagcacccaaagctgggctggctgggatgcctctggctggtgaagttctcacataggctgatttaaatccagcaaaggtctatagaaaaaggcttgcgtgttcgttgagtaatcattgtttcattttcatttttacgagagtttgaaaatagacacactgttaacacttctgccagttttttctgatctttccagccccaccccctttctctttctctctctctctcaaagaaaaaaaaaatgggagtgcaaaaaaaacaaagccaaaaaatatatgaaggatagctgttcttctgtgttctctcattatggactttgtgaagtagaaacataattttttttcctccaaaggtgaaaaaacaatgcattcttgctttaaaaaaaaaaaagaaggctaaaaaattacctctttttaaattatgtgcaaaataattctggctaactgtaaaatgtattcaattttaggattttttttttttgtattgtgatgctttatttgtacatttttttcctttctggatgtaattttaatctcttgccattcattagtgttatttcattgtaaacgttattgtgccaaatgtactgtattcaaaaggatgtgaatgtgtattgtttcagaacctaataaatacaatgacgttaagtcttaaaaaaaaaaaaaaaaaa

SEQ ID NO: 235 - protein, 737 aa, Homo sapiens
MVVFNGLLKIKICEAVSLKPTAWSLRHAVGPRPQTFLLDPYIALNVDDSRIGQTATKQKTNSPAWHDEFVTDVCNGRKIELAVFHDAPIGYDDFVANCTIQFEELLQNGSRHFEDWIDLEPEGRVYVIIDLSGSSGEAPKDNEERVFRERMRPRKRQGAVRRRVHQVNGHKFMATYLRQPTYCSHCRDFIWGVIGKQGYQCQVCTCVVHKRCHELIITKCAGLKKQETPDQVGSQRFSVNMPHKFGIHNYKVPTFCDHCGSLLWGLLRQGLQCKVCKMNVHRRCETNVAPNCGVDARGIAKVLADLGVTPDKITNSGQRRKKLIAGAESPQPASGSSPSEEDRSKSAPTSPCDQEIKELENNIRKALSFDNRGEEHRAASSPDGQLMSPGENGEVRQGQAKRLGLDEFNFIKVLGKGSFGKVMLAELKGKDEVYAVKVLKKDVILQDDDVDCTMTEKRILALARKHPYLTQLYCCFQTKDRLFFVMEYVNGGDLMFQIQRSRKFDEPRSRFYAAEVTSALMFLHQHGVIYRDLKLDNILLDAEGHCKLADFGMCKEGILNGVTTTTFCGTPDYIAPEILQELEYGPSVDWWALGVLMYEMMAGQPPFEADNEDDLFESILHDDVLYPVWLSKEAVSILKAFMTKNPHKRLGCVASQNGEDAIKQHPFFKEIDWVLLEQKKIKPPFKPRIKTKRDVNNFDQDFTREEPVLTLVDEAIVKQINQEEFKGFSYFGEDLMP

SEQ ID NO: 236 - DNA, 200 bp, Homo sapiens
ggccgggcgcggtggctcacgcctgtaatcccagctctcagggaggctaagaggcgggaggatagcttgagcccaggagttcgagacctgcctgggcaatatagcgagaccccgttctccagaaaaaggaaaaaaaaaaacaaaagacaaaaaaaaaataagcgtaacttccctcaaagcaacaaccccccccccccttt

SEQ ID NO: 237 - DNA, 7505 bp, Homo sapiens
ctctctctctctctctctctctctctttctttctttccgatggggaagagagggtggtgacaagttagaagcgcttgcggaaggtccccgcccccaggatcaggctccccctgcaaggggacgatgcaaaggtaaaagcacctcgctccgcagcatccagacctggaggggctgcgaccacgggccgagcccacccattccccagccaaaggacgggcccgccgctctccatggtactgcggagagctcagctccgcccttctctttcagaaggacagcacccggcgtcacgtaacccagccttctcaggctccaccaccgccttttccttcccagctctttccctctcctccccctcctcctccttctcctcctcctcctcctcctgctcccctccgttgcctgttctcccctcccgcactcctggagatagacgctcaagcctgacgcctctgaaaaggcagcagcagtcgccttatccatagacctcaggaaattcgctttgaccgatgcatgcttcaggctctggctcgagctgaggggaataaccgggcagatgtctgagtccttaaaaaagacaagataaaaccaaaatgcatcaccaacacacaaccaattgatgtgctggcatcttagcttggccctgcagaggcagagagaaaagaagaggagctgttgcgatttccacatctaacagcttctggctatttcgcaactgctgggtttgagtcctactgttgccgtggctgaaaagagaagtaaaatccaacttgtgagaccacgcacaaggaattaggctttggctgcagcggtgctgaagcccatgctatgacagaagaagcaggcctttgaagctatcctcgggttaagaaatggtgccctaaagaggcaagcatccctttctccgttctgctgtaagacaccacatctgaaggagacagacttgaggcattcacaagcatccaaggatactggctcactgctggcttcctgtactttcttgagaaaagtgttttctttttactgactctcactgcttccttttggcctggtaccactggtggaacctggcagataatgggatttgaggagttaagtatctgttgacactgcagatactcttaaattagttaatcagactcaaatgggtcagtgctttcccttgatcttttgttgaagccttttccagaacgttgtctccaaagtgcatcctccctttggtctggaagttctgtggctaccctgtaccactggggtcaacgttttccagttggaagaggactacagggagagagggcggggttattggaagaagaagaagaaaaaaagaactagataaaggagggcacatccctctcactcccgcctttccccttacctttctgtctctcgggacccttatttcttcgtcacggtgtccaggaccattttgaccctgtcggccccggcacccccccgccgcaccccagccccgagcatggggacggcgctgctccagcgcgggggctgttttcttctgtgcctctcgctgctgctcctgggctgctgggcggagctgggcagcgggctggagtttccgggcgccgagggccaatggacgcgcttccccaagtggaacgcctgctgcgagagcgagatgagcttccagctcaagactcgcagcgcccgcggcctcgtgctctacttcgacgacgagggcttctgcgacttcctggagctgattctgacgcgcggcggccgcctgcagctcagcttctccatcttctgcgctgagcctgcgacgctcctggccgacacgccggttaacgacggcgcctggcacagcgtgcgcatccgccgccagttccgcaacaccacgctcttcatcgaccaggtggaggccaagtgggtggaggtcaagtccaagcgcagggacatgacggtgttcagcggccttttcgtcggggggctgcccccggaactgcgcgccgcggcgctcaagctcaccctggcctcggtgagggagcgggagcccttcaaggggtggattcgtgacgtgagggtcaactcctcgcaggtcctgcccgtggacagcggcgaggtgaagctggacgatgagccgcccaacagcggcgggggaagcccgtgcgaggcgggcgaggagggcgagggcggggtgtgcctcaacggaggtgtgtgctccgtggtggacgaccaggccgtgtgcgactgctcgcgaaccggcttccgcggcaaggactgcagccaagaagacaacaatgtggaaggtctggcgcacctgatgatgggcgaccaaggtaaaagtaaaggaaaagaagaatatattgccacgttcaaaggatctgaatacttctgctacgacttgtctcaaaaccccattcaaagcagcagtgatgaaataactctgtcatttaaaacccttcagaggaatggactgatgcttcacactgggaaatcggctgattatgtcaatcttgccctgaaaaatggagctgtctctctggtcattaatttgggatcaggggcctttgaagcactagtggagcctgtgaatggaaagtttaatgataatgcctggcatgatgtgaaagtcaccaggaatctgcgtcagcactcaggcattggacacgctatggtgacaatatcagtggatgggattcttaccacaacgggctacacgcaagaagattataccatgctggggtctgatgactttttctatgttggaggcagtcccagcacagccgaccttccagggtcaccagtcagtaacaactttatgggctgtctcaaagaggttgtatataaaaataatgatgtgaggctggaattatctcgacttgccaagcaaggagatcctaagatgaagatccatggagtggtggcatttaaatgtgagaatgttgcaactttagacccaatcacctttgaaaccccagagtctttcatctctttgcctaaatggaatgcaaagaaaactggctccatatcatttgatttccgtacaacagagccaaatggcctcatcttatttagccatggcaagccaagacatcagaaagatgccaagcacccacagatgataaaggtggacttctttgctattgagatgctagatggccacctctacctcctcctggacatggggtcaggtactataaaaataaaagccctgttgaagaaagtgaatgatggagaatggtatcatgtggacttccagagagacggacggtcaggtaccatttctgtcaacacgttgcgtactccctacactgctcctggtgagagtgagattctggacctggatgatgagttgtacctgggggggctgccagaaaataaagctggccttgtcttccccaccgaggtgtggactgctctgctcaactatggctacgtgggctgcatcagggatttgttcatcgatggccaaagcaaagatatccggcaaatggctgaagttcaaagtactgctggagtgaagccttcctgctcaaaggaaacagcaaaaccgtgccttagcaacccttgcaaaaacaatggcatgtgcagggatgggtggaacagatatgtctgtgattgttccggaacaggctatcttggcaggtcctgtgagagagaggcaacggttttgagctatgatgggagcatgtttatgaaaattcagctccccgtagtcatgcatacggaggctgaggatgtttccttacggttccgatcccagcgtgcatatggcattctgatggcaaccacttctagagactctgctgacaccctccgcctggagctagacgcaggacgtgtgaaactgacggtcaatctagattgtatcaggattaactgtaattccagcaaaggtcccgagactctttttgctggctataacctcaatgataacgagtggcacacagtgcgtgtagttcggcgtggaaaaagtttaaagttaacagtggatgaccaacaggccatgacaggtcaaatggcaggtgatcatactaggctggagttccataacatagagactggcatcatcacagaacgacggtatctttcttctgtcccctccaacttcattggacacctgcagagcttgacatttaatggaatggcatacattgacctgtgtaaaaatggcgacatagattactgtgagcttaatgccagatttggcttcaggaacatcatagcagatcctgtcaccttcaagaccaaatcgagctatgttgccttagctaccttgcaagcctacacttctatgcatctttttttccagttcaagacaacatccctagatggattaattctatataacagtggggatggaaatgactttattgtggttgaattagttaaagggtacttacattacgtgtttgatttgggaaatggtgctaacctcatcaaaggaagctcaaataaacctctcaatgacaatcagtggcacaacgtgatgatatcaagggacaccagcaacctccacactgtaaagattgacacaaaaatcacaacgcaaatcaccgccggagccaggaacttagacctcaagagtgacttatatataggaggagtagctaaagaaacatacaaatccttaccaaaacttgtacatgccaaagaaggctttcaaggctgcctggcatcagttgatttaaatggacggcttccggacctcatctccgatgctcttttctgcaacggacagatcgagagaggatgtgaagggcccagcacaacctgccaagaggactcatgttccaatcaaggtgtgtgcttgcaacaatgggatggcttcagctgtgactgtagtatgacttccttcagtggaccactctgcaatgaccctgggacgacatatatctttagcaaaggtggtggacaaatcacgtataagtggcctcctaatgaccgacccagtacacgagcagacagactggccataggttttagcactgttcagaaagaagccgtattggtgcgagtggacagttcttcaggcttgggtgactacctagaactgcatatacaccagggaaaaattggagttaagtttaatgttgggacagatgacatcgccattgaagaatccaatgcaatcattaatgatgggaaataccatgtagttcgtttcacgaggagtggtggcaatgccacgttgcaggtggacagctggccagtgatcgagcgctaccctgcagggcgtcagctcacaatcttcaatagccaagcaaccataataattggcgggaaagagcagggccagcccttccagggccagctctctgggctgtactacaatggcttgaaagttctgaatatggcagccgaaaacgatgccaacatcgccatagtgggaaatgtgagactggttggtgaagtgccttcctctatgacaactgagtcaacagccactgccatgcaatcagagatgtccacatcaattatggagactaccacgaccctggctactagcacagccagaagaggaaagcccccgacaaaagaacccattagccagaccacagatgacatccttgtggcctcagcagagtgtcccagcgatgatgaggacattgacccctgtgagccgagctcaggtgggttagccaacccaacccgagcaggcggcagagagccgtatccaggctcagcagaagtgatccgggagtccagcagcaccacgggtatggtcgttgggatagtagccgctgccgccctgtgcatccttatcctcctctatgccatgtacaagtacagaaaccgggatgaaggctcataccatgtggacgagagtcgaaactacatcagtaactcagcacagtccaatggggctgttgtaaaggagaaacaacccagcagtgcgaaaagctccaacaaaaataagaaaaacaaggataaagagtattatgtctgatcccaagatcttaaatggacacttgtatagaaatagtcttcattttatctgagacataatataaacttatttactttcctttttatgaagcacatacaaaagaagacagggaatgcaatcaggaaggaaagactttttaaaaaataaaaacaagtatctcatgctcttgtttctcaaaaaagaaaaacaaaaaacaaaaaacaggggccaataaattccctaacatccacagtgttttcatttactctgcttgtctttatgttgctggaacatttctaaaagacagtgatgaccgcacgcattcataaagcaaaggagtactacagcatcaaggcacaacacaaaaaccaacacaaaacataacacaaaaaagaagctacctatgatcctggatttagccaaagtgctagcgctttcctgagaagtcagtccaattgccagagaagactgtccttttgagtgactcaacctgcaaacctttaagagtttgccgcctggtgcaactggagcagtggttggaacttgcatttgaaacaaagtgctggcttttttgaagacttgtgtaggaacacattcaaaaagcccctttctggttgtgagagaggaaaaaaaagtatggaggccttattttcaaaaatgtgaaatataaggcacgttttcacacaaaatttcaaaacaaaaacaagagggcatagatgcaatcattgggaaattttcatgcacgcttattatgttattacatatgtttatataaaatccatctctgtgtgctttctggactgtgataagtgacgttttatagcctgttgtatagaaaatgcaaaatatatctctgctcttcagccatttttggtaaattcaatgttataagtgttgctaagtatagggagttttatgacatcagagcaacaattatttcagttgggtttttctttttttttgccaccattataaattgccacaattacttttattttttaaagaaattacagtgtagtgtttattctaaggaagatatgtatgaatgtatatacaaagactcagctacttcttttcttatatgtacagccttcattctgttgcaattaagttttagtacttgtatgaaaggtgtgaattagaaagtcacatatatacatatgtatcttataatcttttctccctgaaatactcacattcccacatacattcactattttcacacacacacacacacacacacacacacacacacacacacacacacgaatccacagcaatccatcagatatgctggaagatccaaacgtgcatacagtagcaaatatttattgacaaattgaaaagcaggaaggaagagggttgtgccaaggtattgatgacaaatggggtgatttgcttcattgagatcttgctcccaggtaaccttaagaagattttagtccctaaagaaatgaacctttccttatcaaatagaatatcactgatatactgctgcatgaataagaaccattatgtgggcaggttatggaagcaaaattggttaatctacaccttaactctggctgctgcaattgaaaactttctttctaataaaataatatatatatctctg

SEQ ID NO: 238 - protein, 1477 aa, Homo sapiens
MGTALLQRGGCFLLCLSLLLLGCWAELGSGLEFPGAEGQWTRFPKWNACCESEMSFQLKTRSARGLVLYFDDEGFCDFLELILTRGGRLQLSFSIFCAEPATLLADTPVNDGAWHSVRIRRQFRNTTLFIDQVEAKWVEVKSKRRDMTVFSGLFVGGLPPELRAAALKLTLASVREREPFKGWIRDVRVNSSQVLPVDSGEVKLDDEPPNSGGGSPCEAGEEGEGGVCLNGGVCSVVDDQAVCDCSRTGFRGKDCSQEDNNVEGLAHLMMGDQGKSKGKEEYIATFKGSEYFCYDLSQNPIQSSSDEITLSFKTLQRNGLMLHTGKSADYVNLALKNGAVSLVINLGSGAFEALVEPVNGKFNDNAWHDVKVTRNLRQHSGIGHAMVTISVDGILTTTGYTQEDYTMLGSDDFFYVGGSPSTADLPGSPVSNNFMGCLKEVVYKNNDVRLELSRLAKQGDPKMKIHGVVAFKCENVATLDPITFETPESFISLPKWNAKKTGSISFDFRTTEPNGLILFSHGKPRHQKDAKHPQMIKVDFFAIEMLDGHLYLLLDMGSGTIKIKALLKKVNDGEWYHVDFQRDGRSGTISVNTLRTPYTAPGESEILDLDDELYLGGLPENKAGLVFPTEVWTALLNYGYVGCIRDLFIDGQSKDIRQMAEVQSTAGVKPSCSKETAKPCLSNPCKNNGMCRDGWNRYVCDCSGTGYLGRSCEREATVLSYDGSMFMKIQLPVVMHTEAEDVSLRFRSQRAYGILMATTSRDSADTLRLELDAGRVKLTVNLDCIRINCNSSKGPETLFAGYNLNDNEWHTVRVVRRGKSLKLTVDDQQAMTGQMAGDHTRLEFHNIETGIITERRYLSSVPSNFIGHLQSLTFNGMAYIDLCKNGDIDYCELNARFGFRNIIADPVTFKTKSSYVALATLQAYTSMHLFFQFKTTSLDGLILYNSGDGNDFIVVELVKGYLHYVFDLGNGANLIKGSSNKPLNDNQWHNVMISRDTSNLHTVKIDTKITTQITAGARNLDLKSDLYIGGVAKETYKSLPKLVHAKEGFQGCLASVDLNGRLPDLISDALFCNGQIERGCEGPSTTCQEDSCSNQGVCLQQWDGFSCDCSMTSFSGPLCNDPGTTYIFSKGGGQITYKWPPNDRPSTRADRLAIGFSTVQKEAVLVRVDSSSGLGDYLELHIHQGKIGVKFNVGTDDIAIEESNAIINDGKYHVVRFTRSGGNATLQVDSWPVIERYPAGRQLTIFNSQATIIIGGKEQGQPFQGQLSGLYYNGLKVLNMAAENDANIAIVGNVRLVGEVPSSMTTESTATAMQSEMSTSIMETTTTLATSTARRGKPPTKEPISQTTDDILVASAECPSDDEDIDPCEPSSGGLANPTRAGGREPYPGSAEVIRESSSTTGMVVGIVAAAALCILILLYAMYKYRNRDEGSYHVDESRNYISNSAQSNGAVVKEKQPSSAKSSNKNKKNKDKEYYV

SEQ ID NO: 239 - DNA, 3712 bp, Homo sapiens
ctttttttctttttctttttctttttctgtttctctcccttactccttcgtctgcatcttcttctcagctgcctttccgccgttcgattcccacttccttcagaagggcgcactcttccctctgaacccctcgccgggcgtaagtgtcaggaggcggcggacgcggagattgcctcgggagcaggcgatgcgcgccgctgctccgcgcgctgcccgggggaggctggcgctagcgggcgagccggccggggctgaatggagggaaggggcgcctggattccatggggtctgcttctgtcttgaaaggaggttgggccggcgaagtggcctccctagtccccgcacacaaagctaaatggatttacctagtggattcgcggtggatgtctgtcatgtagaagtgaggaccttccaggaggagctttaaacaatttctcggccccccacccgccggcacgcactctcgcccgaaactctttgggagtatctctcgagaacctggagccctggaaatctgggagcagccacccgctccgcgcttgctgttcccggggctgcctttccggacaagcccctctccagctgcattcgcctcggctatgtttcggattgtttggggtgctaggcacggcggactccaggaccccgagaagactgtccgaaggagggagaggatgggtgccctggcgcggtgaggcggccggcccctcagcccactccgcgccgcccgctcccctgcgccctctcctctccccgcgccccaaactttgcctcccgcggcggctgcccctcggcgggcgccccgccatgtaccagaggatgctccggtgcggcgccgagctgggctcgcccgggggcggcggcggcggcggcggcggcggcggcgcaggggggcgcctggccctgctttggatagtcccgctcaccctcagcggcctcctaggagtggcgtggggggcatccagtttgggagcgcaccacatccaccatttccatggcagcagcaagcatcattcagtgcctattgcaatctacaggtcaccggcatccttgcgaggcggacacgctgggacgacatatatctttagcaaaggtggtggacaaatcacgtataagtggcctcctaatgaccgacccagtacacgagcagacagactggccataggttttagcactgttcagaaagaagccgtattggtgcgagtggacagttcttcaggcttgggtgactacctagaactgcatatacaccagggaaaaattggagttaagtttaatgttgggacagatgacatcgccattgaagaatccaatgcaatcattaatgatgggaaataccatgtagttcgtttcacgaggagtggtggcaatgccacgttgcaggtggacagctggccagtgatcgagcgctaccctgcagggcgtcagctcacaatcttcaatagccaagcaaccataataattggcgggaaagagcagggccagcccttccagggccagctctctgggctgtactacaatggcttgaaagttctgaatatggcagccgaaaacgatgccaacatcgccatagtgggaaatgtgagactggttggtgaagtgccttcctctatgacaactgagtcaacagccactgccatgcaatcagagatgtccacatcaattatggagactaccacgaccctggctactagcacagccagaagaggaaagcccccgacaaaagaacccattagccagaccacagatgacatccttgtggcctcagcagagtgtcccagcgatgatgaggacattgacccctgtgagccgagctcaggtgggttagccaacccaacccgagcaggcggcagagagccgtatccaggctcagcagaagtgatccgggagtccagcagcaccacgggtatggtcgttgggatagtagccgctgccgccctgtgcatccttatcctcctctatgccatgtacaagtacagaaaccgggatgaaggctcataccatgtggacgagagtcgaaactacatcagtaactcagcacagtccaatggggctgttgtaaaggagaaacaacccagcagtgcgaaaagctccaacaaaaataagaaaaacaaggataaagagtattatgtctgatcccaagatcttaaatggacacttgtatagaaatagtcttcattttatctgagacataatataaacttatttactttcctttttatgaagcacatacaaaagaagacagggaatgcaatcaggaaggaaagactttttaaaaaataaaaacaagtatctcatgctcttgtttctcaaaaaagaaaaacaaaaaacaaaaaacaggggccaataaattccctaacatccacagtgttttcatttactctgcttgtctttatgttgctggaacatttctaaaagacagtgatgaccgcacgcattcataaagcaaaggagtactacagcatcaaggcacaacacaaaaaccaacacaaaacataacacaaaaaagaagctacctatgatcctggatttagccaaagtgctagcgctttcctgagaagtcagtccaattgccagagaagactgtccttttgagtgactcaacctgcaaacctttaagagtttgccgcctggtgcaactggagcagtggttggaacttgcatttgaaacaaagtgctggcttttttgaagacttgtgtaggaacacattcaaaaagcccctttctggttgtgagagaggaaaaaaaagtatggaggccttattttcaaaaatgtgaaatataaggcacgttttcacacaaaatttcaaaacaaaaacaagagggcatagatgcaatcattgggaaattttcatgcacgcttattatgttattacatatgtttatataaaatccatctctgtgtgctttctggactgtgataagtgacgttttatagcctgttgtatagaaaatgcaaaatatatctctgctcttcagccatttttggtaaattcaatgttataagtgttgctaagtatagggagttttatgacatcagagcaacaattatttcagttgggtttttctttttttttgccaccattataaattgccacaattacttttattttttaaagaaattacagtgtagtgtttattctaaggaagatatgtatgaatgtatatacaaagactcagctacttcttttcttatatgtacagccttcattctgttgcaattaagttttagtacttgtatgaaaggtgtgaattagaaagtcacatatatacatatgtatcttataatcttttctccctgaaatactcacattcccacatacattcactattttcacacacacacacacacacacacacacacgaatccacagcaatccatcagatatgctggaagatccaaacgtgcatacagtagcaaatatttattgacaaattgaaaagcaggaaggaagagggttgtgccaaggtattgatgacaaatggggtgatttgcttcattgagatcttgctcccaggtaaccttaagaagattttagtccctaaagaaatgaacctttccttatcaaatagaatatcactgatatactgctgcatgaataagaaccattatgtgggcaggttatggaagcaaaattggttaatctacaccttaactctggctgctgcaattgaaaactttctttctaataaaataatatatatatctctg

SEQ ID NO: 240 - protein, 442 aa, Homo sapiens
MYQRMLRCGAELGSPGGGGGGGGGGGAGGRLALLWIVPLTLSGLLGVAWGASSLGAHHIHHFHGSSKHHSVPIAIYRSPASLRGGHAGTTYIFSKGGGQITYKWPPNDRPSTRADRLAIGFSTVQKEAVLVRVDSSSGLGDYLELHIHQGKIGVKFNVGTDDIAIEESNAIINDGKYHVVRFTRSGGNATLQVDSWPVIERYPAGRQLTIFNSQATIIIGGKEQGQPFQGQLSGLYYNGLKVLNMAAENDANIAIVGNVRLVGEVPSSMTTESTATAMQSEMSTSIMETTTTLATSTARRGKPPTKEPISQTTDDILVASAECPSDDEDIDPCEPSSGGLANPTRAGGREPYPGSAEVIRESSSTTGMVVGIVAAAALCILILLYAMYKYRNRDEGSYHVDESRNYISNSAQSNGAVVKEKQPSSAKSSNKNKKNKDKEYYV

SEQ ID NO: 241 - DNA, 2097 bp, Homo sapiens
gaaaaaaacgttgctgattagagctgccgggtcagaaacagctgtgagacactaaagtccccactgttataattattcaatatgttcccactgactgaggaaaacaagcatgtggcccagttgttgctcaatactggtacttgtccaagatgtatcttcagattctgtggtgtggattttcatgcaccttacaaacttccatacaaggagttgctcaatgaactacagaaatttctggaaactgaaaaagatgaattaattttggaagttatgaacccacctcccaagaaaattcgactgcaagaactggaagatagtattgataatctaagtcaaaatggagagggaaggatctctgttagtcatgttggaagcactgcttccaagaactcaaatttaaatgtatgtaatgtatgcctaggaattcttcaagaattctgtgagaaagatttcattaaaaaggtgtgccaaaaggttgaggcctctgggtttgaattcaccagcttggtattttcagtctccttcccaccacaactatctgtaagagagcatgctgcatggttgctggtaaaacaggaaatgggaaagcagagtctgtcgctgggaagagatgatatagttcagctaaaagaagcctacaaatggataactcaccccctgttttcagaggaactgggtgttcccattgatggaaagagcttgcttgaagtgagtgtggtctttgctcacccagaaacagttgaggattgccacttcctagctgcgatatgcccagattgttttaagccagccaaaaacaaacagtctgtattcactagaatggcagttatgaaagccttgaataagataaaggaagaggatttccttaagcagtttccttgtcctccaaactcaccaaaggctgtatgcgctgttcttgaaattgaatgtgctcatggtgctgtttttgtggctgggagatataataaatactccaggaatctaccacaaactccttggataattgatggagaaaggaagctggaatcttcagtggaagaattaatttcagatcatctgttggcagtatttaaagcagagagttttaatttttcatcctctggaagagaagatgtagatgtgagaacattaggaaatggaaggccctttgcaattgagctggtgaatcctcatagagtacatttcacttcacaagaaattaaggaacttcagcagaaaattaataactcatctaacaaaatccaagtacgtgacttgcagcttgtcacaagagaggcaataggacatatgaaagaaggtgaagaagaaaagacaaagacctacagtgccttaatttggacaaataaagcgatacagaagaaagacattgaattcctaaatgacataaaggacttaaagatcgaccagaaaacacctttgcgcgtccttcaccgaaggcccctggctgtgcgagctcgcgtcattcacttcatggagacacagtacgtggatgagcaccacttccgcctccacttgaaaactcaggctggcacctacattaaagagtttgtacatggagacttcgggagaaccaagccaaacattgggtccctgatgaatgtgactgcagacattctggagctggatgttgagtctgtagatgttgactggccacctgctctggatgactagctttcaaatttggagacaaagagtatggttttcctggcatgatgtggacatccatggagcacatgccgtaaaatggctgtttacccaccataacggtgtcttgaaaactatttggatcatgttgatctatataattgttaatttgttgtaacatctcaggatctatatatgtgtatattttgtgttaaattgttccaaggatgtcttaggatttttctcattccctctttcacccccacaaaccaaactatgaataatgaaataattctccttaattctttcatttagagaggtgcacaaacaggacacattctctgttaacctaagaagctgtaatttcagcaagatttccctccacaagagatataccacctttaaaatcatgttctaatttttgtaaattatctgaataaaagttatatctag

SEQ ID NO: 242 - protein, 529 aa, Homo sapiens
MFPLTEENKHVAQLLLNTGTCPRCIFRFCGVDFHAPYKLPYKELLNELQKFLETEKDELILEVMNPPPKKIRLQELEDSIDNLSQNGEGRISVSHVGSTASKNSNLNVCNVCLGILQEFCEKDFIKKVCQKVEASGFEFTSLVFSVSFPPQLSVREHAAWLLVKQEMGKQSLSLGRDDIVQLKEAYKWITHPLFSEELGVPIDGKSLLEVSVVFAHPETVEDCHFLAAICPDCFKPAKNKQSVFTRMAVMKALNKIKEEDFLKQFPCPPNSPKAVCAVLEIECAHGAVFVAGRYNKYSRNLPQTPWIIDGERKLESSVEELISDHLLAVFKAESFNFSSSGREDVDVRTLGNGRPFAIELVNPHRVHFTSQEIKELQQKINNSSNKIQVRDLQLVTREAIGHMKEGEEEKTKTYSALIWTNKAIQKKDIEFLNDIKDLKIDQKTPLRVLHRRPLAVRARVIHFMETQYVDEHHFRLHLKTQAGTYIKEFVHGDFGRTKPNIGSLMNVTADILELDVESVDVDWPPALDD

SEQ ID NO: 243 - DNA, 1752 bp, Homo sapiens
cgggagccgagaggaggcggaggagatggcgtcccagccgccacctccccccaaaccctgggagacccgccgaattccgggagccggaccgggaccaggaccgggccccactttccaatctgctgatttgggtcctactttaatgacaagacctggacaaccagcacttaccagagtgcccccacctattcttccaaggccatcacagcagacaggaagtagcagtgtgaacacttttagacctgcttacagttcattttcttctggatatggtgcctatggaaattcattttatggaggctatagtccttatagttatggatataatgggctgggctacaaccgcctccgtgtagatgatcttccacccagtagatttgttcagcaagctgaagaaagcagcaggggtgcatttcagtccattgaaagtattgtgcatgcatttgcctctgtcagtatgatgatggatgctaccttttcagctgtctataacagtttcagggctgtattggatgtagcaaatcacttttcccgattgaaaatacactttacaaaagtgttttcagcttttgcattggttaggactatacggtatctttacagacggctacagcggatgttaggtttaagaagaggctctgagaatgaagacctctgggcagagagtgaaggaactgtggcatgccttggtgctgaggaccgagcagctacctcagcaaaatcttggccaatattcttgttctttgctgttatccttggtggtccttacctcatttggaaactattgtctactcacagtgatgaagtaacagacagcatcaactgggcaagtggtgaggatgaccatgtagttgccagagcagaatatgattttgctgccgtatctgaagaagaaatttctttccgggctggtgatatgctgaacttagctctcaaagaacaacaacccaaagtgcgtggttggcttctggctagccttgatggccaaacaacaggacttatacctgcgaattatgtcaaaattcttggcaaaagaaaaggtaggaaaacggtggaatcaagtaaagtttccaagcagcaacaatcttttaccaacccaacactaactaaaggagccacggttgctgattctttggatgaacaggaagctgcctttgaatctgtttttgttgaaactaataaggttccagttgcacctgattccattgggaaagatggagaaaagcaagatctttgatatctttcatgtttgcctgcagttgaacaatactttagagtactttttaaaattatttctcacaaagaaatgaatgtacaatccaatgaaaacatttgttattggctatttcaggtgttttgctgctagaaattattaaagttacacactagtatgttggtctggtgacctggttacattttattatacacattattggaccataaggacatttgtttcacctagattttaagattatggagactgctgtcatttttatcttatttaaatctctaggtttattggaagagtaagattgatgaactatagcatgcacagtttggtacagtagagatcattaatacttttaaaagttctacattaattgacttggaatccttagtaatggagtggtgacatgtcagtatgagaacaggcaaaaggtaaattttttttttttttttacaaccttaagtaatctcaataataaaattttctgatctgtattaaaaaaaaaaaaaaaaaaaaaaaaaaaa

SEQ ID NO: 244 - protein, 403 aa, Homo sapiens
MASQPPPPPKPWETRRIPGAGPGPGPGPTFQSADLGPTLMTRPGQPALTRVPPPILPRPSQQTGSSSVNTFRPAYSSFSSGYGAYGNSFYGGYSPYSYGYNGLGYNRLRVDDLPPSRFVQQAEESSRGAFQSIESIVHAFASVSMMMDATFSAVYNSFRAVLDVANHFSRLKIHFTKVFSAFALVRTIRYLYRRLQRMLGLRRGSENEDLWAESEGTVACLGAEDRAATSAKSWPIFLFFAVILGGPYLIWKLLSTHSDEVTDSINWASGEDDHVVARAEYDFAAVSEEEISFRAGDMLNLALKEQQPKVRGWLLASLDGQTTGLIPANYVKILGKRKGRKTVESSKVSKQQQSFTNPTLTKGATVADSLDEQEAAFESVFVETNKVPVAPDSIGKDGEKQDL

SEQ ID NO: 245 - DNA, 3131 bp, Homo sapiens
accggcccggtccatgtccctgcagaccgtcccgcccgcgcacagcggcgggaaccccagcttctgcgcgcccggccgcgccccgggcctctgcaccgcctcgctcccgctgcccggcgcctttgtccgctctgcgcccctggagtttctgtgcctccacgggcgggagcggggcgcgaaggtctgggggtgccccgaggacgcgccgcgtagtgagcctccgggcccaagatgaggaaattgaggcacagagattaactaatctgaaccagataatgccataagtagtagaactgcgatgcaaacttggacagtctgactccagagtctgcacacttaaccactccactattctggccttctacaagttccaaaagatgagtcgtggatattcagaaaacaacaatttcctgaacaataataaccaaatggtattggacatgatcctttatccattaattggaatccctcagactatcaactgggaaactatagcaaggctcgtgcctggattaacaccaaaagagtgtgcaaaaaggtttgatgaattaaagagcagtggaagctcgcctgttgacaaccagtataattccctaatggctgctggagagagtcctgttgaaactttagccacatatatcaaatcctcacttcttgacatacatggagaatttcaggagactccagttggacatgatgcagtttccaaaactggaagacatagtatagcttccacaaggaattgttcttcagaaagtgaaaattgtactactcataatggtggagaaatgactgaagaatctgaagggccaaacatggtgatccatgtgtgtgatgaagcaaaaaacttgaaagaagattttacttgcccgcgagatcttttgatatcagaaatgaagtactttgctgaatatttatctatggatgcccagcgctgggaagaggtggacatttcagttcattgcgacgttcacattttcaactggttgataaaatacattaaaaggaacactaaggagagtaaagattgtgagatgcccactttagagccaggaaatgtcatttcaattcttatttcttcggagtttttaaaaatggattcactagttgaacagtgtattcagtattgccacaaaaatatgaatgccatagtagctaccccatgcaacatgaactgtattaatgcaaatcttctcacacgtatagctgatctgttctcacacaatgaagttgatgatttaaaggacaaaaaagataaatttaaaagcaaacttttttgtaagaagattgaaagactgtttgatcctgagtacttgaatccagattctcggagtaatgcagcaacattgtatagatgctgtttgtgtaagaaacttttaacaaaagaaacagaaagaagaattccttgcattcctggaaaaatcaatgtggatcgacgtggaaatattgtctatattcacataagagataagacatgggatgttcatgagtatttgaatagtcttttcgaagaattaaaatcttggagagatgtatactggcgattgtggggaacaatcaattggctggcttgttcaagatgttatcaggcctttctctgtattgaattttcacattgtcaataccactcagaaacagtggtttatcctactgcagcaagttcattgaatactgttggcactggaatttatccctgctgtaaccaaaaggttcttcggtttgatcctactcagcttacaaagggctgtaaagtgagggaccacatggttacacttcgtgatcaaggtgaaggcggagatttgccgtcctgtcccactgctagaatgttggacgatttgcacaagtacagagatgtcattgttgtgcctttttcaaaagatacagttagtgatgttggggttggcctctgtgatgaaaagggtatagaatgtgatgttttactggagccaaatacaccatggggtcccaaaactggggagctcaatgctttcttgtcattgaaaaactggactctacaactgaaacaacagtcactgttttcagaagaagaagaatataccactggatctgaggtcactgaagatgaagttggagatgaagaagaagtatccaagaaacaaaggaaaaaggagaagccaaagaagttcactagacaaccaaaaaagcaggtatcttcaccctgtgcccagaggaaagaaaaggcattggagaagtcagcttctagagatgtgtctcctttcgttatgagtatgcagaagaataagtgggatgccacaagatccttgagattcaaccaggatgcacaaagagaagacgatcaacggcgaatgactgaaattacagggcacctaataaaaatgagattgggggatctggaccgagtcaagtcaaaggaagcaaaagaaacagacaaactgagacccagagacggcactgtgtctaagagcaacagaaaaagtggtttgagcagtgtgctcttgatgacagtgttgctgtgttaaacgaattaatacatgaaaggacttggaatactgcttgacatatcgtgaggcagagacacaaagatatggaagaacattggacagatttacatcgatatattaattaaggtgatttcagagttggagcaggagaggaagccttatagatatttttttttctttttgcttgcttgtattttctttttaattattattcagtatttcaagtagacagaaaagtacagaggataatacaacaaatatccaggtacccaccacccagcatttttacatagtagcatttgatgttttgaaataagacataaaacattccaaataccctatcaccgaggatcctgcatcctcttcttttcccagaagtgaacatttctctgaatttgatgcttattatgcccatgcatgttgttatacttttactacatattttatgtagctacagcataatatgctatgtttactttatatagtgacctcatactatacatatcctcatgcaattttttagactctgtttgagaattatatattttgattcaggtagcttaagtttattttagctactcagtagtaatgtattctattaatctactaatatatatttcttgtctatggacaaaaaaaaaaaaaaaa

SEQ ID NO: 246 - protein, 707 aa, Homo sapiens
MSRGYSENNNFLNNNNQMVLDMILYPLIGIPQTINWETIARLVPGLTPKECAKRFDELKSSGSSPVDNQYNSLMAAGESPVETLATYIKSSLLDIHGEFQETPVGHDAVSKTGRHSIASTRNCSSESENCTTHNGGEMTEESEGPNMVIHVCDEAKNLKEDFTCPRDLLISEMKYFAEYLSMDAQRWEEVDISVHCDVHIFNWLIKYIKRNTKESKDCEMPTLEPGNVISILISSEFLKMDSLVEQCIQYCHKNMNAIVATPCNMNCINANLLTRIADLFSHNEVDDLKDKKDKFKSKLFCKKIERLFDPEYLNPDSRSNAATLYRCCLCKKLLTKETERRIPCIPGKINVDRRGNIVYIHIRDKTWDVHEYLNSLFEELKSWRDVYWRLWGTINWLACSRCYQAFLCIEFSHCQYHSETVVYPTAASSLNTVGTGIYPCCNQKVLRFDPTQLTKGCKVRDHMVTLRDQGEGGDLPSCPTARMLDDLHKYRDVIVVPFSKDTVSDVGVGLCDEKGIECDVLLEPNTPWGPKTGELNAFLSLKNWTLQLKQQSLFSEEEEYTTGSEVTEDEVGDEEEVSKKQRKKEKPKKFTRQPKKQVSSPCAQRKEKALEKSASRDVSPFVMSMQKNKWDATRSLRFNQDAQREDDQRRMTEITGHLIKMRLGDLDRVKSKEAKETDKLRPRDGTVSKSNRKSGLSSVLLMTVLLC

SEQ ID NO: 247 - DNA, 701 bp, Homo sapiens
aaatcctgctctggccggattccagactcgtgggggaaaggctggatcttaatgcaagtcatgaacttgaatgtgccgatgaggcctggcattcttgtccagagacagagtaaggaagtgttggccacacccttagaaaacagaagggacatggaggcagaagaggagaaccaaataaatgagaagcaagagcctgagaatgctggagaaactggtcaagaagaggatgatggtttgcagaaaatacacacatctgtcactagaactccttcagttgttgaaagccaaaaaagacctttaaaaggagtgacattttctagggaggtaattgttgtggatcttgggaatgaataccctacacctcgaagctatactcgagaacataaagagaggaaatgaagctcaaaaaagggtaagagtgaaagaaaatgtaacgtttgactaacgttgaaagactgagggtacaaaatcatgttgaaacaacaaaacaatggggaattaagcaaataaagatattattttacctttgtgcagaaaggagtgagccatgtgcaaaattctgtaagtaaaatacttagagcttgaatataattttttaaaaattcaaatctgagttcaagaaattgattgtattgcccttaaaactatctactcaaacactgttctggcatgtgaataaagtgatttttgtttgtacaaat

SEQ ID NO: 248 - protein, 115 aa, Homo sapiens
MQVMNLNVPMRPGILVQRQSKEVLATPLENRRDMEAEEENQINEKQEPENAGETGQEEDDGLQKIHTSVTRTPSVVESQKRPLKGVTFSREVIVVDLGNEYPTPRSYTREHKERK

SEQ ID NO: 249 - DNA, 2157 bp, Homo sapiens
ggggtctgtgcggggccgcggggccagggggtcagggggccgccccccctcagctgctggacgcagggctcggccttcgcctctgggctcgggagagtccttgagtacggagaccggctaggagggttgcagctgcctctttttgaaagttgggttgggccccaagagtgacttccgacagacctttccactcccaccgtctgtggcctgagggccttcccttctcctcccgcccacccctctggatgtttcggggagttagaagggagctggattgagagactgtgttaggggcgggggtatggaacgtagtggaaagggcagaaatttggatctcagttcgcgcccaccccgcaggcgcctcccgcgagccgggccctctgtgagtgagacaagctccccttcctttacgcgcctcacctggcgcgtggggagaggtcggcagccctccgccgcagaacctccggaagggatgtcctctgccctgcgcctctggccggggctgtggtccctccaggccgtcgaggggatgctgaggccggtccccagaggagcatgacttggctggtccggaggagctctgagggcatgggcaatcttggctcgctgcaacctcagcttccagagttcaagcgagtctcctgcttcagcctcatgagtagctgggactacagatgcgtgccactacgtccgtctgatgtttgtatttttagtagagacagggtttcaccatgttggtcaggctgctctcgaactccagatctcgtgatccgcccgcctgggcctactaaagtgctgggattacaggcgtgagctagatctgactttctagtgtcctagccttggcccgatggacatgtcatttctctcagctcgtttctgtcccctaaagtgagaatattgcctgggaagattacattagacgatgtatatgcgaagacacttgatagctggtattgtcatgattctgattagttcactactgctactttccctgtggcctaggctttgcctatttccagtgggcgagctagctagatcctcctcccttaaataagccagtgtttttaagacagaatactacttgcatagtggacaataatatcttaaagaactgagcaggatgaaaagaatttgatagaaagcaggtttgaggagcacattggaggttggcaggtttcgaggctgcttgagaggacttgggccgatctgggctgggcttggacgtgaccctggcacccaggcaggtggatcccagctggggcttccattcacgactttctggtccctggcaggacagagcgggatgccaccagcttgcccaaagggaagttccaggagctcctggtgggcatcgttgtggagaatgacgctggccgcggcgagatcaacgagttgaagcaggtggaaggggaggcttcgtgcagcagccgcaaaggaaagctgattttcttctatgagtggaacatcaaactgggctggaaaggcatcgttaaagaatctggagtgaagcacaagggattgattgaaatacccaatctttctgaggaaaatgaagtagatgacactgagaatttacaacgggaatgattttaccaacgaaagctatggcaacccaggaattgactgtcaaaagaaaactgagtgggaataccctgcaggttcaggcctcatctccagtggcactgggtgtaaggattcccactgtggctcttcacatgatggaactgtttgacacaactgtagagcagctgtatagcatcttcactgtaaaggagttaacaaataagaagatcatcatgaaatggagatgtgggaactggccagaagaacactatgccatggttgcactgaattttgtgcctactctagggcaaacagaattacaattgaaggagttcctatctatctgtaaagaagagaacatgaaattctgttggcagaagcagcattttgaagaaataaaaggttcactgcagctgacccccctaaatggttgaattaaaatttattataaggcattactttttgtaagcggaaaaagtgtcacatttacctcttccctatcttttgtttaaaaggactgtctttattttatattggatgaaatctatgaacatatatacaatgtaaagcagaaaaaaaaaaaaaaaaaaa

SEQ ID NO: 250 - protein, 137 aa, Homo sapiens
MILPTKAMATQELTVKRKLSGNTLQVQASSPVALGVRIPTVALHMMELFDTTVEQLYSIFTVKELTNKKIIMKWRCGNWPEEHYAMVALNFVPTLGQTELQLKEFLSICKEENMKFCWQKQHFEEIKGSLQLTPLNG

SEQ ID NO: 251 - DNA, 11326 bp, Homo sapiens
gggggggggcggcggccgaacgatgtgcgagaactgcgcagacctggtggaggtgttaaatgaaatatcagatgtagaaggtggtgatggactgcagctcagaaaggaacatactctcaaaatatttacttatatcaattcctggacacagaggcaatgtctatgctgcttcaaggaatataagcatttggagatttttaatcaagtagtgtgtgcacttattaacttagtgattgcccaagttcaagtgctccgggaccagctttgtaaacattgtactaccattaacatagattccacgtggcaagatgagagtaatcaagcagaagaaccactgaatatagatagagagtgtaatgaaggaagtacagaaagacaaaaatcaatagaaaaaaaatcaaactctacaagaatttgtaatctgactgaggaggaatcttcaaagagttctgatccttttagtttatggagtacagatgagaaggaaaaactcttactatgtgtggcaaaaatttttcaaattcagtttcccttatatactgcttacaagcataatactcaccctactattgaggatatatcaactcaagaaagtaacatattaggggcattctgtgatatgaatgatgtagaagtaccattgcatttgcttcgttatgtatgtttgttttgtgggaaaaatggcctttctctcatgaaggattgctttgaatatggaactcctgaaactttgccatttcttatagcacatgcgtttattacagttgtgtctaatattagaatatggctacatattcccgctgtcatgcagcacattataccttttaggacctatgttattaggtatttatgcaagctctcggatcaggagttacgacagagtgcagctcgtaacatggctgacttaatgtggagcacagtcaaagaaccattggatacaacattatgctttgataaagaaagcctagatcttgcatttaagtactttatgtcacctactttgactatgaggttggctggattgagtcagataacaaatcaactccataccttcaatgatgtgtgcaataatgaatcattagtatcggacacagaaacgtccattgcaaaagaacttgcagactggcttattagcaacaatgtggtggagcatatatttggaccaaatttacatattgagattatcaaacagtgccaagtgattttgaattttttggcagcagaagggcgactgagtactcaacatattgactgtatttgggctgcagcacagttgaaacattgtagtcggtatatacatgacttatttccttcactcatcaagaatttggatcccgtaccacttagacatctacttaatctggtctcagctcttgagccaagtgttcatactgaacagacactgtacttggcatccatgttaattaaagcactgtggaataacgcactagcagctaaggctcagttatctaaacagagttcttttgcatctttattaaatactaatattcccattggaaataagaaagaggaagaagagcttagaagaacagctccatcaccttggtcacctgcagctagtcctcaaagcagtgataatagcgatacacatcaaagtggaggtagtgacattgaaatggatgagcaacttattaatagaaccaaacatgtgcaacaacgactttcagacacagaggaatccatgcagggaagttctgacgaaactgccaacagtggtgaagatggaagcagtggtcctggtagcagtagtgggcatagtgatggatctagcaatgaggttaattctagccacgcaagccagtcagctgggagccctggcagtgaggtacagtcagaagacattgcagatattgaagccctcaaagaggaagatgaagacgatgatcatggtcataatcctcccaaaagcagttgtggtacagatcttcggaatagaaagttagagagtcaagcaggcatttgcctgggggactcccaaggcatgtcagaaagaaatgggacaagcagcggaacaggaaaggacctggtttttaacactgaatcattgccatcagtagataatcgaatgcgaatgctggatgcttgttcacactctgaagacccagaacatgatatttcaggggaaatgaatgctactcatatagcacaagggtctcaggagtcttgtatcacacgaactggggacttccttggggagactattgggaatgaattatttaattgtcgacaatttattggtccacagcatcaccaccaccaccaccaccatcaccaccaccacgatgggcatatggttgatgatatgctaagtgcagatgatgtcagttgtagtagctcccaggttagtgcaaaatcagaaaaaaatatggctgattttgatggtgaagaatctggatgtgaagaggagctagttcagattaattcacatgcggaactgacatctcacctccaacaacatcttcccaatttagcttccatttaccatgaacatcttagtcaaggacctgtagttcataaacatcaattcaacagtaatgctgttacagacattaatttggataatgtttgcaagaaaggaaatactttgttgtgggatatagtccaagatgaagatgcagttaatctttctgaaggattaataaatgaagcagagaaacttctttgttcgttagtatgttggtttacagatagacaaattcgaatgagattcattgaaggttgccttgaaaacttgggaaacaacagatcagtagtaatttcacttcgtcttcttccaaaactatttggtacttttcagcagtttgggagcagttacgatacacactggataacaatgtgggcagaaaaagaactgaacatgatgaagcttttctttgataatttggtatactacattcaaactgtgagagaaggaagacaaaaacatgcactgtacagccatagtgctgaagttcaagttcgtcttcaattcttgacttgtgtattttcaactctgggatcacctgatcatttcaggttaagtttagagcaagttgacatcttatggcattgtttagtagaagattctgaatgttatgatgatgcactccattggtttttaaatcaagttcgaagtaaagatcaacatgctatgggtatggaaacctacaaacatcttttcctggagaagatgccccagctaaaacctgaaacaattagcatgactggcttaaacctgtttcagcatctctgtaacttggctcgattggctaccagtgcctatgatggttgttcaaattctgagctgtgtggtatggaccaattttggggcattgctttaagagcacaatctggtgatgtcagtcgagcagctatccagtatattaactcctattatattaatggtaaaacaggtttggagaaggagcaagaatttattagtaagtgcatggagagtcttatgatagcttctagcagtcttgaacaggaatcacactcaagtctcatggttatagaaagaggactccttatgctgaagacacatctggaagcgtttaggagaaggtttgcatatcatctgagacagtggcaaattgaaggcactggtattagtagtcatttgaaagcactgagtgacaaacagtctctgccgctaagggttgtatgccagccagctggacttcctgacaagatgactattgaaatgtatcctagtgaccaggtagcagatcttagggctgaagtaactcattggtatgaaaatttacagaaagaacaaataaatcaacaagctcagcttcaggagtttggtcaaagcaaccgaaaaggagagtttcctggaggcctcatgggacctgtcaggatgatttcatctggacacgagttaacaacagattatgatgaaaaagcacttcatgagcttggttttaaggatatgcagatggtatttgtatctttgggtgcaccaaggagagagcggaaaggggaaggtgttcagctgccagcatcttgcctcccaccccctcagaaggacaacattccaatgcttttgcttttacaagagcctcatttaactactctttttgatttattagagatgcttgcatcatttaaaccaccctcaggaaaagtggcagtggatgatagtgagagcttacgatgtgaagaacttcatcttcatgcagaaaatctgtctaggcgggtctgggagctactgatgcttcttcctacatgtcctaatatgttgatggcattccagaatatctcagatgagcagagtaatgatggatttaattggaaagaacttctcaaaattaagagcgcccacaagctattgtatgctctggaaattattgaagcactgggaaaacctaatagaagaataaggagggagtctacgggaagttacagtgatctttatccagattcagatgattcaagtgaagatcaagtggaaaatagtaaaaattcctggagttgcaagtttgttgctgctggagggcttcaacagttattagaaatttttaattctggaattctagagcctaaagagcaggaatcatggactgtgtggcagctagactgtcttgcttgcttgctgaagttaatatgccagtttgcagtagatccatccgatttggatttagcttatcatgatgtctttgcctggtctggtatagcggaaagccataggaaaagaacctggcctggcaaatcaaggaaggctgctggtgatcatgctaagggtcttcatataccacgattaacagaggtatttcttgttcttgtccaaggaaccagtttgattcagcgacttatgtctgttgcttatacgtatgataatctggctcctagagttttaaaagctcagtctgatcacaggtctagacatgaagtttcacattattcaatgtggctcttggtgagttgggctcattgctgttctttagtgaaatctagccttgctgatagcgatcatttacaagattggctaaagaaattgactctccttattcctgagactgcagttcgtcatgaatcatgcagtggtctctataagttatccctgtcagggctggatggaggagactcaatcaatcgttcttttctgctattggctgcctcaacattattgaaatttcttcctgatgctcaagcactcaaacctattaggatagatgattatgaggaagaaccaatattaaaaccaggatgtaaagagtatttttggttgttatgcaaattagttgacaacatacatataaaggacgctagtcagacaacgctcctcgacttagatgccttggcaagacatttggctgactgtattcgaagtagggagatccttgatcatcaggatggtaatgtagaagatgatgggcttacaggactcctaaggcttgcaacaagtgttgttaaacacaaaccaccctttaaattttcaagggaaggacaggaatttttgagagatatcttcaatctcctgtttttgttgccaagtctaaaggaccgacaacagccaaagtgcaaatcacattcttcaagagctgccgcttacgatttgttagtagagatggtaaaggggtctgttgagaactacaggctaatacacaactgggttatggcacaacacatgcagtcccatgcaccttataaatgggattactggcctcatgaagatgtccgtgctgaatgtagatttgttggccttactaaccttggagctacttgttacttagcttctactattcagcaactttatatgatacctgaggcaagacaggctgtcttcactgccaagtattcagaggatatgaagcacaagaccactcttctggagcttcagaaaatgtttacatatttaatggagagtgaatgcaaagcatataatcctagacctttctgtaaaacatacaccatggataagcagcctctgaatactggggaacagaaagatatgacagagttttttactgatctaattaccaaaatcgaagaaatgtctcccgaactgaaaaataccgtcaaaagtttatttggaggtgtaattacaaacaatgttgtatccttggattgtgaacatgttagtcaaactgctgaagagttttatactgtgaggtgccaagtggctgatatgaagaacatttatgaatctcttgatgaagttactataaaagacactttggaaggtgataacatgtatacttgttctcattgtgggaagaaagtacgagctgaaaaaagggcatgttttaagaaattgcctcgcattttgagtttcaatactatgagatacacatttaatatggtcacgatgatgaaagagaaagtgaatacacacttttccttcccattacgtttggacatgacgccctatacagaagattttcttatgggaaagagtgagaggaaagaaggttttaaagaagtcagtgatcattcaaaagactcagagagctatgaatatgacttgataggagtgactgttcacacaggaacggcagatggtggacactattatagctttatcagagatatagtaaatccccatgcttataaaaacaataaatggtatctttttaatgatgctgaggtaaaaccttttgattctgctcaacttgcatctgaatgttttggtggagagatgacgaccaagacctatgattctgttacagataaatttatggacttctcttttgaaaagacacacagtgcatatatgctgttttacaaacgcatggaaccagaggaagaaaatggcagagaatacaaatttgatgtttcgtcagagttactagagtggatttggcatgataacatgcagtttcttcaagacaaaaacatttttgaacatacatattttggatttatgtggcaattgtgtagttgtattcccagtacattaccagatcctaaagctgtgtccttaatgacagcaaagttaagcacttcctttgtcctagagacatttattcattctaaagaaaagcccacgatgcttcagtggattgaactgttgacgaaacagtttaataatagtcaggcagcttgtgagtggtttttagatcgtatggctgatgacgactggtggccaatgcagatactaattaagtgccctaatcaaattgtgagacagatgtttcagcgtttgtgtatccatgtgattcagaggctgagacctgtgcatgctcatctctatttgcagccaggaatggaagatgggtcagatgatatggatacctcagtagaagatattggtggtcgttcatgtgtcactcgctttgtgagaaccctgttattaattatggaacatggtgtaaaacctcacagtaaacatcttacagagtattttgccttcctttacgaatttgcaaaaatgggtgaagaagagagccaatttttgctttcattgcaagctatatctacaatggtacatttttacatgggaacaaaaggacctgaaaatcctcaagttgaagtgttatcagaggaagaaggggaagaagaagaggaggaagaagatatcctctctctggcagaagaaaaatacaggccagctgcccttgaaaagatgatagctttagttgctcttttggttgaacagtctcgatcagaaaggcatttgacattatcacagactgacatggcagcattaacaggaggaaagggatttcccttcttgtttcaacatattcgtgatggcatcaatataagacaaacttgtaatctgattttcagcctgtgtcgatacaataatcgacttgcagaacatattgtatctatgcttttcacatcaatagcaaagttgactcctgaggcagccaatcctttctttaagttgttgactatgctaatggagtttgctggtggacctccaggaatgcctccctttgcatcttatattctgcagaggatatgggaggtgattgaatacaatccttctcagtgtctagattggttggcagtgcagacaccccgaaataaactggcacacagctgggtcttacagaatatggaaaactgggtcgagcggtttcttttggctcacaattatcctagagtgaggacttctgcagcttatcttctggtgtcccttataccaagcaattcattccgtcagatgttccggtcaacaaggtctttgcacatcccaacccgtgaccttccactcagtccagacacaacagtagtcctacatcaggtctacaacgtgctccttggtttgctctcaagagccaaactttatgttgatgctgctgttcatggcactacaaagctagtgccctattttagctttatgacttactgtttaatttccaaaactgagaagctgatgttttccacatatttcatggatttgtggaaccttttccagcctaaactttctgagccagcaatagctacaaatcacaataaacaggctttgctttcattttggtacaatgtctgtgctgactgtccagagaatatccgccttattgttcagaacccagtggtaaccaagaacattgccttcaattacatccttgctgaccatgatgatcaggatgtggtgctttttaaccgtgggatgctgccagcgtactatggcattctgaggctctgctgtgagcagtctcctgcattcacacgacaactggcttctcaccagaacatccagtgggcctttaagaatcttacaccacatgccagccaataccctggagcagtagaagaactgtttaacctgatgcagctgtttatagctcagaggccagatatgagagaagaagaattagaagatattaaacagttcaagaaaacaaccataagttgttacttacgttgcttagatggccgctcctgctggactactttaataagtgccttcagaatactattagaatctgatgaagacagacttcttgttgtatttaatcgaggattgattctaatgacagagtctttcaacactttgcacatgatgtatcacgaagctacagcttgccatgtgactggagatttagtagaacttctgtcaatatttctttcggttttgaagtctacacgcccttatcttcagagaaaagatgtgaaacaagcattaatccagtggcaggagcgaattgaatttgcccataaactgttaactcttcttaattcctatagtcctccagaacttagaaatgcctgtatagatgtcctcaaggaacttgtacttttgagtccccatgattttcttcatactctggttccctttctacaacacaaccattgtacttaccatcacagtaatataccaatgtctcttggaccttatttcccttgtcgagaaaatatcaagctaataggagggaaaagcaatattcggcctccgcgccctgaactcaatatgtgcctcttgcccacaatggtggaaaccagtaagggcaaagatgacgtttatgatcgtatgctgctagactacttcttttcttatcatcagttcatccatctattatgccgagttgcaatcaactgtgaaaaatttactgaaacattagttaagctgagtgtcctagttgcctatgaaggtttgccacttcatcttgcactgttccccaaactttggactgagctatgccagactcagtctgctatgtcaaaaaactgcatcaagcttttgtgtgaagatcctgttttcgcagaatatattaaatgtatcctaatggatgaaagaacttttttaaacaacaacattgtctacacgttcatgacacatttccttctaaaggttcaaagtcaagtgttttctgaagcaaactgtgccaatttgatcagcactcttattacaaacttgataagccagtatcagaacctacagtctgatttctccaaccgagttgaaatttccaaagcaagtgcttctttaaatggggacctgagggcactcgctttgctcctgtcagtacacactcccaaacagttaaacccagctctaattccaactctgcaagagcttttaagcaaatgcaggacttgtctgcaacagagaaactcactccaagagcaagaagccaaagaaagaaaaactaaagatgatgaaggagcaactcccattaaaaggcggcgtgttagcagtgatgaggagcacactgtagacagctgcatcagtgacatgaaaacagaaaccagggaggtcctgaccccaacgagcacttctgacaatgagaccagagactcctcaattattgatccaggaactgagcaagatcttccttcccctgaaaatagttctgttaaagaataccgaatggaagttccatcttcgttttcagaagacatgtcaaatatcaggtcacagcatgcagaagaacagtccaacaatggtagatatgacgattgtaaagaatttaaagacctccactgttccaaggattctaccctagctgaggaagaatctgagttcccttctacttctatctctgcagttctgtctgacttagctgacttgagaagctgtgatggccaagctttgccctcccaggaccctgaggttgctttatctctcagttgtggccattccagaggactctttagtcatatgcagcaacatgacattttagataccctgtgtaggaccattgaatctacaatccatgtcgtcacaaggatatctggcaaaggaaaccaagctgcttcttgacattaggtgtagcatgtctacttttaagtccctcacccccaacccccatgctgtttgtataagttttgcttatttgtttttgtgcttcagtttgtccagtgctctctgcttgaatggcaagatagatttataggcttaattcttggtcaggcagaactccagatgaaaaaaacttgcatcttcagtatacttcctaaagggcaatcagataatggatatgttttatgtaattaagagttcactttagtggctttcatttaatatggctgtctgggaagaacagggttgcctagccctgtacaatgtaatttaaacttacagcatttttactgtgtatgatatggtgtcctctgtgccagttttgtaccttatagaggcagattgcctccgatcgctgtggttcttattatcaaaattaagtttacttgtatacggaacaaccacaagaaatttgattctgtaaagaatcctctttagctgtggcctggcagtatataaatggtgctttatttaacagaatacctgtggaggaaataaagcacacttgatgtaaaaataattgttttatttttattgacatgactgattgattgattgctattctgtgcacttaattaaactgattgtgatgacttttcatttgtttaaaaaaaaaaaaaaaaa

SEQ ID NO: 252 - protein, 3546 aa, Homo sapiens
MCENCADLVEVLNEISDVEGGDGLQLRKEHTLKIFTYINSWTQRQCLCCFKEYKHLEIFNQVVCALINLVIAQVQVLRDQLCKHCTTINIDSTWQDESNQAEEPLNIDRECNEGSTERQKSIEKKSNSTRICNLTEEESSKSSDPFSLWSTDEKEKLLLCVAKIFQIQFPLYTAYKHNTHPTIEDISTQESNILGAFCDMNDVEVPLHLLRYVCLFCGKNGLSLMKDCFEYGTPETLPFLIAHAFITVVSNIRIWLHIPAVMQHIIPFRTYVIRYLCKLSDQELRQSAARNMADLMWSTVKEPLDTTLCFDKESLDLAFKYFMSPTLTMRLAGLSQITNQLHTFNDVCNNESLVSDTETSIAKELADWLISNNVVEHIFGPNLHIEIIKQCQVILNFLAAEGRLSTQHIDCIWAAAQLKHCSRYIHDLFPSLIKNLDPVPLRHLLNLVSALEPSVHTEQTLYLASMLIKALWNNALAAKAQLSKQSSFASLLNTNIPIGNKKEEEELRRTAPSPWSPAASPQSSDNSDTHQSGGSDIEMDEQLINRTKHVQQRLSDTEESMQGSSDETANSGEDGSSGPGSSSGHSDGSSNEVNSSHASQSAGSPGSEVQSEDIADIEALKEEDEDDDHGHNPPKSSCGTDLRNRKLESQAGICLGDSQGMSERNGTSSGTGKDLVFNTESLPSVDNRMRMLDACSHSEDPEHDISGEMNATHIAQGSQESCITRTGDFLGETIGNELFNCRQFIGPQHHHHHHHHHHHHDGHMVDDMLSADDVSCSSSQVSAKSEKNMADFDGEESGCEEELVQINSHAELTSHLQQHLPNLASIYHEHLSQGPVVHKHQFNSNAVTDINLDNVCKKGNTLLWDIVQDEDAVNLSEGLINEAEKLLCSLVCWFTDRQIRMRFIEGCLENLGNNRSVVISLRLLPKLFGTFQQFGSSYDTHWITMWAEKELNMMKLFFDNLVYYIQTVREGRQKHALYSHSAEVQVRLQFLTCVFSTLGSPDHFRLSLEQVDILWHCLVEDSECYDDALHWFLNQVRSKDQHAMGMETYKHLFLEKMPQLKPETISMTGLNLFQHLCNLARLATSAYDGCSNSELCGMDQFWGIALRAQSGDVSRAAIQYINSYYINGKTGLEKEQEFISKCMESLMIASSSLEQESHSSLMVIERGLLMLKTHLEAFRRRFAYHLRQWQIEGTGISSHLKALSDKQSLPLRVVCQPAGLPDKMTIEMYPSDQVADLRAEVTHWYENLQKEQINQQAQLQEFGQSNRKGEFPGGLMGPVRMISSGHELTTDYDEKALHELGFKDMQMVFVSLGAPRRERKGEGVQLPASCLPPPQKDNIPMLLLLQEPHLTTLFDLLEMLASFKPPSGKVAVDDSESLRCEELHLHAENLSRRVWELLMLLPTCPNMLMAFQNISDEQSNDGFNWKELLKIKSAHKLLYALEIIEALGKPNRRIRRESTGSYSDLYPDSDDSSEDQVENSKNSWSCKFVAAGGLQQLLEIFNSGILEPKEQESWTVWQLDCLACLLKLICQFAVDPSDLDLAYHDVFAWSGIAESHRKRTWPGKSRKAAGDHAKGLHIPRLTEVFLVLVQGTSLIQRLMSVAYTYDNLAPRVLKAQSDHRSRHEVSHYSMWLLVSWAHCCSLVKSSLADSDHLQDWLKKLTLLIPETAVRHESCSGLYKLSLSGLDGGDSINRSFLLLAASTLLKFLPDAQALKPIRIDDYEEEPILKPGCKEYFWLLCKLVDNIHIKDASQTTLLDLDALARHLADCIRSREILDHQDGNVEDDGLTGLLRLATSVVKHKPPFKFSREGQEFLRDIFNLLFLLPSLKDRQQPKCKSHSSRAAAYDLLVEMVKGSVENYRLIHNWVMAQHMQSHAPYKWDYWPHEDVRAECRFVGLTNLGATCYLASTIQQLYMIPEARQAVFTAKYSEDMKHKTTLLELQKMFTYLMESECKAYNPRPFCKTYTMDKQPLNTGEQKDMTEFFTDLITKIEEMSPELKNTVKSLFGGVITNNVVSLDCEHVSQTAEEFYTVRCQVADMKNIYESLDEVTIKDTLEGDNMYTCSHCGKKVRAEKRACFKKLPRILSFNTMRYTFNMVTMMKEKVNTHFSFPLRLDMTPYTEDFLMGKSERKEGFKEVSDHSKDSESYEYDLIGVTVHTGTADGGHYYSFIRDIVNPHAYKNNKWYLFNDAEVKPFDSAQLASECFGGEMTTKTYDSVTDKFMDFSFEKTHSAYMLFYKRMEPEEENGREYKFDVSSELLEWIWHDNMQFLQDKNIFEHTYFGFMWQLCSCIPSTLPDPKAVSLMTAKLSTSFVLETFIHSKEKPTMLQWIELLTKQFNNSQAACEWFLDRMADDDWWPMQILIKCPNQIVRQMFQRLCIHVIQRLRPVHAHLYLQPGMEDGSDDMDTSVEDIGGRSCVTRFVRTLLLIMEHGVKPHSKHLTEYFAFLYEFAKMGEEESQFLLSLQAISTMVHFYMGTKGPENPQVEVLSEEEGEEEEEEEDILSLAEEKYRPAALEKMIALVALLVEQSRSERHLTLSQTDMAALTGGKGFPFLFQHIRDGINIRQTCNLIFSLCRYNNRLAEHIVSMLFTSIAKLTPEAANPFFKLLTMLMEFAGGPPGMPPFASYILQRIWEVIEYNPSQCLDWLAVQTPRNKLAHSWVLQNMENWVERFLLAHNYPRVRTSAAYLLVSLIPSNSFRQMFRSTRSLHIPTRDLPLSPDTTVVLHQVYNVLLGLLSRAKLYVDAAVHGTTKLVPYFSFMTYCLISKTEKLMFSTYFMDLWNLFQPKLSEPAIATNHNKQALLSFWYNVCADCPENIRLIVQNPVVTKNIAFNYILADHDDQDVVLFNRGMLPAYYGILRLCCEQSPAFTRQLASHQNIQWAFKNLTPHASQYPGAVEELFNLMQLFIAQRPDMREEELEDIKQFKKTTISCYLRCLDGRSCWTTLISAFRILLESDEDRLLVVFNRGLILMTESFNTLHMMYHEATACHVTGDLVELLSIFLSVLKSTRPYLQRKDVKQALIQWQERIEFAHKLLTLLNSYSPPELRNACIDVLKELVLLSPHDFLHTLVPFLQHNHCTYHHSNIPMSLGPYFPCRENIKLIGGKSNIRPPRPELNMCLLPTMVETSKGKDDVYDRMLLDYFFSYHQFIHLLCRVAINCEKFTETLVKLSVLVAYEGLPLHLALFPKLWTELCQTQSAMSKNCIKLLCEDPVFAEYIKCILMDERTFLNNNIVYTFMTHFLLKVQSQVFSEANCANLISTLITNLISQYQNLQSDFSNRVEISKASASLNGDLRALALLLSVHTPKQLNPALIPTLQELLSKCRTCLQQRNSLQEQEAKERKTKDDEGATPIKRRRVSSDEEHTVDSCISDMKTETREVLTPTSTSDNETRDSSIIDPGTEQDLPSPENSSVKEYRMEVPSSFSEDMSNIRSQHAEEQSNNGRYDDCKEFKDLHCSKDSTLAEEESEFPSTSISAVLSDLADLRSCDGQALPSQDPEVALSLSCGHSRGLFSHMQQHDILDTLCRTIESTIHVVTRISGKGNQAAS

SEQ ID NO: 253 - DNA, 240 bp, Homo sapiens
atgtccatccataccaagctgcagaacaaggcgcatgtgattgaggtcctgctcagggccaagttcaagttccccggctgccagaagatccacatctggaagaagtggggcttcaccaagttcaatgccgatgaatttgaagatatggtggctgagaagcggctcatcccagatggctgtggggtcaagtatgtcgccattcatggccctctggacaagtggctggccctgcactcatga

SEQ ID NO: 254 - protein, 79 aa, Homo sapiens [sequence omitted]

SEQ ID NO: 255 - DNA, 4830 bp, Homo sapiens
caaccggttccgagtttgaggcactaggaggagggggagaagcggctgcagcggccgcggcaggagcagcgggagctacagcatcagcaagagcaacagtagctacagccccggcggcggtgcctgttccagtctttgctgctgcagtccgtgcaaccacccagagggggaggggggaaccaccagtcgctgaggaacaagagaaggggggaaagtttaggcgagccttgggggggggggggccagcgccggagccgcgtgagagagggagccgtgttttggtaggggggagtcggactgcaactggcagcagagcgtctccccggccgtgtggactctacaccccctactcctgccgcttctgctgctgcctgtggctggagggtccccctggggctgaatctttgggacttgaccccgttccctcccccttccctcactccccagccgggcgggagcatttattccccagattaattccccttttgggggggggcgggtgtgtgtgtgtgtgtgtgtgtgtgtgtgtgttgggggaagcgtccctgaaatagtaaatattattgagctctttttgcccttttcctgtccgtttttttaatttccttttttgaggtgggaaaactgaaacccaccttgattcgtcccctctcccccctccccaccttccctcgccctaatcccccaacgaggaaggaaggagcagttggttcaatctctggtaatctatgccagcaattatgacaatgttagcagaccatgcagctcgtcagctgcttgatttcagccaaaaactggatatcaacttattagataatgtggtgaattgcttataccatggagaaggagcccagcaaagaatggctcaagaagtactgacacatttaaaggagcatcctgatgcttggacaagagtcgacacaattttggaattttctcagaatatgaatacgaaatactatggactacaaattttggaaaatgtgataaaaacaaggtggaagattcttccaaggaaccagtgcgaaggaataaaaaaatacgttgttggcctcattatcaagacgtcatctgacccaacttgtgtagagaaagaaaaggtgtatatcggaaaattaaatatgatccttgttcagatactgaaacaagaatggcccaaacattggccaacttttatcagtgatattgttggagcaagtaggaccagcgaaagtctctgtcaaaataatatggtgattcttaaactcttgagtgaagaagtatttgatttctctagtggacagataacccaagtcaaatctaagcatttaaaagacagcatgtgcaatgaattctcacagatatttcaactgtgtcagtttgtaatggaaaattctcaaaatgctccacttgtacatgcaaccttggaaacattgctcagatttctgaactggattcccctgggatatatttttgagaccaaattaatcagcacattgatttataagttcctgaatgttccaatgtttcgaaatgtctctctgaagtgcctcactgagattgctggtgtgagtgtaagccaatatgaagaacaatttgtaacactatttactctgacaatgatgcaactaaagcagatgcttcctttaaataccaatattcgacttgcgtactcaaatggaaaagatgatgaacagaacttcattcaaaatctcagtttgtttctctgcacctttcttaaggaacatgatcaacttatagaaaaaagattaaatctcagggaaactcttatggaggcccttcattatatgttgttggtatctgaagtagaagaaactgaaatctttaaaatttgtcttgaatactggaatcatttggctgctgaactctatagagagagtccattctctacatctgcctctccgttgctttctggaagtcaacattttgatgttcctcccaggagacagctatatttgcccatgttattcaaggtccgtttattaatggttagtcgaatggctaaaccagaggaagtattggttgtagagaatgatcaaggagaagttgtgagagaattcatgaaggatacagattccataaatttgtataagaatatgagggaaacattggtttatcttactcatctggattatgtagatacagaaagaataatgacagagaagcttcacaatcaagtgaatggtacagagtggtcatggaaaaatttgaatacattgtgttgggcaataggctccattagtggagcaatgcatgaagaggacgaaaaacgatttcttgttactgttataaaggatctattaggattatgtgaacagaaaagaggcaaagataataaagctattattgcatcaaatatcatgtacatagtaggtcaatacccacgttttttgagagctcactggaaatttctgaagactgtagttaacaagctgttcgaattcatgcatgagacccatgatggagtccaggatatggcttgtgatactttcattaaaatagcccaaaaatgccgcaggcatttcgttcaggttcaggttggagaagtgatgccatttattgatgaaattttgaacaacattaacactattatttgtgatcttcagcctcaacaggttcatacgttttatgaagctgtggggtacatgattggtgcacaaacagatcaaacagtacaagaacacttgatagaaaagtacatgttactccctaatcaagtgtgggatagtataatccagcaggcaaccaaaaatgtggatatactgaaagatcctgaaacagtcaagcagcttggtagcattttgaaaacaaatgtgagagcctgcaaagctgttggacacccctttgtaattcagcttggaagaatttatttagatatgcttaatgtatacaagtgcctcagtgaaaatatttctgcagctatccaagctaatggtgaaatggttacaaagcaaccattgattagaagtatgcgaactgtaaaaagggaaactttaaagttaatatctggttgggtgagccgatccaatgatccacagatggtcgctgaaaattttgttccccctctgttggatgcagttctcattgattatcagagaaatgtcccagctgctagagaaccagaagtgcttagtactatggccataattgtcaacaagttagggggacatataacagctgaaatacctcaaatatttgatgctgtttttgaatgcacattgaatatgataaataaggactttgaagaatatcctgaacatagaacgaactttttcttactacttcaggctgtcaattctcattgtttcccagcattccttgctattccacctacacagtttaaacttgttttggattccatcatttgggctttcaaacatactatgaggaatgtcgcagatacgggcttacagatactttttacactcttacaaaatgttgcacaagaagaagctgcagctcagagtttttatcaaacttatttttgtgatattctccagcatatcttttctgttgtgacagacacttcacatactgctggtttaacaatgcatgcatcaattcttgcatatatgtttaatttggttgaagaaggaaaaataagtacatcattaaatcctggaaatccagttaacaaccaaatctttcttcaggaatatgtggctaatctccttaagtcggccttccctcacctacaagatgctcaagtaaagctctttgtgacagggcttttcagcttaaatcaagatattcctgctttcaaggaacatttaagagatttcctagttcaaataaaggaatttgcaggtgaagacacttctgatttgtttttggaagagagagaaatagccctacggcaggctgatgaagagaaacataaacgtcaaatgtctgtccctggcatctttaatccacatgagattccagaagaaatgtgtgattaaaatccaaattcatgctgttttttttctctgcaactcgttagcagaggaaaacagcatgtgggtatttgtcgaccaaaatgatgccaatttgtaaattaaaatgtcacctagtggccctttttcttatgtgtttttttgtataagaaattttctgtgaaatatccttccattgtttaagcttttgttttggtcatctttatttagtttgcatgaagttgaaaattaaggcatttttaaaaattttacttcatgcccatttttgtggctgggctggggggaggaggcaaattcgatttgaacatatacttgtaattctaatgcaaaattatacaatttttcctgtaaacaataccaatttttaattagggagcattttccttctagtctatttcagcctagaagaaaagataatgagtaaaacaaattgcgttgtttaaaggattatagtgctgcattgtctgaagttagcacctcttggactgaatcgtttgtctagactacatgtattacaaagtctctttggcaagattgcagcaagatcatgtgcatatcatcccattgtaaagcgacttcaaaaatatgggaacacagttagttatttttacacagttctttttgtttttgtgtgtgtgtgctgtcgcttgtcgacaacagctttttgttttcctcaatgaggagtgttgctcatttgtgagccttcattaactcgaagtgaaatggttaaaaatatttatcctgttagaataggctgcatctttttaacaactcattaaaaaacaaaacaactctggcttttgagatgacttatactaatttacattgtttaccaagctgtagtgctttaagaacactacttaaaaagcaaaataaacttggtttacattta

SEQ ID NO: 256 - protein, 1071 aa, Homo sapiens
MPAIMTMLADHAARQLLDFSQKLDINLLDNVVNCLYHGEGAQQRMAQEVLTHLKEHPDAWTRVDTILEFSQNMNTKYYGLQILENVIKTRWKILPRNQCEGIKKYVVGLIIKTSSDPTCVEKEKVYIGKLNMILVQILKQEWPKHWPTFISDIVGASRTSESLCQNNMVILKLLSEEVFDFSSGQITQVKSKHLKDSMCNEFSQIFQLCQFVMENSQNAPLVHATLETLLRFLNWIPLGYIFETKLISTLIYKFLNVPMFRNVSLKCLTEIAGVSVSQYEEQFVTLFTLTMMQLKQMLPLNTNIRLAYSNGKDDEQNFIQNLSLFLCTFLKEHDQLIEKRLNLRETLMEALHYMLLVSEVEETEIFKICLEYWNHLAAELYRESPFSTSASPLLSGSQHFDVPPRRQLYLPMLFKVRLLMVSRMAKPEEVLVVENDQGEVVREFMKDTDSINLYKNMRETLVYLTHLDYVDTERIMTEKLHNQVNGTEWSWKNLNTLCWAIGSISGAMHEEDEKRFLVTVIKDLLGLCEQKRGKDNKAIIASNIMYIVGQYPRFLRAHWKFLKTVVNKLFEFMHETHDGVQDMACDTFIKIAQKCRRHFVQVQVGEVMPFIDEILNNINTIICDLQPQQVHTFYEAVGYMIGAQTDQTVQEHLIEKYMLLPNQVWDSIIQQATKNVDILKDPETVKQLGSILKTNVRACKAVGHPFVIQLGRIYLDMLNVYKCLSENISAAIQANGEMVTKQPLIRSMRTVKRETLKLISGWVSRSNDPQMVAENFVPPLLDAVLIDYQRNVPAAREPEVLSTMAIIVNKLGGHITAEIPQIFDAVFECTLNMINKDFEEYPEHRTNFFLLLQAVNSHCFPAFLAIPPTQFKLVLDSIIWAFKHTMRNVADTGLQILFTLLQNVAQEEAAAQSFYQTYFCDILQHIFSVVTDTSHTAGLTMHASILAYMFNLVEEGKISTSLNPGNPVNNQIFLQEYVANLLKSAFPHLQDAQVKLFVTGLFSLNQDIPAFKEHLRDFLVQIKEFAGEDTSDLFLEEREIALRQADEEKHKRQMSVPGIFNPHEIPEEMCD

SEQ ID NO: 257 - DNA, 497 bp, Homo sapiens
ctttttcacaagatggcaccaaaagcgaagaaggaagctcctgcccctcctaaagctgaagccaaagcgaatgctttaaaggccaagaaggcagtgtcgaaaggtgtccacagccacacaaaaaacaagatccacatgtcacccaccttccggaggcccaagacactgcgactccggaggcagcccaaatatcctcggaagagcgcccccaggagaaacaagcttgaccactatgctatcatcaagtttccgctgaccactgagttcaccatgaagaagacagaagaaaacaacactcttgtgttcattgtggatgttaaagccaccaccaagaaccagatcaaacaggctgggaagaagctctatgacattgatgtggccaaagtcaacaccccgattcggcctgatggagagaagaaggcatatgttcgactggctcctaattacaatgctttagatgttgccaacaaaattgggatcatctaaactgagtccag

SEQ ID NO: 258 - protein, 157 aa, Homo sapiens [sequence omitted]

SEQ ID NO: 259 - DNA, 571 bp, Homo sapiens
gagctggagcctgtgcgatggattatctggacagggaccccaatgaacagggctctgctggagtgaggaagctgactgagggaagaaccagaaggctgccaaaatacaattgtgtgcctttaaaggaaataacaacaagaattaggagcgccctggaggcaaggtctgctgctggggaaaccaaaccacagtaacttcagaaatatatacttggaatatgtcatgtattaatgggtaaagacaccgtggatatgaaggaaatcacctatgggagaatattaagaagagaagaaggggctgctggctgtagtgaaatgtataaaaaggagagtgtgatcctagtttctgtctctaactatgagttacttgtgattaacttcaaatattctctccataagaagaggcccagaagaagaagatgagcttcagttattctagcacaactgctgtgatatttgtaaatattcaaaacctataataaaatgtataaaaggaaactccatttgaaatgatttgaaatctcacatggaaatctattttttttaaatcagagcttagtaagagaaaataa

SEQ ID NO: 260 - protein, 58 aa, Homo sapiens
MDYLDRDPNEQGSAGVRKLTEGRTRRLPKYNCVPLKEITTRIRSALEARSAAGETKPQ

SEQ ID NO: 261 - DNA, 8136 bp, Homo sapiens
ctgatcacctgcctttccagaccggagacgggcggcaagtttgaagtcgacacccagaggccagtttgtcccccttcccgcgcgcgggcggcccgagcctcggcggcggcggtagcggcggcggcgacgctgacacctcccaccatggacagcttcgacttagccctgctccaggaatgggacctcgagtcactgtggggtgaagacatcttaaaccagaggaatgactctctagttgtggaatttcagtcatcagccagcagatgcaggagtgtctatgaaccagatagaaatgcattacggaggaaagaacgagaaagaagaaatcaagaaactcaacaggatgatggcacgtttaattctagttactctctcttcagtgagccctacaagactaacaagggggatgaactctccaaccggatccagaacactttaggcaattatgatgaaatgaaagactttttaactgatagatccaatcagagtcatctcgttggagttcccaaacctggggttcctcagactcctgtgaacaagatcgatgaacattttgttgcagattcaagagcccagaaccagccctcgtctatctgtagcactacaacttccacaccagcagctgtccccgtgcagcagagtaagagaggcactatgggctggcagaaggctgggcacccaccctctgacggccaacagagagcaacacaacagggctctctcaggaccttgcttggagatggtgttggcagacagcagcctcgggccaaacaagtgtgcaatgtggaggtgggccttcagacccaggagaggccacctgccatggcggccaagcacagcagcagcggacactgtgttcagaactttcctccatccctagcttcaaaacccagcctggtccagcagaaaccgaccgcgtatgtgaggccaatggacggccaagatcaggcccctgatgagtctcctaagctgaagtcgtcttcggaaaccagcgtgcactgcacatcatacaggggagtccctgccagcaagccggagcctgccagagccaaggccaagctctccaagttcagcatccccaagcagggggaggagagtagatctggagaaaccaacagctgtgttgaagaaataatccgggagatgacctggcttccaccactttctgctattcaagcacctggcaaagtggaaccaaccaaatttccatttccaaataaggactctcagcttgtatcctctggacacaataatccaaagaaaggtgatgcagagccagagagtccagacaatggcacatcgaatacatcaatgctggaagatgaccttaagctaagcagtgatgaagaggagaatgaacagcaggcagctcagagaacggctctccgcgctctctctgacagcgccgtggtccagcagcccaactgcagaacctcggtgccttccagcaagggcagcagcagcagcagcagcagcggcagcagcagctcctccagcgactcagagagcagctccggatctgactcggagaccgagagcagctccagcgagagtgagggcagcaagcccccccacttctccagccccgaggctgaaccggcatcctctaacaagtggcagctggataaatggctaaacaaagttaatccccacaagcctcctattctgatccaaaatgaaagccacgggtcagagagcaatcagtactacaacccggtgaaagaggacgtccaggactgtgggaaagtccccgacgtttgccagcccagcctgagagagaaggagatcaagagcacttgcaaggaggagcaaaggccaaggacagccaacaaggcccctgggagtaaaggcgtgaagcagaagtccccgcccgcggccgtggccgtggcggtgagcgcagccgccccgccacccgcagtgccctgtgcgcccgcggagaacgcgcccgcgcctgcccggaggtccgcgggcaagaagcccaccaggcgcaccgagaggacctcagccggggacggcgccaactgccaccggcccgaggagcccgcggccgcggacgcgctggggacgagcgtggtggtccccccggagcccaccaaaaccaggccctgtggcaacaacagagcgagccaccgcaaggagctgcgctcctccgtgacctgcgagaagcgccgcacgcgggggctaagcaggatcgtccccaaatccaaggagttcattgagacagagtcgtcatcttcatcctcctcctcggactccgacctggagtccgagcaggaggagtaccctctgtccaaagcacagaccgtggctgcctctgcctcctccgggaatgatcagaggctgaaggaggccgctgccaacgggggcagtggtcctagggcccctgtaggctccatcaacgccaggaccaccagtgacatcgccaaggagctggaggagcagttctacacactggtcccctttggccggaacgaacttctctcccctctaaaggacagtgatgagatcaggtctctctgggtcaaaatcgacctgaccctcctgtccaggatcccagaacacctgccccaggagccaggggtattgagcgcccctgccaccaaggactctgagagcgcaccgcccagccacacctcggacacacctgcagaaaaggctttgccaaaatccaagaggaaacgcaagtgtgacaacgaagacgactacagggagatcaagaagtcccagggagagaaagacagctcttcaagactggccacctccaccagtaatactttgtctgcaaaccactgcaacatgaacatcaacagtgtggcaataccaataaataaaaatgaaaaaatgcttcggtcgcccatctcacccctctctgatgcatctaaacacaaatacaccagcgaggacttaacttcttccagccgacctaatggcaacagtttgtttacttcagcctcttccagcaaaaagcctaaggccgacagccagctgcagcctcacggcggagacctcacgaaagcagctcacaacaattctgaaaacattcccctccacaagtcacggccgcagacgaagccgtggtctccaggctccaacggccacagggactgcaagaggcagaaacttgtcttcgatgatatgcctcgcagtgccgattattttatgcaagaagctaaacgaatgaagcataaagcagatgcaatggtggaaaagtttggaaaggctttgaactatgctgaagcagcattgtcgtttatcgagtgtggaaatgcaatggaacaaggccccatggaatccaaatctccttatacgatgtattcagaaacagtagagctcatcaggtatgctatgagactaaaaacccactcaggccccaatgccacaccagaagacaaacaactggctgcattatgttaccgatgcctggccctcctgtactggcggatgtttcgactcaaaagggaccacgctgtaaagtattcaaaagcactaatcgactatttcaagaactcatctaaagccgcccaagccccatctccgtggggggccagtggaaagagcactggaaccccatcccccatgtctcccaacccctctcccgccagctccgtggggtctcagggcagcctctccaacgccagcgccctgtccccgtcgaccatcgtcagcatcccacagcgcatccaccagatggcggccaaccacgtcagcatcaccaacagcatcctgcacagctacgactactgggagatggccgacaacctggccaaggaaaaccgagaattcttcaacgacctggatctgctcatggggccggtcaccctgcacagcagcatggagcacctggtccagtactcccaacagggcctgcactggctgcggaacagcgcccacctgtcatagggacctcaccctggggccagagtgggctctggtctccacagatggctcaacgtttttggacactgtgctactgaaactcccagccacagcatttatcagactgcggtgaacatttcctcagcattgaacaatgatcttttgcagggcatgtgtgtttgtatgtgtgggtatataagaagccgcctgtgtatgtgtgtaagatacacagctcttcagaacacaccttctttgtctagtttccataatcccaggctagacaaagtgatcagaggtttctgactagaggaagtacacacacacacacacacacacacacacaccgtacactcacacacaatcacagacacacactttctattccattccagtgctaaaccgtgacttcttagaaaattcaaccaaaatctcatgggttagttaaccaggtgcaatacagcacaccaaaagcttgactgccagtgaagatggacctgctcttatactgttgattactttcagtattaatatactattccccaattattttttgattggtatgtattaatgggtaattgaataatgaaaataagccaggtatttttgtgccggaagtttactagattgcatgttaccaaataccctgctcttcctctaattcccttcccccatctgactctattatcaactaaatgcattccaggcaaacagatggacactcacagcccttcccagccccacctccaagtagtatgcaaatggcactgagatttagcaaaaacgcggcgtctttgaaagttaacagacactaaggtagcagtgcctgtgtgttggagctcagttaggagttgaagttttctgcacctgtgataacaagcccaccagccacatgcatttcttcttcctgccactgtgactcggtggctgtagagccacatggcatttgtcagccaatctgtttcaagtcttttctttccaccaatagctttcttacagattttcttggctaaatgaggccattacctagattgtcccttcagtaggagcctgaatccttcgcttaccaggctgagagctatttgccatgataatgctgattctctcactcctcatgcagaatgtgcacctgcagccctttgatgcgttttgatttgggggcgatttttcaggctttgattagcaggctgcttgcaatgcagaagatcacagttcctttctggggcagcagcaaccagagcctcttcctgtgtcctgtgtgtctggtatgtttacaccttgctctgagtttttctcttgttttctttttttaattaagtttacattttagtttctttgacatcttgtttacagtttttgtctgatgttttttcttttgtagtgtcttatgccctagatttagtcatcttgttaaatatatttggatatgaaatcttgacgaaaagaaaataactcctgaaaaagagggtctatcttgccacacgttaaaaacaaaaataatgtccttgtggcctcttacttgataaagttgcaccaggacggtctgagaaaggcaggcggtgtaatatgtggtgcaatccattttttcaaggtgatgacggcacaaaatacttagactagatgctgatccataaacattcactgatattcttacaggttggtttgcagtgttaacatttttgttagcctgatctgtaggtgggaagtaagatcatcataattccttagctctgagcactgattcaaaattgtataaatgactgaacaacttagatgatttgaaattaattgaaaataagaagggcttgtggaatttgcatttggctttggccttcaagcatttggaaatattaagagaatttccattttacatgtctccaactggggtgcttcttacaaccctttcactttttttttgagacgagtttcgctctgttgcccaggctggagtgcagtggcacgatctcggctcactgcatcctctgcctcctgggttcaagtgattgtcccgcctcagcctcccaagtagctgggattacaggtgtgcactaccatgcccagctaatttttgtgtttttagtagagactgggtttcaccatgttggccaggctcgtctcaaactcctgacctcaggtgatctacccgcctccacctcccaaagtgttgtgattacaggcgtgagccaccacacccagccctttcactaatttttggcagagttcacaatcccatcctatgtcagaaacttgaacctaacttaagaaattttgagtcatttttttggaggactgaggctttgttctacctactcttgaagaatcctgatgaaatattcaaacacataaagggatggccctggaggtctatcctgcatacctggagagcttctctggtcctgcccaccttgaaagttgcagactttgttgtaacatctatgtgatgagcttccctgtgaagccccatttgacaggtgggccagcagtgttttatcagcactctgatggcccacatttcccaggaaaacttcttgaaacttaccgttgtgggcagtggtcagagcgtgtagttcttatgactgtcttgtttcatctgtggagcacgtgtggagcacgttggtacagcagtttctgtggggtttggcatgggtgattttggttagtaaccatcctccaattgttgcttgtgaaagtcattcataacttgttccttttacttagttttgttgttactgctgttgttgttggtttggttggttttgagaccgggtctggctctgtagcccaagctggaatgcggtggcgcgatcatggctccctgcagcctcaaactcctgggctcaagcaatcctcctgcctcagcctcccaagcagctgggaagataggcacgtgccaccacacccggctaattttttctttattttttttgtagagatgggggtctcactatgttgcccaggctggtctcaaactcctgggctcaagcgatcctttggcctcggcctcccaaagtgcatgagccaccatgcctggcctgtttagttttgtttcaagttgaaatacctttcttgtgttttctaattagaaaagtaatatctactcattgtaaaaactcaaacagtgcagaaatgtagaaagtagaaagtgtaagtccctggttgtcccttctgcctgagacaaccactgctcacagtttgatgtatatccttccagagactctcaaatttaagcaaataatttttattaccatgtctttttatttgaagacgtacatttgcctccaaagttcaacacaagttcaactgaccatatccttccatgacctgaatagatgctatcctttatcacgatgttcaattgcctttgaaagagagtagtccaggtatattcctgatcaaaatttggcatttttgatgatactactctacacagatcagactcatgtgcagaatcgtgcctggagagagaggtttggttaagacagagatttctggaaacattcaaattgcaaatggaaacttgaaacccacaatctaatgaggaatgtactggaaaaataatctgaagagttgacaaattgtgtactagattgaacacatggaatgcaatgcaatgagactttctgcactaaaacttatcctcatatgtacaacaatgatgtgtgtattatataacagtgatgtgtacatttctgacaccccatacataatatacacagtttgtataaatgcatacatttaaaaatatatatgtacaatacagctaacataaaactgtagtacgcctgaaggatattactagtgcctaatattgagtatgagtcactgcgtgttcgcatcaacttggaagtgcagtaattgttataaaattaatcagtgcagccaacattatttatgaatcacatctttgaaactgtgcagtagcatatacatatatatttttaaataacatttttcacagttttccagagttactgttgaaatctgcatcaccaaaaaaaaaaaaaagcaagatttttttaacaatgtagacactcttcagacccagtaatctgcgtgtgatttcctatttgtagattcccaagagactttagcagtcaccagccttaatgcatgtacaggatattattgtgacttaatttatctgcagtttttaatccatgtgaaattggaatttataaacggacttggattaaacatgtctgcctttctaaggttgcaaatgttacattaaatgatttatgttgtaaaaaaaaaaaaaaaaaa

SEQ ID NO: 262 - protein, 1251 aa, Homo sapiens
MDSFDLALLQEWDLESLWGEDILNQRNDSLVVEFQSSASRCRSVYEPDRNALRRKERERRNQETQQDDGTFNSSYSLFSEPYKTNKGDELSNRIQNTLGNYDEMKDFLTDRSNQSHLVGVPKPGVPQTPVNKIDEHFVADSRAQNQPSSICSTTTSTPAAVPVQQSKRGTMGWQKAGHPPSDGQQRATQQGSLRTLLGDGVGRQQPRAKQVCNVEVGLQTQERPPAMAAKHSSSGHCVQNFPPSLASKPSLVQQKPTAYVRPMDGQDQAPDESPKLKSSSETSVHCTSYRGVPASKPEPARAKAKLSKFSIPKQGEESRSGETNSCVEEIIREMTWLPPLSAIQAPGKVEPTKFPFPNKDSQLVSSGHNNPKKGDAEPESPDNGTSNTSMLEDDLKLSSDEEENEQQAAQRTALRALSDSAVVQQPNCRTSVPSSKGSSSSSSSGSSSSSSDSESSSGSDSETESSSSESEGSKPPHFSSPEAEPASSNKWQLDKWLNKVNPHKPPILIQNESHGSESNQYYNPVKEDVQDCGKVPDVCQPSLREKEIKSTCKEEQRPRTANKAPGSKGVKQKSPPAAVAVAVSAAAPPPAVPCAPAENAPAPARRSAGKKPTRRTERTSAGDGANCHRPEEPAAADALGTSVVVPPEPTKTRPCGNNRASHRKELRSSVTCEKRRTRGLSRIVPKSKEFIETESSSSSSSSDSDLESEQEEYPLSKAQTVAASASSGNDQRLKEAAANGGSGPRAPVGSINARTTSDIAKELEEQFYTLVPFGRNELLSPLKDSDEIRSLWVKIDLTLLSRIPEHLPQEPGVLSAPATKDSESAPPSHTSDTPAEKALPKSKRKRKCDNEDDYREIKKSQGEKDSSSRLATSTSNTLSANHCNMNINSVAIPINKNEKMLRSPISPLSDASKHKYTSEDLTSSSRPNGNSLFTSASSSKKPKADSQLQPHGGDLTKAAHNNSENIPLHKSRPQTKPWSPGSNGHRDCKRQKLVFDDMPRSADYFMQEAKRMKHKADAMVEKFGKALNYAEAALSFIECGNAMEQGPMESKSPYTMYSETVELIRYAMRLKTHSGPNATPEDKQLAALCYRCLALLYWRMFRLKRDHAVKYSKALIDYFKNSSKAAQAPSPWGASGKSTGTPSPMSPNPSPASSVGSQGSLSNASALSPSTIVSIPQRIHQMAANHVSITNSILHSYDYWEMADNLAKENREFFNDLDLLMGPVTLHSSMEHLVQYSQQGLHWLRNSAHLS

SEQ ID NO: 263 - DNA, 8153 bp, Homo sapiens
cgccagcgagaagagagctccacgctcagcctcagaagaaagacgttcaacgacttactggggagagaaagaaaaggaacgggagctgagagctgatcacctgcctttccagaccggagacgggcggcaagtttgaagtcgacacccagaggccagtttgtcccccttcccgcgcgcgggcggcccgagcctcggcggcggcggtagcggcggcggcgacgctgacacctcccaccatggacagcttcgacttagccctgctccaggaatgggacctcgagtcactgtgtgtctatgaaccagatagaaatgcattacggaggaaagaacgagaaagaagaaatcaagaaactcaacaggatgatggcacgtttaattctagttactctctcttcagtgagccctacaagactaacaagggggatgaactctccaaccggatccagaacactttaggcaattatgatgaaatgaaagactttttaactgatagatccaatcagagtcatctcgttggagttcccaaacctggggttcctcagactcctgtgaacaagatcgatgaacattttgttgcagattcaagagcccagaaccagccctcgtctatctgtagcactacaacttccacaccagcagctgtccccgtgcagcagagtaagagaggcactatgggctggcagaaggctgggcacccaccctctgacggccaacagagagcaacacaacagggctctctcaggaccttgcttggagatggtgttggcagacagcagcctcgggccaaacaagtgtgcaatgtggaggtgggccttcagacccaggagaggccacctgccatggcggccaagcacagcagcagcggacactgtgttcagaactttcctccatccctagcttcaaaacccagcctggtccagcagaaaccgaccgcgtatgtgaggccaatggacggccaagatcaggcccctgatgagtctcctaagctgaagtcgtcttcggaaaccagcgtgcactgcacatcatacaggggagtccctgccagcaagccggagcctgccagagccaaggccaagctctccaagttcagcatccccaagcagggggaggagagtagatctggagaaaccaacagctgtgttgaagaaataatccgggagatgacctggcttccaccactttctgctattcaagcacctggcaaagtggaaccaaccaaatttccatttccaaataaggactctcagcttgtatcctctggacacaataatccaaagaaaggtgatgcagagccagagagtccagacaatggcacatcgaatacatcaatgctggaagatgaccttaagctaagcagtgatgaagaggagaatgaacagcaggcagctcagagaacggctctccgcgctctctctgacagcgccgtggtccagcagcccaactgcagaacctcggtgccttccagcaagggcagcagcagcagcagcagcagcggcagcagcagctcctccagcgactcagagagcagctccggatctgactcggagaccgagagcagctccagcgagagtgagggcagcaagcccccccacttctccagccccgaggctgaaccggcatcctctaacaagtggcagctggataaatggctaaacaaagttaatccccacaagcctcctattctgatccaaaatgaaagccacgggtcagagagcaatcagtactacaacccggtgaaagaggacgtccaggactgtgggaaagtccccgacgtttgccagcccagcctgagagagaaggagatcaagagcacttgcaaggaggagcaaaggccaaggacagccaacaaggcccctgggagtaaaggcgtgaagcagaagtccccgcccgcggccgtggccgtggcggtgagcgcagccgccccgccacccgcagtgccctgtgcgcccgcggagaacgcgcccgcgcctgcccggaggtccgcgggcaagaagcccaccaggcgcaccgagaggacctcagccggggacggcgccaactgccaccggcccgaggagcccgcggccgcggacgcgctggggacgagcgtggtggtccccccggagcccaccaaaaccaggccctgtggcaacaacagagcgagccaccgcaaggagctgcgctcctccgtgacctgcgagaagcgccgcacgcgggggctaagcaggatcgtccccaaatccaaggagttcattgagacagagtcgtcatcttcatcctcctcctcggactccgacctggagtccgagcaggaggagtaccctctgtccaaagcacagaccgtggctgcctctgcctcctccgggaatgatcagaggctgaaggaggccgctgccaacgggggcagtggtcctagggcccctgtaggctccatcaacgccaggaccaccagtgacatcgccaaggagctggaggagcagttctacacactggtcccctttggccggaacgaacttctctcccctctaaaggacagtgatgagatcaggtctctctgggtcaaaatcgacctgaccctcctgtccaggatcccagaacacctgccccaggagccaggggtattgagcgcccctgccaccaaggactctgagagcgcaccgcccagccacacctcggacacacctgcagaaaaggctttgccaaaatccaagaggaaacgcaagtgtgacaacgaagacgactacagggagatcaagaagtcccagggagagaaagacagctcttcaagactggccacctccaccagtaatactttgtctgcaaaccactgcaacatgaacatcaacagtgtggcaataccaataaataaaaatgaaaaaatgcttcggtcgcccatctcacccctctctgatgcatctaaacacaaatacaccagcgaggacttaacttcttccagccgacctaatggcaacagtttgtttacttcagcctcttccagcaaaaagcctaaggccgacagccagctgcagcctcacggcggagacctcacgaaagcagctcacaacaattctgaaaacattcccctccacaagtcacggccgcagacgaagccgtggtctccaggctccaacggccacagggactgcaagaggcagaaacttgtcttcgatgatatgcctcgcagtgccgattattttatgcaagaagctaaacgaatgaagcataaagcagatgcaatggtggaaaagtttggaaaggctttgaactatgctgaagcagcattgtcgtttatcgagtgtggaaatgcaatggaacaaggccccatggaatccaaatctccttatacgatgtattcagaaacagtagagctcatcaggtatgctatgagactaaaaacccactcaggccccaatgccacaccagaagacaaacaactggctgcattatgttaccgatgcctggccctcctgtactggcggatgtttcgactcaaaagggaccacgctgtaaagtattcaaaagcactaatcgactatttcaagaactcatctaaagccgcccaagccccatctccgtggggggccagtggaaagagcactggaaccccatcccccatgtctcccaacccctctcccgccagctccgtggggtctcagggcagcctctccaacgccagcgccctgtccccgtcgaccatcgtcagcatcccacagcgcatccaccagatggcggccaaccacgtcagcatcaccaacagcatcctgcacagctacgactactgggagatggccgacaacctggccaaggaaaaccgagaattcttcaacgacctggatctgctcatggggccggtcaccctgcacagcagcatggagcacctggtccagtactcccaacagggcctgcactggctgcggaacagcgcccacctgtcatagggacctcaccctggggccagagtgggctctggtctccacagatggctcaacgtttttggacactgtgctactgaaactcccagccacagcatttatcagactgcggtgaacatttcctcagcattgaacaatgatcttttgcagggcatgtgtgtttgtatgtgtgggtatataagaagccgcctgtgtatgtgtgtaagatacacagctcttcagaacacaccttctttgtctagtttccataatcccaggctagacaaagtgatcagaggtttctgactagaggaagtacacacacacacacacacacacacacacaccgtacactcacacacaatcacagacacacactttctattccattccagtgctaaaccgtgacttcttagaaaattcaaccaaaatctcatgggttagttaaccaggtgcaatacagcacaccaaaagcttgactgccagtgaagatggacctgctcttatactgttgattactttcagtattaatatactattccccaattattttttgattggtatgtattaatgggtaattgaataatgaaaataagccaggtatttttgtgccggaagtttactagattgcatgttaccaaataccctgctcttcctctaattcccttcccccatctgactctattatcaactaaatgcattccaggcaaacagatggacactcacagcccttcccagccccacctccaagtagtatgcaaatggcactgagatttagcaaaaacgcggcgtctttgaaagttaacagacactaaggtagcagtgcctgtgtgttggagctcagttaggagttgaagttttctgcacctgtgataacaagcccaccagccacatgcatttcttcttcctgccactgtgactcggtggctgtagagccacatggcatttgtcagccaatctgtttcaagtcttttctttccaccaatagctttcttacagattttcttggctaaatgaggccattacctagattgtcccttcagtaggagcctgaatccttcgcttaccaggctgagagctatttgccatgataatgctgattctctcactcctcatgcagaatgtgcacctgcagccctttgatgcgttttgatttgggggcgatttttcaggctttgattagcaggctgcttgcaatgcagaagatcacagttcctttctggggcagcagcaaccagagcctcttcctgtgtcctgtgtgtctggtatgtttacaccttgctctgagtttttctcttgttttctttttttaattaagtttacattttagtttctttgacatcttgtttacagtttttgtctgatgttttttcttttgtagtgtcttatgccctagatttagtcatcttgttaaatatatttggatatgaaatcttgacgaaaagaaaataactcctgaaaaagagggtctatcttgccacacgttaaaaacaaaaataatgtccttgtggcctcttacttgataaagttgcaccaggacggtctgagaaaggcaggcggtgtaatatgtggtgcaatccattttttcaaggtgatgacggcacaaaatacttagactagatgctgatccataaacattcactgatattcttacaggttggtttgcagtgttaacatttttgttagcctgatctgtaggtgggaagtaagatcatcataattccttagctctgagcactgattcaaaattgtataaatgactgaacaacttagatgatttgaaattaattgaaaataagaagggcttgtggaatttgcatttggctttggccttcaagcatttggaaatattaagagaatttccattttacatgtctccaactggggtgcttcttacaaccctttcactttttttttgagacgagtttcgctctgttgcccaggctggagtgcagtggcacgatctcggctcactgcatcctctgcctcctgggttcaagtgattgtcccgcctcagcctcccaagtagctgggattacaggtgtgcactaccatgcccagctaatttttgtgtttttagtagagactgggtttcaccatgttggccaggctcgtctcaaactcctgacctcaggtgatctacccgcctccacctcccaaagtgttgtgattacaggcgtgagccaccacacccagccctttcactaatttttggcagagttcacaatcccatcctatgtcagaaacttgaacctaacttaagaaattttgagtcatttttttggaggactgaggctttgttctacctactcttgaagaatcctgatgaaatattcaaacacataaagggatggccctggaggtctatcctgcatacctggagagcttctctggtcctgcccaccttgaaagttgcagactttgttgtaacatctatgtgatgagcttccctgtgaagccccatttgacaggtgggccagcagtgttttatcagcactctgatggcccacatttcccaggaaaacttcttgaaacttaccgttgtgggcagtggtcagagcgtgtagttcttatgactgtcttgtttcatctgtggagcacgtgtggagcacgttggtacagcagtttctgtggggtttggcatgggtgattttggttagtaaccatcctccaattgttgcttgtgaaagtcattcataacttgttccttttacttagttttgttgttactgctgttgttgttggtttggttggttttgagaccgggtctggctctgtagcccaagctggaatgcggtggcgcgatcatggctccctgcagcctcaaactcctgggctcaagcaatcctcctgcctcagcctcccaagcagctgggaagataggcacgtgccaccacacccggctaattttttctttattttttttgtagagatgggggtctcactatgttgcccaggctggtctcaaactcctgggctcaagcgatcctttggcctcggcctcccaaagtgcatgagccaccatgcctggcctgtttagttttgtttcaagttgaaatacctttcttgtgttttctaattagaaaagtaatatctactcattgtaaaaactcaaacagtgcagaaatgtagaaagtagaaagtgtaagtccctggttgtcccttctgcctgagacaaccactgctcacagtttgatgtatatccttccagagactctcaaatttaagcaaataatttttattaccatgtctttttatttgaagacgtacatttgcctccaaagttcaacacaagttcaactgaccatatccttccatgacctgaatagatgctatcctttatcacgatgttcaattgcctttgaaagagagtagtccaggtatattcctgatcaaaatttggcatttttgatgatactactctacacagatcagactcatgtgcagaatcgtgcctggagagagaggtttggttaagacagagatttctggaaacattcaaattgcaaatggaaacttgaaacccacaatctaatgaggaatgtactggaaaaataatctgaagagttgacaaattgtgtactagattgaacacatggaatgcaatgcaatgagactttctgcactaaaacttatcctcatatgtacaacaatgatgtgtgtattatataacagtgatgtgtacatttctgacaccccatacataatatacacagtttgtataaatgcatacatttaaaaatatatatgtacaatacagctaacataaaactgtagtacgcctgaaggatattactagtgcctaatattgagtatgagtcactgcgtgttcgcatcaacttggaagtgcagtaattgttataaaattaatcagtgcagccaacattatttatgaatcacatctttgaaactgtgcagtagcatatacatatatatttttaaataacatttttcacagttttccagagttactgttgaaatctgcatcaccaaaaaaaaaaaaaagcaagatttttttaacaatgtagacactcttcagacccagtaatctgcgtgtgatttcctatttgtagattcccaagagactttagcagtcaccagccttaatgcatgtacaggatattattgtgacttaatttatctgcagtttttaatccatgtgaaattggaatttataaacggacttggattaaacatgtctgcctttctaaggttgcaaatgttacattaaatgatttatgttgtaaaaaaaaaaaaaaaaaa

SEQ ID NO: 264 - protein, 1226 aa, Homo sapiens
MDSFDLALLQEWDLESLCVYEPDRNALRRKERERRNQETQQDDGTFNSSYSLFSEPYKTNKGDELSNRIQNTLGNYDEMKDFLTDRSNQSHLVGVPKPGVPQTPVNKIDEHFVADSRAQNQPSSICSTTTSTPAAVPVQQSKRGTMGWQKAGHPPSDGQQRATQQGSLRTLLGDGVGRQQPRAKQVCNVEVGLQTQERPPAMAAKHSSSGHCVQNFPPSLASKPSLVQQKPTAYVRPMDGQDQAPDESPKLKSSSETSVHCTSYRGVPASKPEPARAKAKLSKFSIPKQGEESRSGETNSCVEEIIREMTWLPPLSAIQAPGKVEPTKFPFPNKDSQLVSSGHNNPKKGDAEPESPDNGTSNTSMLEDDLKLSSDEEENEQQAAQRTALRALSDSAVVQQPNCRTSVPSSKGSSSSSSSGSSSSSSDSESSSGSDSETESSSSESEGSKPPHFSSPEAEPASSNKWQLDKWLNKVNPHKPPILIQNESHGSESNQYYNPVKEDVQDCGKVPDVCQPSLREKEIKSTCKEEQRPRTANKAPGSKGVKQKSPPAAVAVAVSAAAPPPAVPCAPAENAPAPARRSAGKKPTRRTERTSAGDGANCHRPEEPAAADALGTSVVVPPEPTKTRPCGNNRASHRKELRSSVTCEKRRTRGLSRIVPKSKEFIETESSSSSSSSDSDLESEQEEYPLSKAQTVAASASSGNDQRLKEAAANGGSGPRAPVGSINARTTSDIAKELEEQFYTLVPFGRNELLSPLKDSDEIRSLWVKIDLTLLSRIPEHLPQEPGVLSAPATKDSESAPPSHTSDTPAEKALPKSKRKRKCDNEDDYREIKKSQGEKDSSSRLATSTSNTLSANHCNMNINSVAIPINKNEKMLRSPISPLSDASKHKYTSEDLTSSSRPNGNSLFTSASSSKKPKADSQLQPHGGDLTKAAHNNSENIPLHKSRPQTKPWSPGSNGHRDCKRQKLVFDDMPRSADYFMQEAKRMKHKADAMVEKFGKALNYAEAALSFIECGNAMEQGPMESKSPYTMYSETVELIRYAMRLKTHSGPNATPEDKQLAALCYRCLALLYWRMFRLKRDHAVKYSKALIDYFKNSSKAAQAPSPWGASGKSTGTPSPMSPNPSPASSVGSQGSLSNASALSPSTIVSIPQRIHQMAANHVSITNSILHSYDYWEMADNLAKENREFFNDLDLLMGPVTLHSSMEHLVQYSQQGLHWLRNSAHLS

SEQ ID NO: 265 - DNA, 13920 bp, Homo sapiens
cctccccagtcatttaggacaatttcctaagtcgaagctagagatgcgtgatgcgtttggtgacttttcctgggttcttgcttaagcggagccacaggttgtgggggcggccaggcctctggggaagagcaggtgccgcggtgccggcgcgccagcagcccgcggccaaggccacctgctcccagggccccggcacctctgcggggaggcggcaggcagaggacgcgcgcgcagtcgcgcaggagccctcaggcgagtgggggaagcatcgcaagagacgcggacctggagcgcggtcactgcgttaccgcagcgacctgggttacctaagccggcgggactgagaggccgctgcgcgtgggcaggggctcagattgcgcccgcggtgcctgtcccggcccccaccccggaacgattgcagccctgcggggctcgccgcccacaccgcgctgaggacgctgcccaagccaggcgcccgcccccgcccgcggtctcagccgctcgcagcgcgccgcccccagacgcgcgtggctgctggcgagggctgagaccgcgctcccgccggccagttcccagcagcagcgcatcctccctgctccgcgccttcgctccggacccgcgtcgtcgcagccccgcggtgatgagccccgagccggtcccgccgccgccgccgccccagtgtcctggctgcgaccgcgcggagccgatcgcccagcgcttagaggagggcgacgaggccttccgcgcgggcgactacgagatggcagccgagctctttcgctccatgctagccgggctggcgcagccggaccgcggcctgtgcctgaggctgggggacgcgctggcccgcgccggccgcctccccgaagccctgggcgcgttccgcggcgccgcgcggctcggggcgctgcggccggaggagctggaagagctggcgggcggcctggtgcgcgccgtgggcctgcgcgaccggccgctgtccgcggagaacccgggcggcgagcccgaggcgcccggcgagggagggccggccccggagccccgcgcgccccgcgacctgctcggctgcccgcgctgccggcggctgctgcataagccggtgacgctgccctgcgggctcacagtctgcaagcgctgcgtggagccagggcccgcgcggccgcaggtgcggcgcgtgaacgtggtgctgagcggcctgctggagaagtgcttcccggccgagtgccggctgcgcaggctggcaggccaggcgcggagcctgcagcgccagcagcagccggaggccgcgctgctcaggtgcgaccaggccctggagctggctcctgatgataattcattattgctgctgcgggcggagttatatttgaccatgaagaactatgagcaagctctccaagatgccagtgcagcttgtcagaatgaacctctcttgattaagggacatcaagtaaaagctcaggctctttctggattgggaagaagtaaggaagtgttaaaggaatttctctactgccttgctctgaatcctgaatgtaactctgtgaagaaagaagcacagaaggtaatgtgtgaagtgctgttttcagctacagcaaatgtgcatgaaaatttaacatcttccatccaaagcagattaaaggctcagggtcacagccacatgaatgcccaggctctgctggaagaaggtgatgcagggagctcggagaattcatctgagaaatctgatatgcttggaaataccaattcttcagttttgtattttatactgggtctacactttgaagaggataaaaaggcgttagaaagcatccttccaacagcacccagcgctggcttaaagagacagtttccggatgacgtggaggatgcacctgacctgaacgcccctggaaaaattcccaagaaagatctctcacttcaaaggagcccaaactctgagacagaagaaagtcaggggctctcgcttgatgtaactgactttgagtgtgccctctgcatgagattgctctttgaacctgtcactacgccctgtggacacacattttgcctaaaatgccttgagcgctgccttgaccacgccccacactgtcctttgtgcaaagacaaactttcggaattattggcaagcagaaactttaacataactgttctggccgaagaattaatatttcgatatttgccggatgaattgtctgataggaagagaatttatgatgaagaaatgtcagaactgtcaaatctgaccagagacgtccccatctttgtgtgtgccatggccttccccacggtcccatgtccactccacgtttttgagccccgctatcggcttatgataagaagatgcatggaaactggcaccaagcggtttggcatgtgtttatctgctgagcacgcggggctttcagagtatggatgcatgctggagattaaggacgtgagaacgtttcctgatggaagttctgttgtagacgcgattggcatcagtcggttccgagtgctaagccaccgccacagagatggctataacacagcggacattgaatatcttgaagatgaaaaggtggagggtccagagtatgaagaacttgccgctctccacgattctgtgcatcaacagtctgtttcctggttcgcgtctctccaggatcgcatgaaagaacaaattttaagtcattttggggtaatgccagacagagaacctgagcctcagagtaatcccagcggccctgcctggtcctggtggatcctggccgtgctgcccctggagcgcaaggctcagctggccatcctcggcatgacctcgctcaaagagcggctccttgccatccgacggatattagtcatcatcacgcgtaagatgaatagtcggcaagagctggctaatgccagggagagaaataattgatttttctctctgtcaaggtttctggcagcccttgtgcttttataaatgtcaggcatggacgaatagccgtccattcattgtgcttcatcaagtgcttgtggatgaggttccaaaatgggacgcttgccaaacattgagtcctcctcaaaaatgacaattctgtgtctggtgggatctgaccttgtgtgaggttagcctgaagtctgaatggagcccatagttggaaaacaacctaagaaaatctcttagaagcaggtgcttggggaatgcagttcactgacagcacaggaccctgcagatggtttacatgtggtttgggtttcacgagaaagaaggattcacttcccagtcagcatctggctctgccagatggtaaaggcgtgctttagtgtgtagacaatatgggggaaccacgtttttatctggaagtggatttcttagaacacaggctaaccaaaactacgcttaggctttgcgtgttgctgtgaagttgtctgtgaaatcgaataatcacaccattgttcagtgcaggagcccaaactagtccttacccaagaagtagtagcctctggatagaactgtgtttaatgtcctgttgtagtcccaggtgttgtaaattgcatgttgtaatcaaacgaatgtcaaaacataagaaagtataccttggatatagaaaaacctgagaacagtatcattcacttgaggatatatatatatatatttacacacaataaagtgagttaaaattgtatatgcattgggatgtcaaacataaaaccaccaagtgcaaagaatgctttgaaagtagaaccttgtctcattgatcagtggttactaagcatttaggaaacagtcatctttttctattgggatttgcattagaaattagccccatcagtaaatttcagtttactatccatttattaatatacaaaaacattaaaaaatctgccatgccatggtaatctatctattccaggaaaatagatcagaatatatgaagggaggatggccggtatgggatgtaaatattcagtaagtttttctccaacaccaacctaaaattatctttatttttttgaaagaaagttttacggtgatcagaccaggtgttatctgttaaaggacagtagtatgacttccatcctgtaatgcacgttggtgatattgattggaataactgaatctgagatactcatatgttctctctggcccaaccagctggtgcatttggttggcttcctcgtctgtaaggtggacattcttaaccagagggtcacgaccacatcacagctgcaagttttgctttgttcattgaaggtgattttttagttttaaaatatatatatctcataatatacaatgttgatggtatatcaatccatcaagcattttattagaaagactttataatattattaatttttctttagttttcagtagataaagtagtttcagtagataaagactttataatattattaatttttcttttagttttcagtctcatcatgggagttagaaaataccagcatcacttaattgtaaagagaaaatgtgaaagtattttccaatccaatgtttcaagtgcctcacttattgtgaatctcaaatatcatcttgagatggtttaatggcagtttggccaagtgatttctaagagattttattaatttatgcattaacaatagtattcaactttcttaggcattataacctaacccgatcatttgattggaataactgaatcattcattgattggaataaaataaagaaaacaaaatgcatctcacatgccagaagacctttaccagaagtggttcatgaaaatcagtatgcattgaccattctctgcctttcccttttggaaaatttttttgtaccttcatatcacagctgaatagttatcaatgccatttccatttggaagtatctaaataaccacaatgtgatcacagcttctccacgagccttcctgaagtaaagctggtatgcttgctataatacttggaacctgttgctttctcttcctcactctttaaatgtcataaggtcacacagttcttggaatcagaactattcagttatttcttcatgattctgcctggctttctgagtcttctccttcggcatgttatgtaaaagtctgaacaacaatgatgacgcagacgagagcaacatacgtttttattttttgataggtttttatttttttgataccagagggaattaactatgatcacatcgtgctctctctgttcagcatcacacgcccacatactgcagtgtgggagtagattggtacttactgagcacttagaaacatcacgcatcaggaaccgggtcagggtgacagcatcctacggtcatatcatgaaggaagcctcccttacaaacctaaaaaaaaaaaaccccagcttcagtttgctaccaattaagctaaagcagaacggtctgcttcctcctccgcctgcccccttctgcctcttttctgttggggagatgccaattctaaggatttctcagaaaataatgtaatctctcattcaatgtcaggacattccagcttaattgtactgaaagtgctccaataggcatgctctcgttacattggaatcaaagcagaaaagagtaatagcagcgtgggggagtcatttttcttcttgaggaacaatacatgctgttctgtatttttccattcatcgcccaaacctgcctgtgtctttgaaatgcaagtaagatcccaaaggcagctttctgaaagcccgtggcatttttagcttatcccatcccccgtgtgtgtcctcatcttcagaattgaaagttaggatactttttaaagtttcaaaagaaaataatttaaaatgttaaggtttatccatagaaacacaataattcttaaccaattcatgtaccaaattcaacagtattatctcatttttagggtcacaaatgtgtcctttttgcacttaaacctcctccctctctcaaaaacaaaaacaaacaaacaaacaaaaaacacaccaagactgtttaacaaattgtatctcaactcttaatatatgttaagtcttaccacaggacatttgaatcatcaaggaacagttgaagtttatggatggtagaataacaatgaactatgatattatcactttattataaactttttggaaaattggcagttgctaccatcgaaatactccattgcctgtgttacatagaatttgttataatttttaagggctttaaaaaaatacccatctgtttcttctccttcttgttttcttttgtgccccaccacttaaattacttgggtaaataccactcttcaaaatttgaatactgtctatcaaataagaagaagtgtgaaagatatgaagaagaaaggtgatagcaaattagaagaaaataaatgtgggtgatttcttttagttgaaagcacagagttttatttttccccagtataactattgagtagggtagggaggtccctgtatccccatttttattttttttgagatggggtctcactctgtcacccaggctggagtgcaatggcgcaatctcgtctcaccacaacctccgcctcctgggttcaagtgattctcttgccttggccccctgagtagctgggattacaggcacgcgccaccacacccagctaatttttgtattttttttttttagtagagatggggtttcaccatgttggtcaggctggtctcgaactcctgaccccatgatctgcccgcctcggcctcccacagtgctgggattacaggcgtgagccaccgtgcccggcccatctccccatgttttagcatagacagcagcggcattcagtggaaggagttcttccccttcaacatcgtccttcccaaaggccacattctgattctattgttcaccaaaaactaattcccagggaagcccgctctggatgggaaggatgagctgcgtgagccatcgcccacacagggagataaccgaacccctttgccagcatcaccccctctctactggggtgagacacttcattcagagcactggctctgactcccaggggaaagtctttttccctttacaactcctcacctcagcctcaccttgactttcacttctcaactgctgaattctataaaatagccttttagcagtgactcagcttttaggtgagcacagataatgaagaaattgaagtgccaccattgcactcccccaagttggggacataaactcgaatttgcacccaggtctgataaaagtaactgattgaggacgcagaaaggtggatgccattgacagcgttgactgttctcacaattcctacagaaatgaaagaaggagaggcccagcagaccacaccgggccatgaggggaagcatgggagacaggcagaagcaggagtgaggaggaacgtggctcagaccctctactgtatgttctgcaggaaagggcagggaaatagctaagactggctggtctgaataacagctcagactctaggctatacaggtggtctctagccatctggcacctagccccgggtcgttagggtgggggatattgcttcctaggttgtaagagccagatagaggaggatgggctctggattggtcactttgctcccagggtagccctttgctgtatctaagaattggctcaccctgggatgggcagtttctcctgggtcagcgaggcccctgagatgtcaaaatatcataaaatatagaaatcatgattaatacaattggtcctctgctgttttgacatactaaggtcacttttgatagcagaaacttttaaagagtagggcatacgttgccctgaagagcatagaaaacattttattctgagagtagaaaggaggaagacacgtggagatacaggagtcccttaggctggcccatagctgagtctctcatgtgtgtggcattagtcaagaatgtagttctgcagtttgcggggggggggtctctaacatttcttggtgcagttgttaacatgtgttaaacatatgagtctgatgatgatatcgcggtgtttctcggctcggggtggcaggtctggcggttgtgtggctgggggtgtgcactgatagttcagtaaaggataagtagagactcgtggtgttcatgtgtcaccacagggagggagtggctgtggagacccaggacaggaagtcgcggtggaaagcaggctggggtggtaggagaaggcaccgggggtgggtgctcctcccccaggggttgaggagttgactgatagggggcagttacctcctgggaaagcaagacgctcccttaagttttagaatggtacagagagtagtcccttctaccagagtttccatttagacatgggagtgtagggggccatgtttcggcagaagcagggcatgtatcagcattagtggactcctcagtattaaaaggaagaacagcaaacatgtcatgtgcccactttgtgcctcaggagaggtagcccgtggacatcgctagggcagaggttttaatatctgggacaaagttatctcccacggcgaggtcgtggctgggaccatgtcatcttcagccgtgagctgctgggctgggcaatgtcttctgggatgtgagacgtggggtctcctttctaagcggacccccactcgtgctgatgtgggtcccagcatttgccgcgtttggttgaaacagtggcttacctggagggtctgggtctctggatcataaaccagcgaaagcccccacatcagtggtgacaagatcaatagaccccagaatgtgtgcagctgtgcttgatagggttttggttcttgctttttggtggaagtttaggctcaagtgggtcccgtatcggatgagcagctgcacggcctgtgggagccctggggttagtgggtccaggagagaatgtgttctctctctgggctccagccctgatggggtggggataagatgcaagatttataggaatagggggaaacattatggaaggccccaatatgtaatgagcttttatatacaagaatgcaagacatagccctctttttatgtttaaaggggactatggtaatgttttttaaagtttgtgtgaggtgtgagtcaaccgaaaggccctaaattaagagagattcaggtttgtggtgcaagatagaggcccatttcggggtctgtttgcagaccagaatttgaaatggagttgtttgaggagaccattgtgtgtcttcgtgaaaccgattgtgtggaacctatcagggctgtggaagttgtagcgaatgccttttcccagagcccagcattgtggattccgagaagtggcatgtgtgtctcagtgacttccagtgatgcctgccactctgaagagatgaaggagtgtcctggcaagacctggaatcccagctgtagcacctgtggagagatgtgatttagatttggatttggggtatctgtgaggaagagtcccagagtttttcatcctgaagggggcaactcttgggcagtggtccaacagttggccataaatgtgaagctggggcgctgtgctgaccagggcatccagcgttaagacgactgcctaactttggccacatgcgttgttttttgggttccgtttcgtatcagggcatgctggctaaaagatgggaagcagcaacattctcttgggctccatcatttatatgagggttggcaatgccatctgtaccctctgtgaactcccactgctgttcactcagttaatctaagggacaccaaggggtctgcgggaggatgacctcacaagggactgaggacatgggagaccaccctcctgtgggtagaatacaccagagggcccaggcttgactctgtcctgtgttaaggaggcatcggtagttttgctgagcttgtcaggtgtttataatggacagttggagattggggtcctaggcttaggtctttgagagcctctgtgtccaggagagcccagtaggcatccagccatttactgctttaatagggtagcatgaggctgagagggatagtttcttgcatccaaagcccttaggcaccttatgtccatcctaagtgggccagagactccagggctgcatagagcttgccagagcttctataatgaaggggtctctgagggcaccaacaggagtgcccatggattttaaggtttgattatagaggttgtttatggagggtgccccatttaaagcaagctgatttgtaagcagcagcaagaagattaagtaaaatttgtaaatgaggactacattgccatcagaacctcgaaagtatctaaagatgttggacttgtatgtccttaatgagtgtgacaatgagtttcctcatttgtgctcctggagaaggcggatgtggtgaagaccctgtctgcagacattgtgtgccatggcaaagccgtggagctccctgtgggtggcctgcaaaggtgtatgtgcccctcagggcagaaggcaaacggcagccaagaagctgtgcaagtagacacttaatgggacatgttagccaaatctgtaagagcaaaatattggccagttatttattgtgtagaattaataattttaataataatggaaattgggtaatggatgggactgcagcaataaggttgtagtaatccaccatgaggcacacttgtttttttccaggtttaaggataggaaagattgggctgttcaatggagaaacaagggtataatcacccctttattaattagtaagttttaatccttgaatacctcatattaactgttttaactggaggtccatggggcatcattttatcaagctagtttataactgccaaagactgactttaattttaatttattatttgttttattagagtgtctgtgttcaatatgggatattagggcgttgggtactatgaccacaggaaatttagacaggctacagttaaagtgaagcataccttacccatccaccccccattttatatttagttgcctttttaaaaagattataggggtacaatgtttagatttagtgggatctccaggtataactgtaatttgagccccagtgttaagactatgaagctttgtcaatgggtacattttagcaaatgttacaattaatttagaacctaagttatggagacacaaaagccaataggcacccttttatgttttggttaaatgtttcagtatatacatcttatttatttgtaatattagtatataatttgttgtatacatttttagtgtataagcgttggatttctaattggatcagattagggaccttccgtttagctgcatatgtacatatacatgtacaatttattatatatttgcgttaaaatagcctatctgcatgtgtatatatgtgtgtatgtgtatgtatatgcactcacacgcataaatacacagtctatttagttacctttaatgttttttcccttgtacctaggctttttctcgctttttcctttttttctgattttgtggcaatttagttggaaggaggcggtcccagcatgttgacaggcagggtgttcagagtgcccaggcacactggtggggggtggttacaggctcacgtagctcaggggcttctgcaggtctcaggggagtgggaacaaagtgtcccaccccttccccttttcctcaaacctcaagccactggtctctatggatagatcctttgcatcccaccggattgaggaatgagtcacaacagctgcaaggctcttaaagcaacatttaaaccttttggcggctgtcatttctgtgaggagggtgcctctcaccggccgcatggccggaggatccctgcagcgctttggagaccaacacccagatcctttgcccaggagtgcgattaattcctcactggatgctgggggagggcccctcaggtgagcagcccaccactgacttcagcgttgctggctcggttatcagactctcatccaacacaagctcacagggaaagccgttccttgctccttgtggagggagctaccgtcattgccctgagaccaccagccaagaaagtaggtatgtccaggtagggaattcagagggacccagtgcatccaattatacaattatacccagaaggtcctgtgtaggggactgcgattgacatcaccctagtctgcagcaccaaggactgaatgagctcagtcctcttataatttaggctggactgtcacagacactggcagacacagcatacgtggtgcagccaaagtgcaaacatgccagcagcggccatgctccccagggtgggggtccagttagtaagccacgcgcagccaagaggcgaggcatgccctgtgccacacacggactcaccctgctcactgtgcccgtggtatcgaaatgtacccacgtttaattcataaaggagaggctgctgtcattgaaagaaaagtttgttacttgcatttctggagaaaaggagcgcaccaggccacgcagggccacaggaggaggacgcaccagagtggtcaggaggcagaactaggcgagcagctttccactgtgtctccatggcaaaggcgaagatgggcgggggcagagtgtaggattggcaggtttgaatgtcttgggcagtagctacaggggtggtctccagctgcctggtgcctggccctgggtgatcagggtgaggggatactgccttctgcagtggaagagtcaaatcgaggagatggactctgagttggttagtgtgcaaaggtgcactcccaagggacccctttgctatctctaagaattggcctgccctgggaagggcagtctctccccagtcagtgaggtccccaagatgtgaaaacattatacattataaaaaagcatgattaatataagctcattctagcatttcaggttacagcttctagaagaggtttgtagtctcaaatgagtaggtttttcctctagagaggggcgggcctggaccttcaagcaccccttggtgtgtttaggagctcaggagcagaagcacctgcctgcagccctgcagctaaggaagttctctcagtcactcagagcagggaggggctgagagagtcatgtgaggctcccggggtactacgacagccctcgaggtgaaggattggccctgatcataatagagaaccctgaggaagtttactgtcatgagtctcggctggttggcgcatgtgacctttgaaggatgaagatggagtttgcaacatgagtatctctaaccttttgcttttcagggatcattttcaaaaattgcattggggccttcgttatttaccatagtattttcactttcatagttttgtcacctttttgtactgtgaacagttcaaccagtgaccgacttctctctcatgctgtttaccccacacacaatttcccactcaattctgaaaataagaacctgttaataggttggaaagctgtgtactctattcatatattgttctttcatgctagtggagagtggtgtcattagcatcttaattttagagttgtgaaatgattttaccaattaggaattgaatgtgtattttttttctgtttaataagaagagcaaatttgaataaataagctggtgtagataaacttaataatcatgctttttcttgtttggagataggtgatgtgttgtcatatcctgtgatacaggtcactcatctggccttctgtttctgaagtttaagtctggtttgaatatgtaataatactactcagcatttcttgttgcctaagtgagacgaaacttaaatgttatgatatttacttcatgtattcttgtactgttcatttcaattaattggtattgtatatctaatatgtgatatttgaactgaataaaacttacagtgttgtaaatgttctttaataaataatcacacctaagtaataggctagactgatgagaaattagatcaaatcagtgcctaggcctttgtgtttgtgtcgtagggatgtactaacacatcaccacagactgacggcttttcacaataaatcagttttcttcgctcaaaaaaaaa

SEQ ID NO: 266 - protein, 754 aa, Homo sapiens
MSPEPVPPPPPPQCPGCDRAEPIAQRLEEGDEAFRAGDYEMAAELFRSMLAGLAQPDRGLCLRLGDALARAGRLPEALGAFRGAARLGALRPEELEELAGGLVRAVGLRDRPLSAENPGGEPEAPGEGGPAPEPRAPRDLLGCPRCRRLLHKPVTLPCGLTVCKRCVEPGPARPQVRRVNVVLSGLLEKCFPAECRLRRLAGQARSLQRQQQPEAALLRCDQALELAPDDNSLLLLRAELYLTMKNYEQALQDASAACQNEPLLIKGHQVKAQALSGLGRSKEVLKEFLYCLALNPECNSVKKEAQKVMCEVLFSATANVHENLTSSIQSRLKAQGHSHMNAQALLEEGDAGSSENSSEKSDMLGNTNSSVLYFILGLHFEEDKKALESILPTAPSAGLKRQFPDDVEDAPDLNAPGKIPKKDLSLQRSPNSETEESQGLSLDVTDFECALCMRLLFEPVTTPCGHTFCLKCLERCLDHAPHCPLCKDKLSELLASRNFNITVLAEELIFRYLPDELSDRKRIYDEEMSELSNLTRDVPIFVCAMAFPTVPCPLHVFEPRYRLMIRRCMETGTKRFGMCLSAEHAGLSEYGCMLEIKDVRTFPDGSSVVDAIGISRFRVLSHRHRDGYNTADIEYLEDEKVEGPEYEELAALHDSVHQQSVSWFASLQDRMKEQILSHFGVMPDREPEPQSNPSGPAWSWWILAVLPLERKAQLAILGMTSLKERLLAIRRILVIITRKMNSRQELANARERNN

SEQ ID NO: 267 - DNA, 3790 bp, Homo sapiens
gccgagctgcgcacgtgcggccggaagggaagtaacgtcagcctgagaactgagtagctgtactgtgtggcgccttattctaggcacttgttgggcagaatgtcacacctgccgatgaaactcctgcgtaagaagatcgagaagcggaacctcaaattgcggcagcggaacctaaagtttcagggggcctcaaatctgaccctatcggaaactcaaaatggagatgtatctgaagaaacaatgggaagtagaaaggttaaaaaatcaaaacaaaagcccatgaatgtgggcttatcagaaactcaaaatggaggcatgtctcaagaagcagtgggaaatataaaagttacaaagtctccccagaaatccactgtattaaccaatggagaagcagcaatgcagtcttccaattcagaatcaaaaaagaaaaagaagaaaaagagaaaaatggtgaatgatgctgagcctgatacgaaaaaagcaaaaactgaaaacaaagggaaatctgaagaagaaagtgccgagactactaaagaaacagaaaataatgtggagaagccagataatgatgaagatgagagtgaggtgcccagtctgcccctgggactgacaggagcttttgaggatacttcgtttgcttctctatgtaatcttgtcaatgaaaacactctgaaggcaataaaagaaatgggttttacaaacatgactgaaattcagcataaaagtatcagaccacttctggaaggcagggatcttctagcagctgcaaaaacaggcagtggtaaaaccctggcttttctcatccctgcagttgaactcattgttaagttaaggttcatgcccaggaatggaacaggagtccttattctctcacctactagagaactagccatgcaaacctttggtgttcttaaggagctgatgactcaccacgtgcatacctatggcttgataatgggtggcagtaacagatctgctgaagcacagaaacttggtaatgggatcaacatcattgtggccacaccaggccgtctgctggaccatatgcagaataccccaggatttatgtataaaaacctgcagtgtctggttattgatgaagctgatcgtatcttggatgtggggtttgaagaggaattaaagcaaattattaaacttttgccaacacgtagacagactatgctcttttctgccacccaaactcgaaaagttgaagacctggcaaggatttctctgaaaaaggagccattgtatgttggcgttgatgatgataaagcgaatgcaacagtggatggtcttgaacagggatatgttgtttgtccttctgaaaagagattccttctgctctttacattccttaagaagaaccgaaagaagaagcttatggtcttcttttcatcttgtatgtctgtgaaataccactatgagttgctgaactacattgatttgcccgtcttggccattcatggaaagcaaaagcaaaataagcgtacaaccacattcttccagttctgcaatgcagattcgggaacactattgtgtacggatgtggcagcgagaggactagacattcctgaagtcgactggattgttcagtatgaccctccggatgaccctaaggaatatattcatcgtgtgggtagaacagccagaggcctaaatgggagagggcatgccttgctcattttgcgcccagaagaattgggttttcttcgctacttgaaacaatccaaggttccattaagtgaatttgacttttcctggtctaaaatttctgacattcagtctcagcttgagaaattgattgaaaagaattactttcttcataagtcagcccaggaagcatataagtcatacatacgagcctatgattcccattctctgaaacagatctttaatgttaataacctaaatttgcctcaggttgctctgtcatttggtttcaaggtgcctcccttcgttgatctgaacgtcaacagtaatgaaggcaagcagaaaaagcgaggaggtggtggtggatttggctaccagaaaaccaagaaagttgagaaatccaaaatctttaaacacattagcaagaaatcatctgacagcaggcagttctctcactgaacacatgccttcctttcatcttgaataactttgtcctaaaatgaattttttttccccttgatttaacaggatttttgtagactttagaatttggacttacctaacaagagtataaattgacttgggttgcaagcactgagcactgttacttctatcacgtctctcttttatttctgggatataaaacaggctttaagtttcttggttgcccaagggcagagcaaggaatatctggtgtttcttgtgatgataatattttaattttaaatatccctccctcatacaagtgtatgttaccattttaatataattctttttgtacctttccttcttgttttgcgaagatttttgtggcatggattgctgtgctcactgctgtaaaaggtgacctagtgtactgggcagctggtggcggtgcagaaaagagtctcaggttattttttgtttttagttatttcttggaccttgacagtatctaatgactcctcctgaaaatgctgcagtataaaagagcaaagagctttgggaaatacctaagaagcaccttaagattagggtggcattgcttttatagattcttgattttaaagcaacaggcctttctcaggtgttgcattttttggagcaaaaactatgggttgtaatttgaataaagtgtcactaagcagttataacgtttgatggctggggggtaggaagaggatggaattgagatgtttgagcctcatttacatcaatagaggtgtaatgtactgcatttcttcatttggtaacataacaaagactttcatacaaagaacgatgatgctcctcattaagatttgtttaattcaaggtggtttggatttggtaagcctttgcactctgtagagtacttagaagacaagggcaacttacttggagttagagccaagctgtcagacggtgcccagcacacattaatgttagcttctttctgagaaaaaaatacctcttccaggccctgaaacaaaaaatacatttgctgtgaagattgaaaatgaacaaagttagaaaaaaaaacagcaaaatcagtgatttagtcagatgagtttttcgttgtaggagcacttgatttctagtgtgttttgtacagtatataactacaagatagtacattttgtagcagttcaaagccaaagttgctagcatcattttgctgttgtgccagttaatcataggatcccattaaataagtgtgctaacatcgaatatagagaaaactggtaaagaacattccagtaggaaaagaaaagaacaatcttccatttctgggcttggccaccatcaccctggtcggacctgtcctggacttccaaccttgactgctgagctcctggcttagcttcttgggttcctaattcctggtgtttaataattctctccacgatcatgtttttctgattttttttttcagaaataatgttttttaaaagacaaaaacaaagggaagaatatttaattactgagcagaagtaaatactgttggcattttgtacataatctaatttttatatgcatgttcatgctttttaatttttttatcaaaaattaagtcatctacctactacttgtaaccagcttgtttcataacatgttattttcctgtgtcattaaataattacttcaatgttgaaaaaaaaaaaaaaaaaaaaaaaaa

SEQ ID NO: 268 - protein, 670 aa, Homo sapiens
MSHLPMKLLRKKIEKRNLKLRQRNLKFQGASNLTLSETQNGDVSEETMGSRKVKKSKQKPMNVGLSETQNGGMSQEAVGNIKVTKSPQKSTVLTNGEAAMQSSNSESKKKKKKKRKMVNDAEPDTKKAKTENKGKSEEESAETTKETENNVEKPDNDEDESEVPSLPLGLTGAFEDTSFASLCNLVNENTLKAIKEMGFTNMTEIQHKSIRPLLEGRDLLAAAKTGSGKTLAFLIPAVELIVKLRFMPRNGTGVLILSPTRELAMQTFGVLKELMTHHVHTYGLIMGGSNRSAEAQKLGNGINIIVATPGRLLDHMQNTPGFMYKNLQCLVIDEADRILDVGFEEELKQIIKLLPTRRQTMLFSATQTRKVEDLARISLKKEPLYVGVDDDKANATVDGLEQGYVVCPSEKRFLLLFTFLKKNRKKKLMVFFSSCMSVKYHYELLNYIDLPVLAIHGKQKQNKRTTTFFQFCNADSGTLLCTDVAARGLDIPEVDWIVQYDPPDDPKEYIHRVGRTARGLNGRGHALLILRPEELGFLRYLKQSKVPLSEFDFSWSKISDIQSQLEKLIEKNYFLHKSAQEAYKSYIRAYDSHSLKQIFNVNNLNLPQVALSFGFKVPPFVDLNVNSNEGKQKKRGGGGGFGYQKTKKVEKSKIFKHISKKSSDSRQFSH

SEQ ID NO: 269 - DNA, 1219 bp, Homo sapiens
atggtttcagaggcattaggccaaaaaactgcaaaagggagcctccttctgggaagtctccggcccttccgcggctcccggcgtctccagcagagggctctcggctgtgccgactcaggacagctgctgcgacggggccggctacgcttgtcagagcagcagctggtgattttggacttgcctttgctggcaggggagcgctatcgagggttcattttatccagcttgaggaaagaaaggtcggagtgctccggaccaagtgccccctgcactttcaacgccgtaggtctcccggcagccctggaaggacagtcttacccggacgccacggtggtctcccggcagccctgggaaggacagtcttacccggacgccacggtggtctcccggcagccctgggaaggacagtcttacccggacgccacggccgagctgcccttccctccctgctgcccccagggaaggctgctggtgtcctcagatgcgggcaggaggaacccgccagcgcctgagagcctggcccgaaccaggcctggaggtgctggggcgaagacacagaggatgtggcctccatccctggtaacagacggttaccagggcggctttgggtgaggacattgaaaaaggtcagactccctgggagcagcgccctggactccattctcatcacagaccagtggttcccaattgaagtcagttttgctcctcagggcacacttaacaacatctggagacatttttaattgtcctgaccgagaggacaatgctactggcatctagtggacagaggccagggatactgctgaacatcccgcagtgcacaggacgcctgcaacacagattatccagccccaaacgtcaatagtgccggagttatggaaccctaatgaagacaattcttgaaggcatagactgaatcttatttatctttgtttccctcatgtctcacaagcagagtatgagttcagcaaataggagttgaacagaaatcaggaggaggtgctgattgacaggaaaaaagaaagatttagtttagagctgagaattcagctggacagccataggggctctggcatggagactggaagtcagaagagaatttgcagcaagacatttagagccatttatccagccatcataattttattgagtaactattttgtgtgaggcactgtactggatgctttggcaacagagataagcaaggcaacccctgtga

SEQ ID NO: 270 - protein, 203 aa, Homo sapiens
MVSEALGQKTAKGSLLLGSLRPFRGSRRLQQRALGCADSGQLLRRGRLRLSEQQLVILDLPLLAGERYRGFILSSLRKERSECSGPSAPCTFNAVGLPAALEGQSYPDATVVSRQPWEGQSYPDATVVSRQPWEGQSYPDATAELPFPPCCPQGRLLVSSDAGRRNPPAPESLARTRPGGAGAKTQRMWPPSLVTDGYQGGFG

SEQ ID NO: 271 - DNA, 1315 bp, Homo sapiens
gcagttctttgaatttctcaccctaagatctggcctgtacattttcaaggaattcttgagaggttcttggagagattctgggagccaaacactccattgggatcctagctgttttagagaacaacttgtaatggagccttcatctcttgagctgccggctgacacagtgcagcgcattgcggctgaactcaaatgccacccaacggatgagagggtggctctccacctagatgaggaagataagctgaggcacttcagggagtgcttttatattcccaaaatacaggatctgcctccagttgatttatcattagtgaataaagatgaaaatgccatctatttcttgggaaattctcttggccttcaaccaaaaatggttaaaacatatcttgaagaagaactagataagtgggccaaaatagcagcctatggtcatgaagtggggaagcgtccttggattacaggagatgagagtattgtaggccttatgaaggacattgtaggagccaatgagaaagaaatagccctaatgaatgctttgactgtaaatttacatcttctaatgttatcattttttaagcctacgccaaaacgatataaaattcttctagaagccaaagccttcccttctgatcattatgctattgagtcacaactacaacttcacggacttaacattgaagaaagtatgcggatgataaagccaagagagggggaagaaaccttaagaatagaggatatccttgaagtaattgagaaggaaggagactcaattgcagtgatcctgttcagtggggtgcatttttacactggacagcactttaatattcctgccatcacaaaagctggacaagcgaagggttgttatgttggctttgatctagcacatgcagttggaaatgttgaactctacttacatgactggggagttgattttgcctgctggtgttcctacaagtatttaaatgcaggagcaggaggaattgctggtgccttcattcatgaaaagcatgcccatacgattaaacctgcgagatcggagttctttaattaggaatggaatgcaacagatttggacaagtcaaggacaagagctttagagagaccaaagagtttttcactgttaaagtgtccagtatgtagccgagaaccatatggagaacatcaaatacagtggaacaaatgtaactgctattgatgtcacactttgtgaagtagtctttgttgcttaaaaagggtgacatctagtggctaaacatgttatttcaaataaataatatcgaaataaaaaaaaaaaaaaaaaaaaaaaaaaaaa

SEQ ID NO: 272 - protein, 307 aa, Homo sapiens
MEPSSLELPADTVQRIAAELKCHPTDERVALHLDEEDKLRHFRECFYIPKIQDLPPVDLSLVNKDENAIYFLGNSLGLQPKMVKTYLEEELDKWAKIAAYGHEVGKRPWITGDESIVGLMKDIVGANEKEIALMNALTVNLHLLMLSFFKPTPKRYKILLEAKAFPSDHYAIESQLQLHGLNIEESMRMIKPREGEETLRIEDILEVIEKEGDSIAVILFSGVHFYTGQHFNIPAITKAGQAKGCYVGFDLAHAVGNVELYLHDWGVDFACWCSYKYLNAGAGGIAGAFIHEKHAHTIKPARSEFFN

SEQ ID NO: 273 - DNA, 1688 bp, Homo sapiens
gcagttctttgaatttctcaccctaagatctggcctgtacattttcaaggaattcttgagaggttcttggagagattctgggagccaaacactccattgggatcctagctgttttagagaacaacttgtaatggagccttcatctcttgagctgccggctgacacagtgcagcgcattgcggctgaactcaaatgccacccaacggatgagagggtggctctccacctagatgaggaagataagctgaggcacttcagggagtgcttttatattcccaaaatacaggatctgcctccagttgatttatcattagtgaataaagatgaaaatgccatctatttcttgggaaattctcttggccttcaaccaaaaatggttaaaacatatcttgaagaagaactagataagtgggccaaaatagcagcctatggtcatgaagtggggaagcgtccttggattacaggagatgagagtattgtaggccttatgaaggacattgtaggagccaatgagaaagaaatagccctaatgaatgctttgactgtaaatttacatcttctaatgttatcattttttaagcctacgccaaaacgatataaaattcttctagaagccaaagccttcccttctgatcattatgctattgagtcacaactacaacttcacggacttaacattgaagaaagtatgcggatgataaagccaagagagggggaagaaaccttaagaatagaggatatccttgaagtaattgagaaggaaggagactcaattgcagtgatcctgttcagtggggtgcatttttacactggacagcactttaatattcctgccatcacaaaagctggacaagcgaagggttgttatgttggctttgatctagcacatgcagttggaaatgttgaactctacttacatgactggggagttgattttgcctgctggtgttcctacaagtatttaaatgcaggagcaggaggaattgctggtgccttcattcatgaaaagcatgcccatacgattaaacctgcattagtgggatggtttggccatgaactcagcaccagatttaagatggataacaaactgcagttaatccctggggtctgtggattccgaatttcaaatcctcccattttgttggtctgttccttgcatgctagtttagagatctttaagcaagcgacaatgaaggcattgcggaaaaaatctgttttgctaactggctatctggaatacctgatcaagcataactatggcaaagataaagcagcaaccaagaaaccagttgtgaacataattactccgtctcatgtagaggagcgggggtgccagctaacaataacattttctgttccaaacaaagatgttttccaagaactagaaaaaagaggagtggtttgtgacaagcggaatccaaatggcattcgagtggctccagttcctctctataattctttccatgatgtttataaatttaccaatctgctcacttctatacttgactctgcagaaacaaaaaattagcagtgttttctagaacaacttaagcaaattatactgaaagctgctgtggttatttcagtattattcgatttttaattattgaaagtatgtcaccattgaccacatgtaactaacaataaataatataccttacagaaaatctgaaaaaaaaaaaaaaaaa

SEQ ID NO: 274 - protein, 465 aa, Homo sapiens
MEPSSLELPADTVQRIAAELKCHPTDERVALHLDEEDKLRHFRECFYIPKIQDLPPVDLSLVNKDENAIYFLGNSLGLQPKMVKTYLEEELDKWAKIAAYGHEVGKRPWITGDESIVGLMKDIVGANEKEIALMNALTVNLHLLMLSFFKPTPKRYKILLEAKAFPSDHYAIESQLQLHGLNIEESMRMIKPREGEETLRIEDILEVIEKEGDSIAVILFSGVHFYTGQHFNIPAITKAGQAKGCYVGFDLAHAVGNVELYLHDWGVDFACWCSYKYLNAGAGGIAGAFIHEKHAHTIKPALVGWFGHELSTRFKMDNKLQLIPGVCGFRISNPPILLVCSLHASLEIFKQATMKALRKKSVLLTGYLEYLIKHNYGKDKAATKKPVVNIITPSHVEERGCQLTITFSVPNKDVFQELEKRGVVCDKRNPNGIRVAPVPLYNSFHDVYKFTNLLTSILDSAETKN

SEQ ID NO: 275 - DNA, 1706 bp, Homo sapiens
cgtttttgttgaaagagtcattaacggagttaggagttgatggcagtttcaataacaggtcattgccgagaaaaggatagcactataatatgcagaaatctacaaattctgatacttccgtggaaacactgaattctacccgccaaggcacaggagctgtgcaaatgagaatcaaaaatgccaacagccaccatgacaggctcagccaaagtaaatccatgatcctcaccgatgtcgggaaggtcactgaacctatatccagacacagaaggaatcattcacagcatatcttgaaagatgtcattcctccattggaacaactgatggttgaaaaagaaggttatctgcaaaaagctaaaattgcagatggaggaaagaaactaaggaaaaactggtctacttcctggattgttctttctagtcgaagaattgaattttacaaagaatccaagcaacaggctctgtccaatatgaaaactgggcacaaaccagaaagtgtggatttgtgtggagcacacattgaatgggccaaggaaaaatcgagcagaaagaatgtctttcagatcacaacagtatcaggaaatgagttccttctacagtcagatattgacttcatcatattggattggttccacgctatcaaaaatgcaattgacagattgccaaaggattcaagttgtccatcaagaaacctggaattattcaaaatccaaagatcctctagcactgaattgctaagtcactatgacagtgatataaaagaacagaaaccagagcacagaaaatctttaatgttcagactgcatcacagtgcttccgatacaagcgacaaaaatcgagttaaaagcagattaaagaagtttattacccgaagaccttccctgaaaactctgcaagaaaaaggacttattaaagatcaaatttttggctctcatctgcacaaagtgtgtgaacgtgaaaattccacagttccgtggtttgtaaagcaatgcattgaagctgttgagaaaagaggtctagatgtggatgcaatatatcgagttagtggcaatctgcaaacaatacagaagttaagatttattgtcaaccaagaagagaagctgaatttggacgacagccagtgggaggacatccacgttgtcaccggagcactgaagatgtttttccgggagctgcctgagccgctcttcccttacagtttctttgagcagtttgtggaagcgatcaaaaagcaagacaacaacacaagaattgaagctgtaaaatctcttgtacaaaaactccctccgccaaatcgtgacaccatgaaagtcctctttggacatctaactaagatagtggccaaagcctccaagaacctcatgtccacgcaaagcttggggattgtatttggacctacccttctgcgagctgaaaatgaaacaggaaacatggcgatccacatggtctaccagaaccagatagctgagctcatgctgagtgagtacagtaagatcttcggctcagaggaagactgacagacaagacaagctactgaatacgttcacatctgtcttgatgcctaatatttttacatttctgtaaacatatttctgaaatattttttgcctttcaagcgacagatgcctcattttgtgaaaacttaatgatgattttgtgtttaagttccaaacatttgaataaaataattgacaataaaaaaaaaa

SEQ ID NO: 276 - protein, 475 aa, Homo sapiens
MQKSTNSDTSVETLNSTRQGTGAVQMRIKNANSHHDRLSQSKSMILTDVGKVTEPISRHRRNHSQHILKDVIPPLEQLMVEKEGYLQKAKIADGGKKLRKNWSTSWIVLSSRRIEFYKESKQQALSNMKTGHKPESVDLCGAHIEWAKEKSSRKNVFQITTVSGNEFLLQSDIDFIILDWFHAIKNAIDRLPKDSSCPSRNLELFKIQRSSSTELLSHYDSDIKEQKPEHRKSLMFRLHHSASDTSDKNRVKSRLKKFITRRPSLKTLQEKGLIKDQIFGSHLHKVCERENSTVPWFVKQCIEAVEKRGLDVDAIYRVSGNLQTIQKLRFIVNQEEKLNLDDSQWEDIHVVTGALKMFFRELPEPLFPYSFFEQFVEAIKKQDNNTRIEAVKSLVQKLPPPNRDTMKVLFGHLTKIVAKASKNLMSTQSLGIVFGPTLLRAENETGNMAIHMVYQNQIAELMLSEYSKIFGSEED

SEQ ID NO: 277 - DNA, 2033 bp, Homo sapiens
atgaaccccagcgcccccagctaccacatggcctcgctgtatgtgggggacctgcaccccgacgtgactgaattgatgttccaagagaagtttagctcgacaggtccaccctcaccatccgggtctttagggactggctcacccacctcttcgtgggctacgtgtccgtgaacttcctgcagccggcagacgcggagcgtgctctggccaccatgaactttgatgttataaagggcaagccagtataagtcctgtggtctcagcgcgatctatcgctgcgcaaaagtggagtgggcaacgtattcgttaaaaaccaggacaaatccgttgagaaagcactgtgtgatgcattttctgcttttggtaacttcctttcgtgtaaggtagtttgtgatgaaaatggttctaagggctgtggatctgtacactttgagacacaggaagcagctgaaggagctattgaaaaaatggatgggatgctcctgaatggtctcaatgtatttgttggacggtttaggtctcctaaagaacaagaagcagaacttggagctagggcaaaagagtccaaagttggacctgcctcaagtgtaaaagtaataactgatgaaggtggaaaatccaaaggatttggatttgtaagctttgaaaggcatgaagatccacagacagctatggatgtgaatggaaaggagttcagtggaaatcaaacttacatttgtctagctccgaaaaaagtggaagagcagacagaacttaagtgcaaatttgaacagatgaagcaagatagaatcaccagataccagggtgctaacgtttgtgtgaaaaatcttgatgagagtattgatgatgaacgtctccagaaagaattttctccatttggtataatcaatagtgcaaatgttatgatggagggtggttgcagcaaaaggtttggctttgtatgtttctcctccccagaagaagtagctaaagcagttacagcaatgaacggtaaaattgtggccagcaagccattgcatgtagctttagctcagtgcaaagaacagcgcctggctcacttcactaaccaatacatgcagaagatggcaagtgtacgagctgtgccccaccctgtaatcaacccctaccagccagcaccttctacatgttacttcgtagcagctatcccacagacccagaaccgtgctgcatactatcctcctggccaaattgctcaactaagaccaagtcctccctgggctgttcagagtgtcagaccttatccattccaaatatgacctgtgctatccgctcagctgctcgtaaccaccactctgagaccagcttcttcacaggttccaccagtcatgtccacacagtatgttgctaactcatcaatacagacaattagtccatgtcctgtagctgctgctgctggctccactcctgcggtctacatcattccacagtacaaatatgcttcaggaattctcattcctcagcagcatcttaaagcacatccacaggttaccaggaagcagcttgctgttcatgtccaaggtcaaaaacttttgactgcttccatgttagcatctgcccctcttcagcagcagaagcagatattgggtgaaagactctttcctcttattcaagccacgcaccctactcttgctggtaaaatcactggcatgttattggagcttgataatttaaaacttcttcatatgcttgtgtctccggagtctctgaagctgtagttgtactacaagcctaccatgtgaaagaggctccagaaagcaattaacagtgctactgttgtaccaactgcttaaaattgatcagggaccaccaaaaaacaaaaaaacaataaaacaaaaaaaacttgtgtttcaacaaagaaaaatatctaaacatcaaaaaactaaaatattatggaaaaaaattacaaaatataaacaaaaaaggaaagcaaactttgaaccttatgtactgaggaaataccaagtctagcaaacttactagtcctagattacttattgatttgaaaataacag

SEQ ID NO: 278 - DNA, 5160 bp, Homo sapiens
cccgagtgtcggttcactgtggagacagcggtggcggagtgggtctccagggctctgggctggcaaggcccccggagggggtggggcgcggaggaggctacggatccgcttccgcgcggcggggccgggtgcttgggacgcggctctgggctcccgggataaggggctcccgggacaaggggctcccggagagcccagtggttagcgatgctgctgtcgccgtcgctgctgctgctgctgctgctgggggcgccgcggggctgcgccgagggtgtggcggcggcgcttacccccgagcggctcctggagtggcaggataaaggaatatttgttatccaaagtgagagtctcaagaaatgcattcaagcaggtaaatcggttctgaccctggagaactgcaagcaagcaaacaagcacatgctgtggaaatgggtttcaaaccatggcctctttaacataggaggcagtggttgcctgggcctgaatttctccgccccagagcagccattaagcttatatgaatgtgactccaccctcgtttccttacggtggcgctgtaacaggaagatgatcacaggcccgctgcagtactctgtccaggtggcgcatgacaacacagtggtggcctcacggaagtatattcataagtggatttcttatgggtcaggtggtggagacatttgtgaatatctacacaaagatttgcatacaatcaaagggaacacccacgggatgccgtgtatgtttcccttccagtataaccatcagtggcatcatgaatgtacccgtgaaggtcgggaagatgacttactgtggtgtgccacgacaagccgttatgaaagagatgaaaagtggggattttgccctgatcccacctctgcagaagtaggttgtgatactatttgggagaaggacctcaattcacacatttgctaccagttcaacctgctttcatctctctcttggagtgaggcacattcttcatgccagatgcaaggaggtacgctgttaagtattacagatgaaactgaagaaaatttcataagggagcacatgagcagtaaaacagtggaggtgtggatgggcctcaatcagctggatgaacacgctggctggcagtggtctgatggaacgccgctcaactatctgaattggagcccagaggtaaattttgagccatttgttgaagatcactgtggaacatttagttcatttatgccaagtgcctggaggagtcgggattgtgagtccaccttgccatatatatgtaaaaaatatctaaaccacattgatcatgaaatagttgaaaaagatgcgtggaaatattatgctacccactgtgagcctggctggaatccctacaatcgtaattgctacaaacttcagaaagaagaaaagacctggcatgaggctctgcgttcttgtcaggctgataacagtgcattaatagacataacctcattagcagaggtggagtttcttgtaaccctccttggagatgaaaatgcatcagaaacatggattggtttgagcagcaataaaattccagtttcctttgaatggtctaatgactcttcagtcatctttactaattggcacacacttgagccccacatttttccaaatagaagccagctgtgtgtctcagcagagcagtctgagggacactggaaagtcaaaaattgtgaagaaagacttttttacatttgtaaaaaagcaggccatgtcctctctgatgctgaatcaggatgtcaagagggatgggagagacatggtggattctgttacaaaattgacacagtccttcgaagctttgaccaagcttccagcggttattactgtcctcctgcacttgtaaccattacaaacaggtttgaacaggcttttattaccagtttgatcagtagtgtggtaaaaatgaaggacagttatttttggatagctcttcaggaccaaaatgatacgggagaatacacttggaagccagtagggcagaaacccgagccggtgcagtacacacactggaacacacaccagccgcgctacagtggtggctgtgttgccatgcgaggaaggcatccacttggtcgctgggaagtgaagcactgtcggcactttaaggcaatgtccttgtgcaagcagccagttgaaaatcaggaaaaagcagagtatgaagagagatggccctttcacccctgctatttggactgggagtcagagcctggtctggccagttgcttcaaggtatttcatagtgaaaaagttctgatgaaaagaacatggagagaagctgaagcattttgcgaagaatttggagctcatcttgcaagctttgcccatattgaggaagagaattttgtgaatgagctcttacattcaaaatttaattggacagaagaaaggcagttctggattggatttaataaaagaaacccactgaatgccggctcatgggagtggtctgatagaactcctgttgtctcttcgtttttagacaacacttattttggagaagatgcaagaaactgtgctgtttataaggcaaacaaaacattgctgcccttacactgtggttccaaacgtgaatggatatgcaaaatcccaagagatgtgaaacccaagattccgttctggtaccagtacgatgtaccctggctcttttatcaggatgcagaatacctttttcatacctttgcctcagaatggttgaactttgagtttgtctgtagctggctgcacagtgatcttctcacaattcattctgcacatgagcaagaattcatccacagcaaaataaaagcgctatcaaagtatggtgcaagttggtggattggacttcaagaagaaagagccaatgatgaatttcgctggagagatggaacaccagtgatataccagaactgggacacaggaagagaaagaactgtgaataatcagagccagagatgtggctttatttcttctataacaggactctggggtagtgaagagtgttcagtttctatgcctagtatctgtaagcgaaaaaaggtttggctcatagagaaaaagaaagatacaccaaaacaacatggaacgtgtcccaaaggatggctatattttaactataagtgccttctgctgaatatccccaaagacccaagcagttggaagaactggacgcatgctcaacatttctgtgctgaagaaggggggaccctggtcgccattgaaagtgaggtggagcaagctttcattactatgaatctttttggccagaccaccagtgtgtggataggtttacaaaatgatgattatgaaacatggctaaatggaaagcctgtggtatattctaactggtctccatttgatataataaatattccaagtcacaataccactgaagttcagaaacacattcctctctgtgccttactctcaagtaatcctaattttcatttcactggaaaatggtattttgaagactgtggaaaggaaggctatgggtttgtttgtgaaaaaatgcaagatacttctggacacggtgtaaatacatctgatatgtatccaatgcccaataccttagaatatggaaacagaacttacaaaataattaatgcaaatatgacttggtatgcagcaataaaaacctgcctgatgcacaaagcacaactggtcagcatcacagaccagtatcaccagtccttcctcactgttgtcctcaaccggctaggatatgcccactggattggactgttcaccacagataatggtcttaattttgactggtctgatggcaccaaatcttctttcactttttggaaagatgaggagtcctccctccttggtgactgcgtttttgccgacagcaacggacgctggcatagcacagcctgcgagtcatttctgcaaggtgccatttgtcatgtgccacctgaaacaagacaatctgaacacccagagttgtgctcagaaacatctattccctggataaaatttaaaagtaattgctacagtttttctacagtcctagacagtatgagttttgaggctgctcatgaattttgcaaaaaggaaggttctaatcttttaacaatcaaggatgaggctgaaaatgcatttctcctagaagagctgtttgcttttggttcttctgtccagatggtttggttgaatgctcaatttgatggtaacagtaagtgatttgggtagaggagaggacataaataaatacatggttgttaaagctgatgataatggcatctgtgagccagaaaactctccttggatacgttttctgagaaaaaatagcatgaagcctaaagccatttcttccaaaaacaacattgcaacccttttctttacccttttgtcttttaaaataatcccagaacaccaaaaataaaaacaaacaataacatgtttatctttacccttagcaggaagatgcttggctggaactttgtgttcacagacttagtcattgcataccaaaaccatatttactggaaaatatcccaggtttctaaatgttataaaagcacaatagagttatggaaatgtttccatgatgaactgtgctgttaggattcttatttgctactcataaaaaccagagtttgtaataaaatggaagcatggtattcttttctttatgtaattgatggttattgaaaggtacttgtgaagaaaattattttaattggtatggagagcttgttacagtggtgtaccaaggttgggggtgagcctaccctttcgaggaggagtattttaatcaccaacattgtttagaatttcaagcagatggtgataataaaaagcagaccaacttttagttagctgtattgttagttttaaattattttcagacaatacactattgcccacacatgggatggactctcctaccgcccctacccccttggtacatggctggcttggtattaaagaaattcactgtaaaatctttttagaaagtgagccattttgtaatgatgaagatgttaggacttcaaaggatttttctttactcgattagttttgtttatcaaatgatttctttaaatcgattatatatatatatggaatatttcaaaattcaaactgtcacattaagaaacatgataacctaaatgacctaaataagaacactgtacctaaaataaagaggcaacttta

SEQ ID NO: 279 - protein, 1324 aa, Homo sapiens
MLLSPSLLLLLLLGAPRGCAEGVAAALTPERLLEWQDKGIFVIQSESLKKCIQAGKSVLTLENCKQANKHMLWKWVSNHGLFNIGGSGCLGLNFSAPEQPLSLYECDSTLVSLRWRCNRKMITGPLQYSVQVAHDNTVVASRKYIHKWISYGSGGGDICEYLHKDLHTIKGNTHGMPCMFPFQYNHQWHHECTREGREDDLLWCATTSRYERDEKWGFCPDPTSAEVGCDTIWEKDLNSHICYQFNLLSSLSWSEAHSSCQMQGGTLLSITDETEENFIREHMSSKTVEVWMGLNQLDEHAGWQWSDGTPLNYLNWSPEVNFEPFVEDHCGTFSSFMPSAWRSRDCESTLPYICKKYLNHIDHEIVEKDAWKYYATHCEPGWNPYNRNCYKLQKEEKTWHEALRSCQADNSALIDITSLAEVEFLVTLLGDENASETWIGLSSNKIPVSFEWSNDSSVIFTNWHTLEPHIFPNRSQLCVSAEQSEGHWKVKNCEERLFYICKKAGHVLSDAESGCQEGWERHGGFCYKIDTVLRSFDQASSGYYCPPALVTITNRFEQAFITSLISSVVKMKDSYFWIALQDQNDTGEYTWKPVGQKPEPVQYTHWNTHQPRYSGGCVAMRGRHPLGRWEVKHCRHFKAMSLCKQPVENQEKAEYEERWPFHPCYLDWESEPGLASCFKVFHSEKVLMKRTWREAEAFCEEFGAHLASFAHIEEENFVNELLHSKFNWTEERQFWIGFNKRNPLNAGSWEWSDRTPVVSSFLDNTYFGEDARNCAVYKANKTLLPLHCGSKREWICKIPRDVKPKIPFWYQYDVPWLFYQDAEYLFHTFASEWLNFEFVCSWLHSDLLTIHSAHEQEFIHSKIKALSKYGASWWIGLQEERANDEFRWRDGTPVIYQNWDTGRERTVNNQSQRCGFISSITGLWGSEECSVSMPSICKRKKVWLIEKKKDTPKQHGTCPKGWLYFNYKCLLLNIPKDPSSWKNWTHAQHFCAEEGGTLVAIESEVEQAFITMNLFGQTTSVWIGLQNDDYETWLNGKPVVYSNWSPFDIINIPSHNTTEVQKHIPLCALLSSNPNFHFTGKWYFEDCGKEGYGFVCEKMQDTSGHGVNTSDMYPMPNTLEYGNRTYKIINANMTWYAAIKTCLMHKAQLVSITDQYHQSFLTVVLNRLGYAHWIGLFTTDNGLNFDWSDGTKSSFTFWKDEESSLLGDCVFADSNGRWHSTACESFLQGAICHVPPETRQSEHPELCSETSIPWIKFKSNCYSFSTVLDSMSFEAAHEFCKKEGSNLLTIKDEAENAFLLEELFAFGSSVQMVWLNAQFDGNSK

SEQ ID NO: 280 - DNA, 4876 bp, Homo sapiens
cccgagtgtcggttcactgtggagacagcggtggcggagtgggtctccagggctctgggctggcaaggcccccggagggggtggggcgcggaggaggctacggatccgcttccgcgcggcggggccgggtgcttgggacgcggctctgggctcccgggataaggggctcccgggacaaggggctcccggagagcccagtggttagcgatgctgctgtcgccgtcgctgctgctgctgctgctgctgggggcgccgcggggctgcgccgagggtgtggcggcggcgcttacccccgagcggctcctggagtggcaggataaaggaatatttgttatccaaagtgagagtctcaagaaatgcattcaagcaggtaaatcggttctgaccctggagaactgcaagcaagcaaacaagcacatgctgtggaaatgggtttcaaaccatggcctctttaacataggaggcagtggttgcctgggcctgaatttctccgccccagagcagccattaagcttatatgaatgtgactccaccctcgtttccttacggtggcgctgtaacaggaagatgatcacaggcccgctgcagtactctgtccaggtggcgcatgacaacacagtggtggcctcacggaagtatattcataagtggatttcttatgggtcaggtggtggagacatttgtgaatatctacacaaagatttgcatacaatcaaagggaacacccacgggatgccgtgtatgtttcccttccagtataaccatcagtggcatcatgaatgtacccgtgaaggtcgggaagatgacttactgtggtgtgccacgacaagccgttatgaaagagatgaaaagtggggattttgccctgatcccacctctgcagaagtaggttgtgatactatttgggagaaggacctcaattcacacatttgctaccagttcaacctgctttcatctctctcttggagtgaggcacattcttcatgccagatgcaaggaggtacgctgttaagtattacagatgaaactgaagaaaatttcataagggagcacatgagcagtaaaacagtggaggtgtggatgggcctcaatcagctggatgaacacgctggctggcagtggtctgatggaacgccgctcaactatctgaattggagcccagaggtaaattttgagccatttgttgaagatcactgtggaacatttagttcatttatgccaagtgcctggaggagtcgggattgtgagtccaccttgccatatatatgtaaaaaatatctaaaccacattgatcatgaaatagttgaaaaagatgcgtggaaatattatgctacccactgtgagcctggctggaatccctacaatcgtaattgctacaaacttcagaaagaagaaaagacctggcatgaggctctgcgttcttgtcaggctgataacagtgcattaatagacataacctcattagcagaggtggagtttcttgtaaccctccttggagatgaaaatgcatcagaaacatggattggtttgagcagcaataaaattccagtttcctttgaatggtctaatgactcttcagtcatctttactaattggcacacacttgagccccacatttttccaaatagaagccagctgtgtgtctcagcagagcagtctgagggacactggaaagtcaaaaattgtgaagaaagacttttttacatttgtaaaaaagcaggccatgtcctctctgatgctgaatcaggatgtcaagagggatgggagagacatggtggattctgttacaaaattgacacagtccttcgaagctttgaccaagcttccagcggttattactgtcctcctgcacttgtaaccattacaaacaggtttgaacaggcttttattaccagtttgatcagtagtgtggtaaaaatgaaggacagttatttttggatagctcttcaggaccaaaatgatacgggagaatacacttggaagccagtagggcagaaacccgagccggtgcagtacacacactggaacacacaccagccgcgctacagtggtggctgtgttgccatgcgaggaaggcatccacttggtcgctgggaagtgaagcactgtcggcactttaaggcaatgtccttgtgcaagcagccagttgaaaatcaggaaaaagcagagtatgaagagagatggccctttcacccctgctatttggactgggagtcagagcctggtctggccagttgcttcaaggtatttcatagtgaaaaagttctgatgaaaagaacatggagagaagctgaagcattttgcgaagaatttggagctcatcttgcaagctttgcccatattgaggaagagaattttgtgaatgagctcttacattcaaaatttaattggacagaagaaaggcagttctggattggatttaataaaagaaacccactgaatgccggctcatgggagtggtctgatagaactcctgttgtctcttcgtttttagacaacacttattttggagaagatgcaagaaactgtgctgtttataaggcaaacaaaacattgctgcccttacactgtggttccaaacgtgaatggatatgcaaaatcccaagagatgtgaaacccaagattccgttctggtaccagtacgatgtaccctggctcttttatcaggatgcagaatacctttttcatacctttgcctcagaatggttgaactttgagtttgtctgtagctggctgcacagtgatcttctcacaattcattctgcacatgagcaagaattcatccacagcaaaataaaagcgctatcaaagtatggtgcaagttggtggattggacttcaagaagaaagagccaatgatgaatttcgctggagagatggaacaccagtgatataccagaactgggacacaggaagagaaagaactgtgaataatcagagccagagatgtggctttatttcttctataacaggactctggggtagtgaagagtgttcagtttctatgcctagtatctgtaagcgaaaaaaggtttggctcatagagaaaaagaaagatacaccaaaacaacatggaacgtgtcccaaaggatggctatattttaactataagtgccttctgctgaatatccccaaagacccaagcagttggaagaactggacgcatgctcaacatttctgtgctgaagaaggggggaccctggtcgccattgaaagtgaggtggagcaagctttcattactatgaatctttttggccagaccaccagtgtgtggataggtttacaaaatgatgattatgaaacatggctaaatggaaagcctgtggtatattctaactggtctccatttgatataataaatattccaagtcacaataccactgaagttcagaaacacattcctctctgtgccttactctcaagtaatcctaattttcatttcactggaaaatggtattttgaagactgtggaaaggaaggctatgggtttgtttgtgaaaaaatgcaagatacttctggacacggtgtaaatacatctgatatgtatccaatgcccaataccttagaatatggaaacagaacttacaaaataattaatgcaaatatgacttggtatgcagcaataaaaacctgcctgatgcacaaagcacaactggtcagcatcacagaccagtatcaccagtccttcctcactgttgtcctcaaccggctaggatatgcccactggattggactgttcaccacagataatggtcttaattttgactggtctgatggcaccaaatcttctttcactttttggaaagatgaggagtcctccctccttggtgactgcgtttttgccgacagcaacggacgctggcatagcacagcctgcgagtcatttctgcaaggtgccatttgtcatgtgccacctgaaacaagacaatctgaacacccagagttgtgctcagaaacatctattccctggataaaatttaaaagtaattgctacagtttttctacagtcctagacagtatgagttttgaggctgctcatgaattttgcaaaaaggaaggttctaatcttttaacaatcaaggatgaggctgaaaatgcatttctcctagaagagctgtttgcttttggttcttctgtccagatggtttggttgaatgctcaatttgatggtaacaatgaaaccataaagtggtttgatggaactcccacagaccagtcaaactggggcattcggaagccagacacagactacttcaagccccatcattgtgttgccttgaggatccctgaaggattatggcagctatccccgtgtcaagaaaaaaaaggctttatatgtaaaatggaggcagatattcacactgcagaggcgctgccagaaaaaggaccaagtcacagcatcattcctcttgcggttgtactgacactgatagtcattgtggccatttgcacactttccttctgcatatacaagcataacggtggcttcttcaggagacttgcagggtttcggaatccttactatcctgcaaccaactttagtacagtatatttagaagaaaatattctcatttctgatcttgagaagagtgaccaataataatgaggtcagagaatgccacagacaccagggtaagtaaagaagactaaacaggagtctcatctgtctttccctttacagcacagatgccattagaatgtgaattgggtcactattttaattattcttgaagtgattactggttttgaatcttaaccaaatcagatgggttttgatttattcatttccctaaactgtgatccattcttaaaaggggtaaattatgcattggttatttttcagaaagacaagaactattaaaagaaactccctattg

SEQ ID NO: 281 - protein, 1463 aa, Homo sapiens
MLLSPSLLLLLLLGAPRGCAEGVAAALTPERLLEWQDKGIFVIQSESLKKCIQAGKSVLTLENCKQANKHMLWKWVSNHGLFNIGGSGCLGLNFSAPEQPLSLYECDSTLVSLRWRCNRKMITGPLQYSVQVAHDNTVVASRKYIHKWISYGSGGGDICEYLHKDLHTIKGNTHGMPCMFPFQYNHQWHHECTREGREDDLLWCATTSRYERDEKWGFCPDPTSAEVGCDTIWEKDLNSHICYQFNLLSSLSWSEAHSSCQMQGGTLLSITDETEENFIREHMSSKTVEVWMGLNQLDEHAGWQWSDGTPLNYLNWSPEVNFEPFVEDHCGTFSSFMPSAWRSRDCESTLPYICKKYLNHIDHEIVEKDAWKYYATHCEPGWNPYNRNCYKLQKEEKTWHEALRSCQADNSALIDITSLAEVEFLVTLLGDENASETWIGLSSNKIPVSFEWSNDSSVIFTNWHTLEPHIFPNRSQLCVSAEQSEGHWKVKNCEERLFYICKKAGHVLSDAESGCQEGWERHGGFCYKIDTVLRSFDQASSGYYCPPALVTITNRFEQAFITSLISSVVKMKDSYFWIALQDQNDTGEYTWKPVGQKPEPVQYTHWNTHQPRYSGGCVAMRGRHPLGRWEVKHCRHFKAMSLCKQPVENQEKAEYEERWPFHPCYLDWESEPGLASCFKVFHSEKVLMKRTWREAEAFCEEFGAHLASFAHIEEENFVNELLHSKFNWTEERQFWIGFNKRNPLNAGSWEWSDRTPVVSSFLDNTYFGEDARNCAVYKANKTLLPLHCGSKREWICKIPRDVKPKIPFWYQYDVPWLFYQDAEYLFHTFASEWLNFEFVCSWLHSDLLTIHSAHEQEFIHSKIKALSKYGASWWIGLQEERANDEFRWRDGTPVIYQNWDTGRERTVNNQSQRCGFISSITGLWGSEECSVSMPSICKRKKVWLIEKKKDTPKQHGTCPKGWLYFNYKCLLLNIPKDPSSWKNWTHAQHFCAEEGGTLVAIESEVEQAFITMNLFGQTTSVWIGLQNDDYETWLNGKPVVYSNWSPFDIINIPSHNTTEVQKHIPLCALLSSNPNFHFTGKWYFEDCGKEGYGFVCEKMQDTSGHGVNTSDMYPMPNTLEYGNRTYKIINANMTWYAAIKTCLMHKAQLVSITDQYHQSFLTVVLNRLGYAHWIGLFTTDNGLNFDWSDGTKSSFTFWKDEESSLLGDCVFADSNGRWHSTACESFLQGAICHVPPETRQSEHPELCSETSIPWIKFKSNCYSFSTVLDSMSFEAAHEFCKKEGSNLLTIKDEAENAFLLEELFAFGSSVQMVWLNAQFDGNNETIKWFDGTPTDQSNWGIRKPDTDYFKPHHCVALRIPEGLWQLSPCQEKKGFICKMEADIHTAEALPEKGPSHSIIPLAVVLTLIVIVAICTLSFCIYKHNGGFFRRLAGFRNPYYPATNFSTVYLEENILISDLEKSDQ

SEQ ID NO: 282 - DNA, 1128 bp, Homo sapiens
acagagcttaggacacagagcacatcaaaagttcccaaagagggcttgctctctcttcacctgctctgttctacagcacactaccagaagacagcagaaatgaaaagcatttactttgtggctggattatttgtaatgctggtacaaggcagctggcaacgttcccttcaagacacagaggagaaatccagatcattctcagcttcccaggcagacccactcagtgatcctgatcagatgaacgaggacaagcgccattcacagggcacattcaccagtgactacagcaagtatctggactccaggcgtgcccaagattttgtgcagtggttgatgaataccaagaggaacaggaataacattgccaaacgtcacgatgaatttgagagacatgctgaagggacctttaccagtgatgtaagttcttatttggaaggccaagctgccaaggaattcattgcttggctggtgaaaggccgaggaaggcgagatttcccagaagaggtcgccattgttgaagaacttggccgcagacatgctgatggttctttctctgatgagatgaacaccattcttgataatcttgccgccagggactttataaactggttgattcagaccaaaatcactgacaggaaataactatatcactattcaagatcatcttcacaacatcacctgctagccacgtgggatgtttgaaatgttaagtcctgtaaatttaagaggtgtattctgaggccacattgctttgcatgccaataaataaattttcttttagtgttgtgtagccaaaaattacaaatggaataaagttttatcaaaatattgctaaaatatcagctttaaaatatgaaagtgctagattctgttattttcttcttattttggatgaagtaccccaacctgtttacatttagcgataaaattatttttctatgatataatttgtaaatgtaaattattccgatctgacatatctgcattataataataggagaatagaagaactggtagccacagtggtgaaattggaaagagaactttcttcctgaaacctttgtcttaaaaatactcagctttcaatgtatcaaagatacaattaaataaaattttcaagcttcttta

SEQ ID NO: 283 - protein, 180 aa, Homo sapiens
MKSIYFVAGLFVMLVQGSWQRSLQDTEEKSRSFSASQADPLSDPDQMNEDKRHSQGTFTSDYSKYLDSRRAQDFVQWLMNTKRNRNNIAKRHDEFERHAEGTFTSDVSSYLEGQAAKEFIAWLVKGRGRRDFPEEVAIVEELGRRHADGSFSDEMNTILDNLAARDFINWLIQTKITDRK

SEQ ID NO: 284 - DNA, 2788 bp, Homo sapiens
aagaacgcccccaaaatctgtttctaattttacagaaatcttttgaaacttggcacggtattcaaaagtccgtggaaagaaaaaaaccttgtcctggcttcagcttccaactacaaagacagacttggtccttttcaacggttttcacagatccagtgacccacgctctgaagacagaattagctaactttcaaaaacatctggaaaaatgaagacttgggtaaaaatcgtatttggagttgccacctctgctgtgcttgccttattggtgatgtgcattgtcttacgcccttcaagagttcataactctgaagaaaatacaatgagagcactcacactgaaggatattttaaatggaacattttcttataaaacattttttccaaactggatttcaggacaagaatatcttcatcaatctgcagataacaatatagtactttataatattgaaacaggacaatcatataccattttgagtaatagaaccatgaaaagtgtgaatgcttcaaattacggcttatcacctgatcggcaatttgtatatctagaaagtgattattcaaagctttggagatactcttacacagcaacatattacatctatgaccttagcaatggagaatttgtaagaggaaatgagcttcctcgtccaattcagtatttatgctggtcgcctgttgggagtaaattagcatatgtctatcaaaacaatatctatttgaaacaaagaccaggagatccaccttttcaaataacatttaatggaagagaaaataaaatatttaatggaatcccagactgggtttatgaagaggaaatgcttgctacaaaatatgctctctggtggtctcctaatggaaaatttttggcatatgcggaatttaatgatacggatataccagttattgcctattcctattatggcgatgaacaatatcctagaacaataaatattccatacccaaaggctggagctaagaatcccgttgttcggatatttattatcgataccacttaccctgcgtatgtaggtccccaggaagtgcctgttccagcaatgatagcctcaagtgattattatttcagttggctcacgtgggttactgatgaacgagtatgtttgcagtggctaaaaagagtccagaatgtttcggtcctgtctatatgtgacttcagggaagactggcagacatgggattgtccaaagacccaggagcatatagaagaaagcagaactggatgggctggtggattctttgtttcaacaccagttttcagctatgatgccatttcgtactacaaaatatttagtgacaaggatggctacaaacatattcactatatcaaagacactgtggaaaatgctattcaaattacaagtggcaagtgggaggccataaatatattcagagtaacacaggattcactgttttattctagcaatgaatttgaagaataccctggaagaagaaacatctacagaattagcattggaagctatcctccaagcaagaagtgtgttacttgccatctaaggaaagaaaggtgccaatattacacagcaagtttcagcgactacgccaagtactatgcacttgtctgctacggcccaggcatccccatttccacccttcatgatggacgcactgatcaagaaattaaaatcctggaagaaaacaaggaattggaaaatgctttgaaaaatatccagctgcctaaagaggaaattaagaaacttgaagtagatgaaattactttatggtacaagatgattcttcctcctcaatttgacagatcaaagaagtatcccttgctaattcaagtgtatggtggtccctgcagtcagagtgtaaggtctgtatttgctgttaattggatatcttatcttgcaagtaaggaagggatggtcattgccttggtggatggtcgaggaacagctttccaaggtgacaaactcctctatgcagtgtatcgaaagctgggtgtttatgaagttgaagaccagattacagctgtcagaaaattcatagaaatgggtttcattgatgaaaaaagaatagccatatggggctggtcctatggaggatacgtttcatcactggcccttgcatctggaactggtcttttcaaatgtggtatagcagtggctccagtctccagctgggaatattacgcgtctgtctacacagagagattcatgggtctcccaacaaaggatgataatcttgagcactataagaattcaactgtgatggcaagagcagaatatttcagaaatgtagactatcttctcatccacggaacagcagatgataatgtgcactttcaaaactcagcacagattgctaaagctctggttaatgcacaagtggatttccaggcaatgtggtactctgaccagaaccacggcttatccggcctgtccacgaaccacttatacacccacatgacccacttcctaaagcagtgtttctctttgtcagactaaaaacgatgcagatgcaagcctgtatcagaatctgaaaaccttatataaacccctcagacagtttgcttattttattttttatgttgtaaaatgctagtataaacaaacaaattaatgttgttctaaaggctgttaaaaaaaagatgaggactcagaagttcaagctaaatattgtttacattttctggtactctgtgaaagaagagaaaagggagtcatgcattttgctttggacacagtgttttatcacctgttcatttgaagaaaaataataaagtcagaagttcaaaaaaaaaa

SEQ ID NO: 285 - protein, 760 aa, Homo sapiens
MKTWVKIVFGVATSAVLALLVMCIVLRPSRVHNSEENTMRALTLKDILNGTFSYKTFFPNWISGQEYLHQSADNNIVLYNIETGQSYTILSNRTMKSVNASNYGLSPDRQFVYLESDYSKLWRYSYTATYYIYDLSNGEFVRGNELPRPIQYLCWSPVGSKLAYVYQNNIYLKQRPGDPPFQITFNGRENKIFNGIPDWVYEEEMLATKYALWWSPNGKFLAYAEFNDTDIPVIAYSYYGDEQYPRTINIPYPKAGAKNPVVRIFIIDTTYPAYVGPQEVPVPAMIASSDYYFSWLTWVTDERVCLQWLKRVQNVSVLSICDFREDWQTWDCPKTQEHIEESRTGWAGGFFVSTPVFSYDAISYYKIFSDKDGYKHIHYIKDTVENAIQITSGKWEAINIFRVTQDSLFYSSNEFEEYPGRRNIYRISIGSYPPSKKCVTCHLRKERCQYYTASFSDYAKYYALVCYGPGIPISTLHDGRTDQEIKILEENKELENALKNIQLPKEEIKKLEVDEITLWYKMILPPQFDRSKKYPLLIQVYGGPCSQSVRSVFAVNWISYLASKEGMVIALVDGRGTAFQGDKLLYAVYRKLGVYEVEDQITAVRKFIEMGFIDEKRIAIWGWSYGGYVSSLALASGTGLFKCGIAVAPVSSWEYYASVYTERFMGLPTKDDNLEHYKNSTVMARAEYFRNVDYLLIHGTADDNVHFQNSAQIAKALVNAQVDFQAMWYSDQNHGLSGLSTNHLYTHMTHFLKQCFSLSD

SEQ ID NO: 286 - DNA, 3434 bp, Homo sapiens
gccccgctgcccacctgcccgcctgcccacctgcccaggtgcgagtgcagccccgcgcgccggcctgagagccctgtggacaacctcgtcattgtcaggcacagagcggtagaccctgcttctctaagtgggcagcggacagcggcacgcacatttcacctgtcccgcagacaacagcaccatctgcttgggagaaccctctcccttctctgagaaagaaagatgtcgaatgggtattccacagacgagaatttccgctatctcatctcgtgcttcagggccagggtgaaaatgtacatccaggtggagcctgtgctggactacctgacctttctgcctgcagaggtgaaggagcagattcagaggacagtcgccacctccgggaacatgcaggcagttgaactgctgctgagcaccttggagaagggagtctggcaccttggttggactcgggaattcgtggaggccctccggagaaccggcagccctctggccgcccgctacatgaaccctgagctcacggacttgccctctccatcgtttgagaacgctcatgatgaatatctccaactgctgaacctccttcagcccactctggtggacaagcttctagttagagacgtcttggataagtgcatggaggaggaactgttgacaattgaagacagaaaccggattgctgctgcagaaaacaatggaaatgaatcaggtgtaagagagctactaaaaaggattgtgcagaaagaaaactggttctctgcatttctgaatgttcttcgtcaaacaggaaacaatgaacttgtccaagagttaacaggctctgattgctcagaaagcaatgcagagattgagaatttatcacaagttgatggtcctcaagtggaagagcaacttctttcaaccacagttcagccaaatctggagaaggaggtctggggcatggagaataactcatcagaatcatcttttgcagattcttctgtagtttcagaatcagacacaagtttggcagaaggaagtgtcagctgcttagatgaaagtcttggacataacagcaacatgggcagtgattcaggcaccatgggaagtgattcagatgaagagaatgtggcagcaagagcatccccggagccagaactccagctcaggccttaccaaatggaagttgcccagccagccttggaagggaagaatatcatcatctgcctccctacagggagtggaaaaaccagagtggctgtttacattgccaaggatcacttagacaagaagaaaaaagcatctgagcctggaaaagttatagttcttgtcaataaggtactgctagttgaacagctcttccgcaaggagttccaaccatttttgaagaaatggtatcgtgttattggattaagtggtgatacccaactgaaaatatcatttccagaagttgtcaagtcctgtgatattattatcagtacagctcaaatccttgaaaactccctcttaaacttggaaaatggagaagatgctggtgttcaattgtcagacttttccctcattatcattgatgaatgtcatcacaccaacaaagaagcagtgtataataacatcatgaggcattatttgatgcagaagttgaaaaacaatagactcaagaaagaaaacaaaccagtgattccccttcctcagatactgggactaacagcttcacctggtgttggaggggccacgaagcaagccaaagctgaagaacacattttaaaactatgtgccaatcttgatgcatttactattaaaactgttaaagaaaaccttgatcaactgaaaaaccaaatacaggagccatgcaagaagtttgccattgcagatgcaaccagagaagatccatttaaagagaaacttctagaaataatgacaaggattcaaacttattgtcaaatgagtccaatgtcagattttggaactcaaccctatgaacaatgggccattcaaatggaaaaaaaagctgcaaaagaaggaaatcgcaaagaacgtgtttgtgcagaacatttgaggaagtacaatgaggccctacaaattaatgacacaattcgaatgatagatgcgtatactcatcttgaaactttctataatgaagagaaagataagaagtttgcagtcatagaagatgatagtgatgagggtggtgatgatgagtattgtgatggtgatgaagatgaggatgatttaaagaaacctttgaaactggatgaaacagatagatttctcatgactttattttttgaaaacaataaaatgttgaaaaggctggctgaaaacccagaatatgaaaatgaaaagctgaccaaattaagaaataccataatggagcaatatactaggactgaggaatcagcacgaggaataatctttacaaaaacacgacagagtgcatatgcgctttcccagtggattactgaaaatgaaaaatttgctgaagtaggagtcaaagcccaccatctgattggagctggacacagcagtgagttcaaacccatgacacagaatgaacaaaaagaagtcattagtaaatttcgcactggaaaaataaatctgcttatcgctaccacagtggcagaagaaggtctggatattaaagaatgtaacattgttatccgttatggtctcgtcaccaatgaaatagccatggtccaggcccgtggtcgagccagagctgatgagagcacctacgtcctggttgctcacagtggttcaggagttatcgaacatgagacagttaatgatttccgagagaagatgatgtataaagctatacattgtgttcaaaatatgaaaccagaggagtatgctcataagattttggaattacagatgcaaagtataatggaaaagaaaatgaaaaccaagagaaatattgccaagcattacaagaataacccatcactaataactttcctttgcaaaaactgcagtgtgctagcctgttctggggaagatatccatgtaattgagaaaatgcatcacgtcaatatgaccccagaattcaaggaactttacattgtaagagaaaacaaagcactgcaaaagaagtgtgccgactatcaaataaatggtgaaatcatctgcaaatgtggccaggcttggggaacaatgatggtgcacaaaggcttagatttgccttgtctcaaaataaggaattttgtagtggttttcaaaaataattcaacaaagaaacaatacaaaaagtgggtagaattacctatcacatttcccaatcttgactattcagaatgctgtttatttagtgatgaggattagcacttgattgaagattcttttaaaatactatcagttaaacatttaatatgattatgattaatgtattcattatgctacagaactgacataagaatcaataaaatgattgttttactctgcaaaaaaaaaaaaaa

SEQ ID NO: 287 - protein, 1025 aa, Homo sapiens
MSNGYSTDENFRYLISCFRARVKMYIQVEPVLDYLTFLPAEVKEQIQRTVATSGNMQAVELLLSTLEKGVWHLGWTREFVEALRRTGSPLAARYMNPELTDLPSPSFENAHDEYLQLLNLLQPTLVDKLLVRDVLDKCMEEELLTIEDRNRIAAAENNGNESGVRELLKRIVQKENWFSAFLNVLRQTGNNELVQELTGSDCSESNAEIENLSQVDGPQVEEQLLSTTVQPNLEKEVWGMENNSSESSFADSSVVSESDTSLAEGSVSCLDESLGHNSNMGSDSGTMGSDSDEENVAARASPEPELQLRPYQMEVAQPALEGKNIIICLPTGSGKTRVAVYIAKDHLDKKKKASEPGKVIVLVNKVLLVEQLFRKEFQPFLKKWYRVIGLSGDTQLKISFPEVVKSCDIIISTAQILENSLLNLENGEDAGVQLSDFSLIIIDECHHTNKEAVYNNIMRHYLMQKLKNNRLKKENKPVIPLPQILGLTASPGVGGATKQAKAEEHILKLCANLDAFTIKTVKENLDQLKNQIQEPCKKFAIADATREDPFKEKLLEIMTRIQTYCQMSPMSDFGTQPYEQWAIQMEKKAAKEGNRKERVCAEHLRKYNEALQINDTIRMIDAYTHLETFYNEEKDKKFAVIEDDSDEGGDDEYCDGDEDEDDLKKPLKLDETDRFLMTLFFENNKMLKRLAENPEYENEKLTKLRNTIMEQYTRTEESARGIIFTKTRQSAYALSQWITENEKFAEVGVKAHHLIGAGHSSEFKPMTQNEQKEVISKFRTGKINLLIATTVAEEGLDIKECNIVIRYGLVTNEIAMVQARGRARADESTYVLVAHSGSGVIEHETVNDFREKMMYKAIHCVQNMKPEEYAHKILELQMQSIMEKKMKTKRNIAKHYKNNPSLITFLCKNCSVLACSGEDIHVIEKMHHVNMTPEFKELYIVRENKALQKKCADYQINGEIICKCGQAWGTMMVHKGLDLPCLKIRNFVVVFKNNSTKKQYKKWVELPITFPNLDYSECCLFSDED

SEQ ID NO: 288 - DNA, 4923 bp, Homo sapiens
cggcggcggcgcccgcgggctgggagccggggcccgcaggtggaagcgcacccgggaggcgggccggccggggctggagcggctcgggcgggctcttgacgctcagccagcttcgctccggcctcgggaaggcgcgcgtcccgccctgacccgccggcctctcccaccccagcagtgacgcgccgcctgggagctggagcccgcgcagcgccccgcagggcgatggacggccgaaccccgcgcccgcaggacgccccagccaggagaaaaccaaaagccaaggcaccacttcctccagctgagaccaaatatactgatgtctcttcagctgctgattctgtagaatccactgctttcatcatggaacagaaagaaaacatgatagataaagacgttgaactctcagtggtcctacctggggatattatcaaatctactactgttcatggcagtaaacctatgatggacttgttgatattcctttgtgcacagtatcacttaaatccatcaagttacacaatcgatctgttgtcagctgaacagaaccacattaaatttaagccaaacacaccaataggaatgttggaggtagagaaggtaattttaaagccaaaaatgttggataagaaaaaacctacacctataataccagagaaaactgtgagagtagtgattaattttaagaaaacacagaagaccatagtgagagtgagtccacatgcatcgcttcaagagcttgcccctattatatgtagcaaatgtgagtttgatccgttgcatacactattgttgaaagattatcaatcgcaggagcctcttgacttgacaaaatctcttaatgacctgggactaagagaattatatgcgatggatgtcaacagagagtcctgccaaatatcacaaaacctagatattatgaaggagaaagaaaataaagggtttttcagtttttttcaacgcagtaagaaaaagcgagaccaaactgcaagtgcccctgcaacccctctagtaaataagcaccgcccaacttttacaaggtccaataccatttccaaaccatatatttccaacaccctgccgtcggatgcacccaagaagaggcgggctccactgcccccgatgccagcatctcagagtgtcccccaagaccttgcacacatccaggagaggcctgcttcttgtatagtgaaatccatgagcgtggatgagacagataagagtccctgtgaagcaggaagagtgagggcaggttcactgcagctcagcagcatgtctgcagggaattcatctttgagaaggacaaagcgaaaagcaccttccccaccctccaaaatacccccgcatcaaagtgatgaaaatagtcgtgtgactgccttacagccagtagatggagttcctccagacagtgcttcagaagcaaactctcctgaggagctatccagcccagaaacctttcaccctgggctttccagtcaggagcagtgcactgcgcccaaactgatggaggaaacctctgtctttgagtgccctgggacacctgaggcagccataacatcattgacatctggaataagctctgattatagccttgaagagatagatgaaaaggaagaactgagtgaagtgcctaaagttgaagctgaaaatatttctccgaagtcacaagatattccttttgtatctactgatataataaatacactgaaaaatgatcctgactcagcccttggcaatggtagtggagagttctcacaaaactccatggaagaaaaacaagaaactaaaagcacagatggacaagaaccacacagtgtagtatatgatacaagcaatggaaagaaggtagttgacagtataagaaacttgaagtcgttgggcccaaaccaagagaatgttcaaaatgaaataattgtctatccagagaacacagaagacaatatgaaaaatggagtgaagaaaacagaaatcaatgtagaaggtgttgccaaaaataacaacattgatatggaagttgagagaccatcaaactctgaggcacatgaaactgatactgctataagttacaaggaaaaccatctagcagcttcatcagtaccagatcaaaaactgaatcaacccagtgcagaaaagacaaaagatgcagcaattcagacaaccccttcttgtaacagttttgatgggaaacaccaagatcataatttatctgactccaaagttgaagaatgtgtgcaaacttcaaataacaacatatcaactcaacactcatgcttaagttcacaagattctgtaaatacctcaagggaattcaggagtcaaggcaccctaattatacattcagaagatccgcttaccgtaaaagatccaatttgtgcacatggtaatgatgatcttttgcctcctgtagataggattgacaaaaattccactgcttcttacctaaagaattacccactttatagacaggactacaatcccaagccaaaaccttcaaatgaaattacacgagagtatatacccaaaattggcatgactacttataaaatagtgcctcccaaatccttggaaatatcgaaagactggcaatcagaaaccatagagtataaagatgatcaggacatgcatgctttagggaaaaagcacactcatgagaatgtgaaagaaactgccatccaaacagaagattctgctatttctgaaagcccagaagagccactgccaaaccttaaaccgaagcctaacctgagaacagagcatcaagtgcccagttctgtgagctcacctgatgatgccatggttagtcctctgaaacctgctcccaaaatgacaagagacactggcacagctccttttgcaccaaatttggaagaaataaacaatattttggaatcaaaatttaaatctcgggcttcaaatgcccaggccaaacccagctctttttttttgcagatgcagaagagagtatcgggtcactatgtgacatctgcagctgccaagagtgtccatgctgcccctaatcctgctccaaaagaactgacaaataaagaggcagaaagggatatgctgccttctccggagcagactctttctcccttaagtaaaatgcctcactctgttccacaaccccttgttgaaaaaactgatgatgatgtcatcggtcaggctcctgctgaagcctcccctcctcccatagctccaaaacctgtgacaattcctgctagtcaggtatccacacaaaatctgaagactttgaaaacttttggtgccccacgaccatactcaagttctggtccttcaccgtttgctcttgctgtagtgaaaaggtcacagtctttcagtaaagagcgcaccgagtcacctagtgccagtgcattggtccaacctccagccaacacagaggaagggaagactcattctgtaaataaatttgtggacatcccacagcttggtgtgtctgataaggaaaataactctgcacataatgaacagaattcccaaataccaactccaactgatggcccatcattcactgttatgagacaaagttctttaacattccaaagctctgacccagaacagatgcgacagagtttgctgactgcaatccgttcgggagaggctgctgccaaattgaaaagggttaccattccatcaaatacaatatctgtgaatggaaggtcaagactcagccattccatgtcccctgatgcccaggacggccattaaatgttaccctgccacaccactgcacttcacttccacttcagaccaacttcatactaatggaacattttggcaaatgtatattcagatgtacactaatatattatctattaaaatattagaatttgtgttgtggcttttaatgccagaagaaaagttaccagaatttataatttatagtaattttttgatcttttttttgccttaagagttgaatatgctgctttagaactttaaaacaaggtgtaaatgattttcattttttacaaatgaaaaataattcctttgtattgatttcacttaccagcacattctctacaatggtgacttagacaaaagtataagattcatagactttatatttgtatgacatacaactaggacaaacatagatatgacatttgctgcctcagtgtagcaattggaaatatttataagttatatgaaagcctgttttgggctgaaagaatgatttagaaaactagtgataccaaataagtatattcagttcaataattattttcaatgatgaatcacttagtgtgaaagacttgccttgtgtattctttatgtaattacaaatcactgtcaattttatgggaagctcatagtattttaatattttattaacatggaactcttgtttttttaatctttagaacttaaattctacaagaattttaaatattttctgtatataattatgacattgtcacacagaaattacacattttatgtgccagaagccttaaacatctttctgtgaaaatgctgatatattgtgacagttatttcacatttgatatgtagagaggaataggggttagtttatgtttatattgaaaaactttaaagactatttggaagttccagaaattctggttttaattcaagtaaaatgataaaatagtcattatatagttcagatgctaatattctaagtaataatatatatttacattgaagctaaaactgttaagcaaaacaatgcccatttgtcggcttacagctcttccggagtctagagcctgttggtgttctgtccctactttaagaatttaattgctcacttattctgaaagctttgttcaaacaagatgatattaaatttgttttcactaaaactactgggatatctgcctcttggggatttttttttcaatttaataaaagcaagttgtatatttggggtgctttttaaaa

SEQ ID NO: 289 - protein, 1166 aa, Homo sapiens
MDGRTPRPQDAPARRKPKAKAPLPPAETKYTDVSSAADSVESTAFIMEQKENMIDKDVELSVVLPGDIIKSTTVHGSKPMMDLLIFLCAQYHLNPSSYTIDLLSAEQNHIKFKPNTPIGMLEVEKVILKPKMLDKKKPTPIIPEKTVRVVINFKKTQKTIVRVSPHASLQELAPIICSKCEFDPLHTLLLKDYQSQEPLDLTKSLNDLGLRELYAMDVNRESCQISQNLDIMKEKENKGFFSFFQRSKKKRDQTASAPATPLVNKHRPTFTRSNTISKPYISNTLPSDAPKKRRAPLPPMPASQSVPQDLAHIQERPASCIVKSMSVDETDKSPCEAGRVRAGSLQLSSMSAGNSSLRRTKRKAPSPPSKIPPHQSDENSRVTALQPVDGVPPDSASEANSPEELSSPETFHPGLSSQEQCTAPKLMEETSVFECPGTPEAAITSLTSGISSDYSLEEIDEKEELSEVPKVEAENISPKSQDIPFVSTDIINTLKNDPDSALGNGSGEFSQNSMEEKQETKSTDGQEPHSVVYDTSNGKKVVDSIRNLKSLGPNQENVQNEIIVYPENTEDNMKNGVKKTEINVEGVAKNNNIDMEVERPSNSEAHETDTAISYKENHLAASSVPDQKLNQPSAEKTKDAAIQTTPSCNSFDGKHQDHNLSDSKVEECVQTSNNNISTQHSCLSSQDSVNTSREFRSQGTLIIHSEDPLTVKDPICAHGNDDLLPPVDRIDKNSTASYLKNYPLYRQDYNPKPKPSNEITREYIPKIGMTTYKIVPPKSLEISKDWQSETIEYKDDQDMHALGKKHTHENVKETAIQTEDSAISESPEEPLPNLKPKPNLRTEHQVPSSVSSPDDAMVSPLKPAPKMTRDTGTAPFAPNLEEINNILESKFKSRASNAQAKPSSFFLQMQKRVSGHYVTSAAAKSVHAAPNPAPKELTNKEAERDMLPSPEQTLSPLSKMPHSVPQPLVEKTDDDVIGQAPAEASPPPIAPKPVTIPASQVSTQNLKTLKTFGAPRPYSSSGPSPFALAVVKRSQSFSKERTESPSASALVQPPANTEEGKTHSVNKFVDIPQLGVSDKENNSAHNEQNSQIPTPTDGPSFTVMRQSSLTFQSSDPEQMRQSLLTAIRSGEAAAKLKRVTIPSNTISVNGRSRLSHSMSPDAQDGH

SEQ ID NO: 290 - DNA, 639 bp, Homo sapiens
atgccgccgagctggtccccacttatgtgcggccgtgctgcagaggcggcggcgagctcccggactccgggcagggaaatggggcagggtgatcctggcttgagagccgagcggcaagagcgcgggccggggaagggaagagtaggagaggaagccgcgagggagaacaggcgagctactgtctcctttggaaaagaacgtaggagccttgggtgggaaaagagagatcagccctcccaacttctcttcgggaaaagttttcctagggcgttttgtttgtgcaaactcggccggaggagcctgggagtgcgctgccggcgtggcagcggtgcccgtgcgcccggccccgctcctcctccttttccagccccggcggctcctctccctccgagaggcgccaaatggctacccagtaaaccccacggggcgggggctgcagcgccaccgcctcctccgccgtgctctgggcgcccgctagaccttgtagagacggcggcggcgcccgcgggctgggagccggggcccgcaggtggaagcgcacccgggaggcgggccggccggggctggagcggctcgggcgggctcttgacgctcagccagcttcgctccggcctcgggaaggcgcgcgtcccgccctga

SEQ ID NO: 291 - protein, 212 aa, Homo sapiens [sequence omitted]

SEQ ID NO: 292 - DNA, 2168 bp, Homo sapiens
ggctacgcagcttgctcctggcacgggcaccttgaatctcctcctcacacagatggagaccatgcttgatttcctgaacttgtagtaagaagaaggaaaacacagcacgctggagccaacagagttaagaggaagatttatgagtcatggaaccctccatcagatttggaagaaagtagaatgagcgcagaggtgacagacagccactgaggcccatggacaatctccacctcacgcttctctatcaaacttgaagatttattagtaatatgctgcctttggaagatgaaaacaaactagtgccaaggaggcgtattcttcaatatttggaatagacgtgttctcaagacaatggcttcaaaggtctcctgtttgtatgttttgacagttgtgtgctgggccagcgctctctggtacttgagtataactcgccctacttcttcttacactggctccaaaccattcagccacctaacagttgccaggaaaaacttcacctttggcaacataagaactcgacctatcaacccacattcttttgaatttcttatcaacgagcccaataaatgtgagaaaaacattccttttcttgttatcctcatcagcaccactcacaaggaatttgatgcccgtcaggcaatcagagagacgtggggggatgagaacaactttaaggggatcaagatagccaccctgttcctcctgggcaagaatgctgatcctgttctcaatcagatggtggagcaagagagccaaatcttccatgatatcatcgtggaggactttattgactcctaccataaccttaccctcaaaacattaatggggatgagatgggtggccactttttgttcaaaagccaagtatgtcatgaaaacagacagcgacatttttgtaaacatggacaatcttatttataaattactgaaaccctccaccaagccacgaagaaggtattttactggctatgtcattaatggaggaccgattcgggatgtccgcagtaaatggtatatgcccagggatttgtacccagacagtaactacccacctttctgttcggggactggctacatcttttcagccgatgtagctgaactcatttacaagacctcactccacacaaggctgcttcaccttgaagacgtatatgtgggactgtgtcttcgaaagctgggcatacatcctttccagaacagtggcttcaatcactggaaaatggcctacagtttgtgtaggtatcgccgagttatcactgtgcatcagatctctccagaagaaatgcacagaatctggaatgacatgtcaagcaagaaacatctcagatgttaggatttttaccaatgtaaatatgtttcttttctttttttaagaaatgggacctaaggtgttggtattttccaggtgtcgggggaaatgaactggtgaaggggttttgtaaagtttttgcttcctgctataagttcttttcttggattaccaatttatgaatgttagactctggtcatagaaacaataaatgagttagaagggccagatttcattctcagtcccagagcattgctatttatctcaaaaagtgacttccaaacaactcttaggattgacgtaccgtgcatctgagataaaaatttggttctgggaaactgaaactcacagtaatgtgtcatatcatccctgcaaaaattaatacacaaatagaaaccattttcaaaagcaattcagaaaggatgcacagtcaggaagacacactggatgtgattattaatatcgtgtgtgttgttacattatatttttacatatattcccatgtaatgtgtacagtctttgcagttccaccaagaaatgaacttggtacctgcagagtggctgcagttaaatagatgggagtttaaatttgagaatcaaacattctatgtgtttggaagacaactctgcttgctcatccaaggattaaatctggtcagcaggtggaatgtgtataaaatgctacttaacaaagtaaacaaaagattttttttttctttttttttctttcttttttgttttgctctttcagaacaaacattaaatggtgcctccaaggaaactttgccaaatataatctcacctgcttccttccagacagtgtcgctaagtgcatttcacagtttttggatctggcaggc

SEQ ID NO: 293 - protein, 326 aa, Homo sapiens
MASKVSCLYVLTVVCWASALWYLSITRPTSSYTGSKPFSHLTVARKNFTFGNIRTRPINPHSFEFLINEPNKCEKNIPFLVILISTTHKEFDARQAIRETWGDENNFKGIKIATLFLLGKNADPVLNQMVEQESQIFHDIIVEDFIDSYHNLTLKTLMGMRWVATFCSKAKYVMKTDSDIFVNMDNLIYKLLKPSTKPRRRYFTGYVINGGPIRDVRSKWYMPRDLYPDSNYPPFCSGTGYIFSADVAELIYKTSLHTRLLHLEDVYVGLCLRKLGIHPFQNSGFNHWKMAYSLCRYRRVITVHQISPEEMHRIWNDMSSKKHLRC

SEQ ID NO: 294 - DNA, 3320 bp, Homo sapiens
gcacgtccaaaccccggggtcctcggccaggccaggggggcgggcgtgcggcggggccgggccgggccgggcgcgcccagcgggctccgggcacacgcccctcacctgggcgaggcccggtgcgcaggcgctcagcgcgggggcagcggccgggcgcttaagcccggcgcgggcaagagttggacagttcaggggccgcgccgggccgagctgtcgcccgcgccacctccaccgccgccgctgctaccgccaccgccaccgcctgggctgcagcagatcgcgggagaacgtctgcgcgaagccccggtgcagccctggcgggaccgcagcaaccaccggagcgtgagcaacagcttcccggctggaggagccactgccccacgcgcccgcggcccgcgcgccgagatgttctacatttcaactccatcaaatattaaattgatgtttatgggctaacctggaaaccgaaaaacagtttgtttcactacaagaataagaaaatatgtccaaattcctgtcagctgacttataaagggacttttagaacacaacccaatgcatgaggtactccttaagccctgacaaccatcttgaagatggaatcatgaatatggcaaattttctacggggctttgaagaaaaggggataaagaacgacaggcctgaggaccagttgagcaaagagaaaaagaaaattcttttctccttctgtgaggtgtgcaacatccagctgaactctgcagcccaggctcaggtgcattccaacggcaaatcccaccgcaaacgagtgaagcagctgagtgatgggcagcccccaccacccgcccaggccagccccagcagcaacagcagcacaggcagtacatgccacactactacccttcctgctcttgtgcgcacacctaccctgatgatgcagccttcactggatatcaaaccatttatgtcttttccagtggacagtagttctgctgttgggctctttccaaattttaacacaatggatcctgtgcaaaaagcggttattaaccatacatttggagtatccattcccccaaagaagaaacaagttatttcttgtaatgtctgtcagcttcgctttaactcagatagccaggccgaggcccactacaaaggaagtaaacatgccaagaaggtcaaagcactagacgcaacgaaaaataaacccaaaatggttccttccaaggacagcgcaaaggctaatcccagctgctccatcactccaatcacaggcaacaactctgacaaatcagaagataaagggaagttaaaagccagcagttccagtcagccatcaagctctgaaagtggctcatttctcctcaaatctggcacaacacccctgccacctggagcagccacttctccctccaagagcacaaatggagctcccggtactgttgttgaatcagaagaagaaaaagccaaaaaattactttattgttcactatgcaaagtggctgtgaactccctgtcacagctagaggcacacaacacaggatctaaacacaagaccatggttgaagctcgtaatggggctggtccaattaaatcctatcctagacctggatcaagattaaagatgcagaatggcagtaaggggtcaggactacagaacaagacatttcattgtgaaatctgtgatgttcatgttaattcagaaattcaactcaaacagcacatttctagccgaaggcataaagatcgagttgcagggaaaccactgaagccaaaatacagcccttacaacaaactccagcggagcccgagtattctagcagcaaaacttgcattccagaaagatatgatgaagcctttggccccagccttcctgtcctcacctctcgcagcggcggcagccgtgtcctcagcgctgtcactcccaccccggccctctgcctcgctcttccaggctccagccattcctccagctcttctgaggcctgggcatgggcccatccgcgccactcctgcctccatcctctttgctccgtactaacgtctgcaaaccccaagacgtttgaggccagtaggaagttgagaaagaaagccacaaggattcagcaatttaagcagtttgtgttgcagtaccccccattcacccacaaaatgcagcccaccacccagtcccccaattccagagagaaacacatcactagattgacgagggcttttagagactgctcctataattgaggaatcagcagcataggctttatctccctacttcctcccccaccctaccgcgttcaatttgtgtatctcagatatttgatttcttgagcatgtattggtcagaaagaaaaagaaagaaaaccattctctatttttccatgggtatgatctggcttaaaacaatatggaatattttcctgacagacttgaaaactaggatcttcctcagatgtctgtaaataactctggtatccaactgggtgtattctagtgtggaacaaaaaacagtgaacacaagtgcttacttgtggatactatcttaccaacggatcacaaagttctctttttggtgtactgttgttgacagggattgtgtactgtttcgacccaagtactgctgtatcctgtgtagtactagatctgtatctcttgtctgaattaaacatttttagttgctgtgtaaatgttaggaagcaaagtagctttgaattttctctgtaagagaataaaagataaaataatgtattttctttatttcacattttatttggagatatttaaatgaaatagaaagccatataacatagctataattactacctgtttgctatttttgtttaacttattttgtagcttcctcactggtttgtgttgctaagcaaacgtatacaaacagaaaaagagcttcctaaattgcacatttttgcacctcttgtgcattctgcaagaagacaatgaatccatgtatttctatataagtatcttcttcatttttaacctgttttcatttgtaatgatgctacataattttgtggctccctaatgcaataatgtacagaagataaaaaaatttataattgaacaatttgtctttctgttcgctgaatatattgcaggtcatgctcccatgcccccctttctaagccgatatcaacaagactggaatgtttgtgatatcaggggcaagagttatcatagaacaacaaaatagagtggactcttttagagcatctatatctgcaacctgtaaatggtaaaatgtctgtgtatttttttaaatgtaccttttcaataaaagtacaaaaaataaaaaaaaaaaaaaaaaaaaaaaaaaaaaaaaaaaa

SEQ ID NO: 295 - protein, 471 aa, Homo sapiens
MNMANFLRGFEEKGIKNDRPEDQLSKEKKKILFSFCEVCNIQLNSAAQAQVHSNGKSHRKRVKQLSDGQPPPPAQASPSSNSSTGSTCHTTTLPALVRTPTLMMQPSLDIKPFMSFPVDSSSAVGLFPNFNTMDPVQKAVINHTFGVSIPPKKKQVISCNVCQLRFNSDSQAEAHYKGSKHAKKVKALDATKNKPKMVPSKDSAKANPSCSITPITGNNSDKSEDKGKLKASSSSQPSSSESGSFLLKSGTTPLPPGAATSPSKSTNGAPGTVVESEEEKAKKLLYCSLCKVAVNSLSQLEAHNTGSKHKTMVEARNGAGPIKSYPRPGSRLKMQNGSKGSGLQNKTFHCEICDVHVNSEIQLKQHISSRRHKDRVAGKPLKPKYSPYNKLQRSPSILAAKLAFQKDMMKPLAPAFLSSPLAAAAAVSSALSLPPRPSASLFQAPAIPPALLRPGHGPIRATPASILFAPY

SEQ ID NO: 296 - DNA, 11941 bp, Homo sapiens
cacgcgcgcccggctgggggatctcctccgcgtgcccgaaagggggatatgccatttggacatgtaattgtcagcacgggatctgagacttccaaaaaatgaagccggcgacaggactttgggtctgggtgagccttctcgtggcggcggggaccgtccagcccagcgattctcagtcagtgtgtgcaggaacggagaataaactgagctctctctctgacctggaacagcagtaccgagccttgcgcaagtactatgaaaactgtgaggttgtcatgggcaacctggagataaccagcattgagcacaaccgggacctctccttcctgcggtctgttcgagaagtcacaggctacgtgttagtggctcttaatcagtttcgttacctgcctctggagaatttacgcattattcgtgggacaaaactttatgaggatcgatatgccttggcaatatttttaaactacagaaaagatggaaactttggacttcaagaacttggattaaagaacttgacagaaatcctaaatggtggagtctatgtagaccagaacaaattcctttgttatgcagacaccattcattggcaagatattgttcggaacccatggccttccaacttgactcttgtgtcaacaaatggtagttcaggatgtggacgttgccataagtcctgtactggccgttgctggggacccacagaaaatcattgccagactttgacaaggacggtgtgtgcagaacaatgtgacggcagatgctacggaccttacgtcagtgactgctgccatcgagaatgtgctggaggctgctcaggacctaaggacacagactgctttgcctgcatgaatttcaatgacagtggagcatgtgttactcagtgtccccaaacctttgtctacaatccaaccacctttcaactggagcacaatttcaatgcaaagtacacatatggagcattctgtgtcaagaaatgtccacataactttgtggtagattccagttcttgtgtgcgtgcctgccctagttccaagatggaagtagaagaaaatgggattaaaatgtgtaaaccttgcactgacatttgcccaaaagcttgtgatggcattggcacaggatcattgatgtcagctcagactgtggattccagtaacattgacaaattcataaactgtaccaagatcaatgggaatttgatctttctagtcactggtattcatggggacccttacaatgcaattgaagccatagacccagagaaactgaacgtctttcggacagtcagagagataacaggtttcctgaacatacagtcatggccaccaaacatgactgacttcagtgttttttctaacctggtgaccattggtggaagagtactctatagtggcctgtccttgcttatcctcaagcaacagggcatcacctctctacagttccagtccctgaaggaaatcagcgcaggaaacatctatattactgacaacagcaacctgtgttattatcataccattaactggacaacactcttcagcacaatcaaccagagaatagtaatccgggacaacagaaaagctgaaaattgtactgctgaaggaatggtgtgcaaccatctgtgttccagtgatggctgttggggacctgggccagaccaatgtctgtcgtgtcgccgcttcagtagaggaaggatctgcatagagtcttgtaacctctatgatggtgaatttcgggagtttgagaatggctccatctgtgtggagtgtgacccccagtgtgagaagatggaagatggcctcctcacatgccatggaccgggtcctgacaactgtacaaagtgctctcattttaaagatggcccaaactgtgtggaaaaatgtccagatggcttacagggggcaaacagtttcattttcaagtatgctgatccagatcgggagtgccacccatgccatccaaactgcacccaagggtgtaacggtcccactagtcatgactgcatttactacccatggacgggccattccactttaccacaacatgctagaactcccctgattgcagctggagtaattggtgggctcttcattctggtcattgtgggtctgacatttgctgtttatgttagaaggaagagcatcaaaaagaaaagagccttgagaagattcttggaaacagagttggtggaaccattaactcccagtggcacagcacccaatcaagctcaacttcgtattttgaaagaaactgagctgaagagggtaaaagtccttggctcaggtgcttttggaacggtttataaaggtatttgggtacctgaaggagaaactgtgaagattcctgtggctattaagattcttaatgagacaactggtcccaaggcaaatgtggagttcatggatgaagctctgatcatggcaagtatggatcatccacacctagtccggttgctgggtgtgtgtctgagcccaaccatccagctggttactcaacttatgccccatggctgcctgttggagtatgtccacgagcacaaggataacattggatcacaactgctgcttaactggtgtgtccagatagctaagggaatgatgtacctggaagaaagacgactcgttcatcgggatttggcagcccgtaatgtcttagtgaaatctccaaaccatgtgaaaatcacagattttgggctagccagactcttggaaggagatgaaaaagagtacaatgctgatggaggaaagatgccaattaaatggatggctctggagtgtatacattacaggaaattcacccatcagagtgacgtttggagctatggagttactatatgggaactgatgacctttggaggaaaaccctatgatggaattccaacgcgagaaatccctgatttattagagaaaggagaacgtttgcctcagcctcccatctgcactattgacgtttacatggtcatggtcaaatgttggatgattgatgctgacagtagacctaaatttaaggaactggctgctgagttttcaaggatggctcgagaccctcaaagatacctagttattcagggtgatgatcgtatgaagcttcccagtccaaatgacagcaagttctttcagaatctcttggatgaagaggatttggaagatatgatggatgctgaggagtacttggtccctcaggctttcaacatcccacctcccatctatacttccagagcaagaattgactcgaataggagtgaaattggacacagccctcctcctgcctacacccccatgtcaggaaaccagtttgtataccgagatggaggttttgctgctgaacaaggagtgtctgtgccctacagagccccaactagcacaattccagaagctcctgtggcacagggtgctactgctgagatttttgatgactcctgctgtaatggcaccctacgcaagccagtggcaccccatgtccaagaggacagtagcacccagaggtacagtgctgaccccaccgtgtttgccccagaacggagcccacgaggagagctggatgaggaaggttacatgactcctatgcgagacaaacccaaacaagaatacctgaatccagtggaggagaacccttttgtttctcggagaaaaaatggagaccttcaagcattggataatcccgaatatcacaatgcatccaatggtccacccaaggccgaggatgagtatgtgaatgagccactgtacctcaacacctttgccaacaccttgggaaaagctgagtacctgaagaacaacatactgtcaatgccagagaaggccaagaaagcgtttgacaaccctgactactggaaccacagcctgccacctcggagcacccttcagcacccagactacctgcaggagtacagcacaaaatatttttataaacagaatgggcggatccggcctattgtggcagagaatcctgaatacctctctgagttctccctgaagccaggcactgtgctgccgcctccaccttacagacaccggaatactgtggtgtaagctcagttgtggttttttaggtggagagacacacctgctccaatttccccacccccctctctttctctggtggtcttccttctaccccaaggccagtagttttgacacttcccagtggaagatacagagatgcaatgatagttatgtgcttacctaacttgaacattagagggaaagactgaaagagaaagataggaggaaccacaatgtttcttcatttctctgcatgggttggtcaggagaatgaaacagctagagaaggaccagaaaatgtaaggcaatgctgcctactatcaaactagctgtcactttttttctttttctttttctttctttgtttctttcttcctcttcttttttttttttttttttaaagcagatggttgaaacacccatgctatctgttcctatctgcaggaactgatgtgtgcatatttagcatccctggaaatcataataaagtttccattagaacaaaagaataacattttctataacatatgatggtgtctgaaattgagaatccagtttctttccccagcagtttctgtcctagcaagtaagaatggccaactcaactttcataatttaaaaatctccattaaagttataactagtaattatgttttcaacactttttggtttttttcattttgttttgctctgaccgattcctttatatttgctcccctatttttggctttaatttctaattgcaaagatgtttacatcaaagcttcttcacagaatttaagcaagaaatattttaatatagtgaaatggccactactttaagtatacaatctttaaaataagaaagggaggctaatatttttcatgctatcaaattatcttcaccctcatcctttacatttttcaacatttttttttctccataaatgacactacttgataggccgttggttgtctgaagagtagaagggaaactaagagacagttctctgtggttcaggaaaactactgatactttcaggggtggcccaatgagggaatccattgaactggaagaaacacactggattgggtatgtctacctggcagatactcagaaatgtagtttgcacttaagctgtaattttatttgttctttttctgaactccattttggattttgaatcaagcaatatggaagcaaccagcaaattaactaatttaagtacatttttaaaaaaagagctaagataaagactgtggaaatgccaaaccaagcaaattaggaaccttgcaacggtatccagggactatgatgagaggccagcacattatcttcatatgtcacctttgctacgcaaggaaatttgttcagttcgtatacttcgtaagaaggaatgcgagtaaggattggcttgaattccatggaatttctagtatgagactatttatatgaagtagaaggtaactctttgcacataaattggtataataaaaagaaaaacacaaacattcaaagcttagggataggtccttgggtcaaaagttgtaaataaatgtgaaacatcttctcatgcaattattttattatccaacacactaatcttttgatactttatataattccctttcttcatatactgcatccagtactagaaccatcattattatgtatcattttgaaagaatacctgatgagatgaaggatgagaacaaatgacagagatgagtctccaagtaaagggggcctcacatcaataattaggaaacttagatataagtcgcccttttctgaaaattctaccccaagtcatttagatttttaaaaaatatttctaatgttaaaatattgggaccaaattagaatcaatagtataagattaattaattagagtaaaaatatctattaaggcagagaaagtttagagaaaaaaatccaaagaaatttgtgtttcttcctattctgaacaagtaaatccatccatccatccatccaaacctcctttatctaactgtgtctactaaaagcaccatgttttgtggggaacactcagataaatggaatatcatcctcaacttcaaaattctatgatctaggagatttaattaaaatgacattttaatttttctatgcgttccaacaatcagattgcatagtctcttttgtgaatagctgtcatataatcagttgtactgtaagatatctcctttaaactcatttgggatataagttaaacatccttcaaattgttgatgttgacaaacaggataatttcaataatattattcaaacataaactggtctaggagaatattgcatcactgactaattagcctatctagagtctaacttcaccattaaaccaaaagcagatggtggtccttggccaagaatattggagacattggagttggtttttttctaagctataagaagtgaggcgagctgaaaaagtatggtagagcaggagaagggtttgtgagattccttctagtgaagttcaccctcaaacttttcaggggtaaagacacagagtgattcaggggccacaatctaatagctcagggctctcctatccattcagagaagtctctaggaaaagggatctcatatcagtacttatgaaaaattgaatataagcctccctttctaaataaatctgcatcgagtcatcacagccctctttttggatactataccttgattttttttttctgatttacaatatgcatatggtttctactgggctatagaaagcagaatcactcattttggagaaggaaaaaatgaatagttaaaacaaacttttaactgttaaggtaacagaaatgtatttagtgaatgtctctttcctcctaagaacacaagacttctacatgttgggtaatacctagagatgcatgtaggaataatccaaaatgacccaaatgctttataatagcaccactttataattcttttgaatgatttctgtagtatataattgacttcagttgtttgagtgttttttgttttatttttgtcccccctgggaaaacatatttcagcatgtataagagggagaaaaaaagtttcattccttccagagaataacttatttagtccagtagggtagaattttaaaatgtcagttaaagtcttcaaagtgcttggggggatatcagattccagaggccaattgtagcaattgaaatttgcagaatcaattatgtaaatctgagacaaattagtattaaaattacacggagtatattttttaaatcacccaactttgtagattatacctattttgggcaggtatggaaaaattttgcagttaaatgattgcctaaagaaagtggtaaacaggtgaggaaagatggcctctgatctaggatagatccagaaccacaaagcatctgcaccacaaaaggtgttagactaccaagcagctcctggttttctgcatagtattagtagcacagcttaggatgagaatcctttctccagtaacattcttaaaatagcatgaaaaacaacgcaaaactcaaatttctattaaaacacacaaactaaaatcaagtgattcttttttgtagattagggagaaggactgaatatctaatttaagagaaggaatagtgtttaagtgttatagtgtgtgagctaataccttctaaaggaaagacatggcatgaagattgtgcatacttacaatgctaaggaaaaatcaagaaaaggactgtgtgaggctctgctactagatgaagttggaaggactattaatgtgcttcttgaagtatcaaaaatgaaaagaaaattaaaattgtttaagcctgacagggaaggatgtaaatacaagtttttctagagctctctaacctttatttcaaaactggaattattcatccatctgtaattgttgataatttaactagtatatgtagttcataaggtaatagaaaaggtgatcatgaaagcatgtatataactggacagaaccacgataatgctataagatgtagatttagttaggttatcagatgttaaatgattttaatattattaaataaatcaaactagaaaactaaccacaagtataatgtaacaaagttaaatgcaggatataaaaatgtaggatggattttgcatagtaaaaagataagtttgccatttaaaattgttgtttgttgggtttagctgaaagtaggcatatatggttccacttgggaaaacttgctttaaagcattacaatgaacaattttttctcattctcttattcctttatcactttttaaatgtaaagaaaattgtatttatttatttttttaaataaacaccaccttgcagaatttaataggcaaacatgttacatatgactaagtaagggtcttcaagatgaagtaaagaaaatgtaaatgttctattaccttatgcagagacaaaaaaaaaaaggagtggtgtcatttagctagcaaacaaacaaaatacagttaattggtgatatgtcctttcttttctcactatgccctcttgcctccaaaaatgacaacaaagaatcacaatttttctgataaataaatgctaaaccaagcgtttcaaactattgcattgccattcttttggactttagttattagaatgatgattgttatagggcaaatgagaaatccatgtgcatcagcttctagttgttaaaaaaaccagataaattaacttctactgtatactgtgggcagaggatcctagagctgatcctacaacatcagcttctagttgttaaaaaaaaaaaaagaaacagataaattaacttctactgtatatactgtgggcagaggatcttactgtgcctctgtttgtgtacatggacttcggtgtgtatcagtttgaaggacagccttgccccatgtaaacatataaatgcagattggtatcgcctggttgctatttgcttaagaacaaatattatacagatgagatcaggcataattttaaaagatcattatcagtggagacctcattattactgatattacaatggggccagtttttatacttctgggtagaattaataaaatttttctgatcccagagatctgagttctctctgcagttggaaacaagaagctgttgtgggcattgtgtcgggccaggggcccttgtgtttgtgtgggcaaatatcttttagcagtgtgagctgcttttttcttttcattaaaagtctctctaaaataatagaaatttcagatactcggttcaagtctcactgattttgtagaggtccaaaaatgtaggatctgtcacttttgcaggcccctgcctcacctaattcctggccaggtgacattttgggcagaagtaaatgcttctatagtcacaagctaaaatgactctaagccccaatttcacggggggtattcacatgcttcctctggaaaatactctttgacagtcagctttgcaagtaagtgattaccttgttaggaatcaaagaaaaatgtatttctctctgacctttagaggaaaatagaatccttcccttttttgcccattgacacaactggcactgctctcttccctttctaccaccctggttcaaagtagtcccccgatgctgtcctgttcctttcttaagccatagtggatctctgagatcctacaccccactttgtgaaacactgacttcatctttgccctcgaatgcctgattttttcataagagattctagcaatttggacactgtttaagtgaactatcaaactaccgcatagagaatatttaagctattaaaattatggtttcccatgaagatcaattctctgtgtccttccctataggaatttgagacgagttagccctgtgatgaatcttgaaactcacatatgtccacatacacttggtagaacttcgatttaatctttacataaaagctgtacatataaccaagaagttatttttgccagtaaattaacttatttgctttattcatcttatttggttcctaatcgtaaatattttgtagctgctgtaaatttttttctcccaaatgaggagtcttattatcataaaggtaaaggctattcagctttgataaccacctgcaattcttttttggatcattcatccatctaacaaatacataatgaggacagttcatgttaatgaaaatccatgttgtttaatagaatgccatcctttacctacttttgctctttatggacgtttttcttttcatgctctagtgagctttccctatatcatgagaagtggttatatttgtgcaaatatacaaatataggaaaacaaagattcatacctgtaggcaatagtctaacttgtccaaaccactttgcctttactgctatttttatccccaatgcgtagatatttcccccaggcctatagcctttgtgaaggaaagcaaatcatacctcctgtatattgacacgaatctggttttcaaatgtcatttccagattttttagttaattgggggttgtccttttcccttaatgtgagagtcattttcctgtatatttctggatctctcaggggctgggaggggggagtgaggggactacaaccatagcactccaagaacccttttgggattactccagtaatcaactacgaaagttattttctaaatgtagatatgtaaggtgttcttttaaagtaaggtactttgaaatatgtagcataaactggtactgctgttaaatgggtcgattattaaacggagcagctgtgtgagggcagctaactttgaatgcctgtctccctggctggtgtgtctccttctcatgttgagagcaccagggattgcgtggctgcatgctgaaaccgcattttcccatggtgtatgactagttcatctctttcttgagcaccattacaagaagatcaaatgaaaatgagatcaatgtggaagacaattcatagcacaaaaaaagtcatcttaaatctactctcaaacattcatcttatacatgcatcaaagtaatttactgacatcagtttgggtgagagagggagtcactttactgaaaaggcagaggcttaaggtgtatacatttgtactcacttccttattttcttaacttgtaagcagaaaacaagccctctctcttgtgaagtatcttcaaaggattggggtgcaaaaataccttgctggtaagccatcaatgttttatttaaatccctgcattcaaagttagctgcctttttgaaataaacaaacaaaaaatactactgtatgtttgaaaatgtgaatagtatttttatagcttgttaaagacatggctagttgcatttgtaaataagtataatgttgctttgattttcttttgtggacatctttatttggaacataattgtctttagggttgatttgtatataagtaattggcctgtgattgtttcttttttggttggaagttatcattttgacattacttgtgattctgtgttcagcactattgtgatgtgttcaacctctgcactcgcttacacaataggatatgccaattgtgtgtggtgtaatgttattttgatttttttccatgttattgatgaaggatcatgcacctaacacatactaacttttttaatgttaggcatatttttagtatactttctcttattctttcttctcctccaaccttttacccatcctccttcctttccctcattcctgttgttatttgagaatgagggagaaacagtattttacatttatgtaattaggcttttccgttagttctcaaggatcctcttttggctcttgggaaagaattgtacctgtacaaggcaattatagaatgcgaactgctttgcctcattccatactgatcatcccagctgaacaatttgaaaactgttctgcctttttgttacatgaatctgtcagaaatatatttttaatttaatataaatgaaattcaataaaatatgaaacaaacgttaaaaaaaaaaaaaaaaaa

SEQ ID NO: 297 - protein, 1308 aa, Homo sapiens
MKPATGLWVWVSLLVAAGTVQPSDSQSVCAGTENKLSSLSDLEQQYRALRKYYENCEVVMGNLEITSIEHNRDLSFLRSVREVTGYVLVALNQFRYLPLENLRIIRGTKLYEDRYALAIFLNYRKDGNFGLQELGLKNLTEILNGGVYVDQNKFLCYADTIHWQDIVRNPWPSNLTLVSTNGSSGCGRCHKSCTGRCWGPTENHCQTLTRTVCAEQCDGRCYGPYVSDCCHRECAGGCSGPKDTDCFACMNFNDSGACVTQCPQTFVYNPTTFQLEHNFNAKYTYGAFCVKKCPHNFVVDSSSCVRACPSSKMEVEENGIKMCKPCTDICPKACDGIGTGSLMSAQTVDSSNIDKFINCTKINGNLIFLVTGIHGDPYNAIEAIDPEKLNVFRTVREITGFLNIQSWPPNMTDFSVFSNLVTIGGRVLYSGLSLLILKQQGITSLQFQSLKEISAGNIYITDNSNLCYYHTINWTTLFSTINQRIVIRDNRKAENCTAEGMVCNHLCSSDGCWGPGPDQCLSCRRFSRGRICIESCNLYDGEFREFENGSICVECDPQCEKMEDGLLTCHGPGPDNCTKCSHFKDGPNCVEKCPDGLQGANSFIFKYADPDRECHPCHPNCTQGCNGPTSHDCIYYPWTGHSTLPQHARTPLIAAGVIGGLFILVIVGLTFAVYVRRKSIKKKRALRRFLETELVEPLTPSGTAPNQAQLRILKETELKRVKVLGSGAFGTVYKGIWVPEGETVKIPVAIKILNETTGPKANVEFMDEALIMASMDHPHLVRLLGVCLSPTIQLVTQLMPHGCLLEYVHEHKDNIGSQLLLNWCVQIAKGMMYLEERRLVHRDLAARNVLVKSPNHVKITDFGLARLLEGDEKEYNADGGKMPIKWMALECIHYRKFTHQSDVWSYGVTIWELMTFGGKPYDGIPTREIPDLLEKGERLPQPPICTIDVYMVMVKCWMIDADSRPKFKELAAEFSRMARDPQRYLVIQGDDRMKLPSPNDSKFFQNLLDEEDLEDMMDAEEYLVPQAFNIPPPIYTSRARIDSNRSEIGHSPPPAYTPMSGNQFVYRDGGFAAEQGVSVPYRAPTSTIPEAPVAQGATAEIFDDSCCNGTLRKPVAPHVQEDSSTQRYSADPTVFAPERSPRGELDEEGYMTPMRDKPKQEYLNPVEENPFVSRRKNGDLQALDNPEYHNASNGPPKAEDEYVNEPLYLNTFANTLGKAEYLKNNILSMPEKAKKAFDNPDYWNHSLPPRSTLQHPDYLQEYSTKYFYKQNGRIRPIVAENPEYLSEFSLKPGTVLPPPPYRHRNTVV

SEQ ID NO: 298 - DNA, 6364 bp, Homo sapiens
ctgggatagaagcggcaggagcagcgttggcaccggcgaaccatggctgggattttctatttcgccctattttcgtgtctcttcgggatttgcgacgctgtcacaggttccagggtataccccgcgaatgaagttaccttattggattccagatctgttcagggagaacttgggtggatagcaagccctctggaaggagggtgggaggaagtgagtatcatggatgaaaaaaatacaccaatccgaacctaccaagtgtgcaatgtgatggaacccagccagaataactggctacgaactgattggatcacccgagaaggggctcagagggtgtatattgagattaaattcaccttgagggactgcaatagtcttccgggcgtcatggggacttgcaaggagacgtttaacctgtactactatgaatcagacaacgacaaagagcgtttcatcagagagaaccagtttgtcaaaattgacaccattgctgctgatgagagcttcacccaagtggacattggtgacagaatcatgaagctgaacaccgagatccgggatgtagggccattaagcaaaaaggggttttacctggcttttcaggatgtgggggcctgcatcgccctggtatcagtccgtgtgttctataaaaagtgtccactcacagtccgcaatctggcccagtttcctgacaccatcacaggggctgatacgtcttccctggtggaagttcgaggctcctgtgtcaacaactcagaagagaaagatgtgccaaaaatgtactgtggggcagatggtgaatggctggtacccattggcaactgcctatgcaacgctgggcatgaggagcggagcggagaatgccaagcttgcaaaattggatattacaaggctctctccacggatgccacctgtgccaagtgcccaccccacagctactctgtctgggaaggagccacctcgtgcacctgtgaccgaggctttttcagagctgacaacgatgctgcctctatgccctgcacccgtccaccatctgctcccctgaacttgatttcaaatgtcaacgagacatctgtgaacttggaatggagtagccctcagaatacaggtggccgccaggacatttcctataatgtggtatgcaagaaatgtggagctggtgaccccagcaagtgccgaccctgtggaagtggggtccactacaccccacagcagaatggcttgaagaccaccaaagtctccatcactgacctcctagctcataccaattacacctttgaaatctgggctgtgaatggagtgtccaaatataaccctaacccagaccaatcagtttctgtcactgtgaccaccaaccaagcagcaccatcatccattgctttggtccaggctaaagaagtcacaagatacagtgtggcactggcttggctggaaccagatcggcccaatggggtaatcctggaatatgaagtcaagtattatgagaaggatcagaatgagcgaagctatcgtatagttcggacagctgccaggaacacagatatcaaaggcctgaaccctctcacttcctatgttttccacgtgcgagccaggacagcagctggctatggagacttcagtgagcccttggaggttacaaccaacacagtgccttcccggatcattggagatggggctaactccacagtccttctggtctctgtctcgggcagtgtggtgctggtggtaattctcattgcagcttttgtcatcagccggagacggagtaaatacagtaaagccaaacaagaagcggatgaagagaaacatttgaatcaaggtgtaagaacatatgtggacccctttacgtacgaagatcccaaccaagcagtgcgagagtttgccaaagaaattgacgcatcctgcattaagattgaaaaagttataggagttggtgaatttggtgaggtatgcagtgggcgtctcaaagtgcctggcaagagagagatctgtgtggctatcaagactctgaaagctggttatacagacaaacagaggagagacttcctgagtgaggccagcatcatgggacagtttgaccatccgaacatcattcacttggaaggcgtggtcactaaatgtaaaccagtaatgatcataacagagtacatggagaatggctccttggatgcattcctcaggaaaaatgatggcagatttacagtcattcagctggtgggcatgcttcgtggcattgggtctgggatgaagtatttatctgatatgagctatgtgcatcgtgatctggccgcacggaacatcctggtgaacagcaacttggtctgcaaagtgtctgattttggcatgtcccgagtgcttgaggatgatccggaagcagcttacaccaccaggggtggcaagattcctatccggtggactgcgccagaagcaattgcctatcgtaaattcacatcagcaagtgatgtatggagctatggaatcgttatgtgggaagtgatgtcgtacggggagaggccctattgggatatgtccaatcaagatgtgattaaagccattgaggaaggctatcggttaccccctccaatggactgccccattgcgctccaccagctgatgctagactgctggcagaaggagaggagcgacaggcctaaatttgggcagattgtcaacatgttggacaaactcatccgcaaccccaacagcttgaagaggacagggacggagagctccagacctaacactgccttgttggatccaagctcccctgaattctctgctgtggtatcagtgggcgattggctccaggccattaaaatggaccggtataaggataacttcacagctgctggttataccacactagaggctgtggtgcacgtgaaccaggaggacctggcaagaattggtatcacagccatcacgcaccagaataagattttgagcagtgtccaggcaatgcgaacccaaatgcagcagatgcacggcagaatggttcccgtctgagccagtactgaataaactcaaaactcttgaaattagtttacctcatccatgcactttaattgaagaactgcactttttttacttcgtcttcgccctctgaaattaaagaaatgaaaaaaaaaaacaatatctgcagcgttgcttggtgcacagattgctgaaactgtggggcttacagaaatgactgccggtcatttgaatgagacctggaacaaatcgtttctcagaagtacttttctgttcatcaccagtctgtaaaatacatgtacctatagaaatagaacactgcctctgagttttgatgctgtatttgctgccagacactgagcttctgagacatccctgattctctctccatttggaattacaaccattgtattttgtttgtggcataaattacagtcatctgtctttcactggaatgaagaccatgcctaggaacattttttaaggactcagctgtggcttttagggcttggttcataccatgggggaaaaaaaagtcctaggagaaagcgacgtggctcattagtgttgcctcttcagtgctcaagccgcctggtggattcctatgacacagggggcctggaaagaaagggaaagtggatttaaaatatatatatacgtaacccaagccccataacccctaactggacaaatgaggtctgtttctttgggcctgaggctgtgccatataaagtcttattttgggactttacaaacttgtcctaactatcttgtggatagtgggctgtgacaatctggaatagagaacgttcacacttcgctcctttaaagaagcgaccccagatctgcaagggagtagattctgctatcttggcctcacagcccttcctgttgattacaaagcccgtggaagaaaacagaacacaccctcctcagttccgtctaaatgtgtttcttctgcttcaattacaccagttctggggcaaagacactgatgaaacaacacccatacctgaaaagaataaatgtgtgactttcaaatcccctttcgcagtgaaagaaacagcaaacacttaagattcagcatctgttctccagttgcactgaggaatgcactgtctcgcagcaccagctctgcagagcccttgccccagactctttgcggttttatttatatgtatttccatatttcattcctgtgtgtcactgctgcattggtgtggcagcaagtgaccaaatgctacaggtcttactatggacaccaggtcaggtgcaaccacacaaaacaaagccagttccatgagctgcctatgatatgcattgcggaagtaacattttacccagggtgtgccattgcagtgatataaatatatttttttcttagactaaatatgagctgactatctcttttgatgtgtgtacataggtgtgagtgtgtgtgtatgcgtgcctgtctgtgtgcgggtgtgtgtatgtgcatagcctcatgcttaggactacccatgaatgttgtggaatgctacacctggagagttctggttttccaccagtttcaagatgaagaactacatgatacagtggacctggagaccatccccttggaaagacaacccagagatgttcagcatcctgtatctacacgcatcctgtatctacacgtgtattttgtagctgtcacactaaccttaataagaattctacagctttggacagaggcattttcaccttaatggtgaagtaatttaaaatataaatccattcaggtgacaacccatcatcaaaattacaaattttctgattgaactcatctgaatcatcagttccttgatggagagagagaaggagatggaatgtgtctggtaaccccaaatggagtacaagtagcctttgttttcctgcataaatggacttgttgaatgcgaacgaatatatgcaattcatatacttttggagatgaacgtagatatgtgtgtcagctttgagatggtgtgtcctggattaatactttgtctcccaatatcacagaaaaatacatgccagtgactcttgaggttaaggtagttgggatgaaatggcctcaggcaatttcacattccctaattacctggaaagttctacagtaattaatatgcagctaactcctgttgccctcacaagagcatcagccttctagaatcggagctccggagtgtgaagattcagtattgatatgatatgtataccaaactccagccaacttactgccatttttcataatctgagtggctgccttgcttatcctaagctgtggttgcagaaaccgtggccatttatataagctataacatcaaatcagggaaaaatgaggaaaaaaaatagattctgaaccatttattgttgaataagtagagaaaatcatcaataaatatttattacattctgacagggtgtgtggcattgtgttctatgccagagtgacaaagttgattcacccctttttggggaccttaatatattttttaagggatgtgcctatgcattgatgcctgaaaaatatgtataaagaaatgaggttgactcttctgagcagttcatcttttccagaggtaagggtaggaggccaacttcagggtctgggtctgagcccgtgggcaagccctggccgagtgagctccaatgctaactcatgtgccgatctctagagcagtgggaaactaccccgctgcaccaaatcaagtagcttcaccttgtgtatgcaggccccaagttattttttagcaatcttacgagtgaaatgttctggtgggttgaaaaacgttcttattttaaagaaaggttgtgctcgctacactgctggtgtgtgcattctgagacctcttgtattcaatctgtgaaggatatgtgtattaatccgtacacccgtatagcctcaatatttgtctgaagacacttaaattctgacccataaaggaaagttctagaagcaatattttcacttatttaacattctccaaacaacatcaagcattgatacacactgaagagtgcgtttattttttgtatcactctaagtatgttggaatatgcaaggactgtggttcaaattagaatgtataaggcatattataatttagttcatactgaataagaaattaacagaacattgttcggttcacacgttccaaactttgagtgatttctggagttagacatagattttctattttgttttaatttgtcaaggtatttttcttcccttcatgaactttaggtacacataacttatgtcatttatttatggtcttttatacctagtttgtaaaattgtaaaatagcaaactaaatgcaaagagtttgcatttgaaaataataaagtagttgccgtatacaaccctgcaaaaaaaaaaaaaaaaaa

SEQ ID NO: 299 - protein, 986 aa, Homo sapiens
MAGIFYFALFSCLFGICDAVTGSRVYPANEVTLLDSRSVQGELGWIASPLEGGWEEVSIMDEKNTPIRTYQVCNVMEPSQNNWLRTDWITREGAQRVYIEIKFTLRDCNSLPGVMGTCKETFNLYYYESDNDKERFIRENQFVKIDTIAADESFTQVDIGDRIMKLNTEIRDVGPLSKKGFYLAFQDVGACIALVSVRVFYKKCPLTVRNLAQFPDTITGADTSSLVEVRGSCVNNSEEKDVPKMYCGADGEWLVPIGNCLCNAGHEERSGECQACKIGYYKALSTDATCAKCPPHSYSVWEGATSCTCDRGFFRADNDAASMPCTRPPSAPLNLISNVNETSVNLEWSSPQNTGGRQDISYNVVCKKCGAGDPSKCRPCGSGVHYTPQQNGLKTTKVSITDLLAHTNYTFEIWAVNGVSKYNPNPDQSVSVTVTTNQAAPSSIALVQAKEVTRYSVALAWLEPDRPNGVILEYEVKYYEKDQNERSYRIVRTAARNTDIKGLNPLTSYVFHVRARTAAGYGDFSEPLEVTTNTVPSRIIGDGANSTVLLVSVSGSVVLVVILIAAFVISRRRSKYSKAKQEADEEKHLNQGVRTYVDPFTYEDPNQAVREFAKEIDASCIKIEKVIGVGEFGEVCSGRLKVPGKREICVAIKTLKAGYTDKQRRDFLSEASIMGQFDHPNIIHLEGVVTKCKPVMIITEYMENGSLDAFLRKNDGRFTVIQLVGMLRGIGSGMKYLSDMSYVHRDLAARNILVNSNLVCKVSDFGMSRVLEDDPEAAYTTRGGKIPIRWTAPEAIAYRKFTSASDVWSYGIVMWEVMSYGERPYWDMSNQDVIKAIEEGYRLPPPMDCPIALHQLMLDCWQKERSDRPKFGQIVNMLDKLIRNPNSLKRTGTESSRPNTALLDPSSPEFSAVVSVGDWLQAIKMDRYKDNFTAAGYTTLEAVVHVNQEDLARIGITAITHQNKILSSVQAMRTQMQQMHGRMVPV

SEQ ID NO: 300 - DNA, 8096 bp, Homo sapiens
gggagggacgaaccgcgcgaccgagccctacaaaacccgccccggccgagtggcgaggcgagctttccagccgggctcccagagccgcgctgcgcaggagacgcggtggcctgagagcctgagggtccccggactcgcccaggctctgagcgcgcgcccaccatgagcgcccggaccgcccccaggccgcaggtgctcctgctgccgctcctgctggtgctcctggcggcggcgcccgcagccagcaagggttgtgtctgtaaagacaaaggccagtgcttctgtgacggggccaaaggggagaagggggagaagggctttcctggaccccccggttctcctggccagaaaggattcacaggtcctgaaggcttgcctggaccgcagggacccaagggctttccaggacttccaggactcacgggttccaaaggtgtaaggggaataagtggattgccaggattttctggttctcctggacttccaggcaccccaggcaataccgggccttacggacttgtcggtgtaccaggatgcagtggttctaagggtgagcaggggtttccaggactcccagggacactgggctacccagggatcccgggtgctgctggtttgaaaggacaaaagggtgctcctgctaaagaagaagatatagaacttgatgcaaaaggcgaccccgggttgccaggggctccaggaccccagggtttgccaggccctccaggttttcctgggcctgttggcccacctggtcctccgggattctttggctttccaggagccatgggacctagaggacctaagggtcacatgggtgaaagagtgataggacataaaggagagcggggtgtgaaagggttaacaggacccccgggaccaccaggaacagttattgtgaccctaactggcccagataacagaacggacctcaagggggaaaagggagacaagggagcaatgggcgagcctggacctcctggaccctcaggactgcctggagaatcatatggatctgaaaagggtgctcctggagaccctggcctgcagggaaaacccggaaaagatggtgttcctggcttccctggaagtgagggagtcaagggcaacaggggtttccctgggttaatgggtgaagatggcattaagggacagaaaggggacattggccctccaggatttcgtggtccaacagaatattatgacacataccaggaaaagggagatgaaggcactccaggcccaccagggcccagaggagctcgtggcccacaaggtcccagtggtccccccggagttcctggaagtcctggatcatcaaggcctggcctcagaggagcccctggatggccaggcctgaaaggaagtaaaggggaacgaggccgcccaggaaaggatgccatggggactcctgggtccccaggttgtgctggttcaccaggtcttccaggatcaccgggacctccaggaccgccaggtgacatcgtttttcgcaagggtccacctggagatcacggactgccaggctatctagggtctccaggaatcccaggagttgatgggcccaaaggagaaccaggcctcctgtgtacacagtgcccttatatcccagggcctcccggtctcccaggattgccagggttacatggtgtaaaaggaatcccaggaagacaaggcgcagctggcttgaaaggaagcccagggtccccaggaaatacaggtcttccaggatttccaggtttcccaggtgcccagggtgacccaggacttaaaggagaaaaaggtgaaacacttcagcctgaggggcaagtgggtgtcccaggtgacccggggctcagaggccaacctgggagaaagggcttggatggaattcctggaactccgggagtgaaaggattaccaggacctaaaggcgaactggctctgagtggtgagaaaggggaccaaggtcctccaggggatcctggctcccctgggtccccaggacctgcaggaccagctggaccacctggctacggaccccaaggagaacctggtctccagggcacgcaaggagttcctggagcccccggaccacccggagaagccggccctaggggagagctcagtgtttcaacaccagttccaggcccaccaggacctccagggccccctggccatcctggcccccaaggtccacctggtatccctggatccctggggaaatgtggagatcctggtcttccagggcctgatggtgaaccaggaattccaggaattggatttcctgggcctcctggacctaagggagaccaaggttttccaggtacaaaaggatcactgggttgtcctggaaaaatgggagagcctgggttacctggaaagccaggcctcccaggagccaagggagaaccagcagtagccatgcctggaggaccaggaacaccaggttttccaggagaaagaggcaattctggggaacatggagaaattggactccctggacttccaggtctccctggaactccaggaaatgaagggcttgatggaccacgaggagatccagggcagcctggaccacctggagaacaaggacccccaggaaggtgcatagagggtcccaggggagcccaaggacttccaggcttaaatggattgaaagggcaacaaggcagaagaggtaaaacggggccaaagggagacccaggaattccaggcttggatagatcaggatttcctggagaaactggatcaccaggaattccaggtcatcaaggtgaaatgggaccactgggtcaaagaggatatccaggaaatccgggaattttagggccaccaggtgaagatggagtgattgggatgatgggctttcctggagccattggccctccagggccccctgggaacccaggcacaccagggcagagggggagccctggaattccaggagtaaagggccagagaggaaccccaggagccaagggggaacaaggagataaaggaaatcccgggccttcagagatatcccacgtaataggggacaaaggagaaccaggtctcaaaggattcgcaggaaatccaggtgagaaaggaaacagaggcgttccagggatgccaggtttaaagggcctcaaaggactacccggaccagcaggaccaccaggccccagaggagatttgggcagcactgggaatcctggagaaccaggactgcgtggtataccaggaagcatggggaacatgggcatgccaggttctaaaggaaaaaggggaactttgggattcccaggtcgagcaggaagaccaggcctcccaggtattcatggtctccagggagataagggagagccaggttattcagaaggtacaaggccaggaccaccgggaccaacgggggatccaggactgccgggtgatatgggaaagaaaggagaaatggggcaacctggcccacctggacatttggggcctgctggacctgagggagcccctggaagtcctggaagtcctggcctcccaggaaagccaggtcctcatggtgatttgggttttaaaggaatcaaaggcctcctgggccctccaggaatcagaggccctccaggtcttccaggatttccaggatctcctggaccaatgggtataagaggtgaccaaggacgtgatggaattcctggtccagccggagaaaagggagaaacgggtttattgagggcccctccaggcccaagagggaaccctggtgctcaaggagccaaaggagacaggggagccccaggttttcctggcctcccgggcagaaaaggggccatgggagatgctggacctcgaggacccacaggcatagaaggattcccagggccaccaggtctgcccggtgcaattatccctggccagacaggaaatcgtggtccaccaggctcaagaggaagcccaggtgcgcctggtccccctggacctccagggagtcatgtaataggcataaaaggagacaaagggtctatgggccaccctggcccaaaaggtccacctggaactgcaggagacatgggaccaccaggtcgtctgggagcaccaggtactccaggtcttccaggacccagaggtgatcctggattccaggggtttccaggcgtgaaaggagaaaagggtaatcctggatttctaggatccattggacctccaggaccaattgggccaaaaggaccacctggtgtacgtggagaccctggcacacttaagattatctcccttccaggaagcccagggccacctggcacacctggagaaccagggatgcagggagaacctgggccaccagggccacctggaaacctaggaccctgtgggccaagaggtaagccaggcaaggatggaaaaccaggaactcctggaccagctggagaaaaaggcaacaaaggttctaaaggagagccaggaccagctggatcagatggattgccaggtttgaaaggaaaacgtggagacagtggatcacctgcaacctggacaacgagaggctttgtcttcacccgacacagtcaaaccacagcaattccttcatgtccagaggggacagtgccactctacagtgggttttcttttctttttgtacaaggaaatcaacgagcccacggacaagaccttggaactcttggcagctgcctgcagcgatttaccacaatgccattcttattctgcaatgtcaatgatgtatgtaattttgcatctcgaaatgattattcatactggctgtcaacaccagctctgatgccaatgaacatggctcccattactggcagagcccttgagccttatataagcagatgcactgtttgtgaaggtcctgcgatcgccatagccgttcacagccaaaccactgacattcctccatgtcctcacggctggatttctctctggaaaggattttcattcatcatgttcacaagtgcaggttctgagggcaccgggcaagcactggcctcccctggctcctgcctggaagaattccgagccagcccatttctagaatgtcatggaagaggaacgtgcaactactattcaaattcctacagtttctggctggcttcattaaacccagaaagaatgttcagaaagcctattccatcaactgtgaaagctggggaattagaaaaaataataagtcgctgtcaggtgtgcatgaagaaaagacactgaagctaaaaaagacagcagaactgctatttttcatcctaaagaacaaagtaatgacagaacatgctgttatttaggtatttttctttaaccaaacaatattgctccatgatgacttagtacaaagtttcaatttgtttccccacaaaacaaagcaattctttcaagtcagttctgtgatctgggtctctaatctgtgctgtttcaaagttctctgtggcaaagcagcaactattcacaaaatatcaccaaaaacctattccacttacatccaaggcactgtcactacggtgattgtatgaagtttgaatgctgcaagttatgaaatatttggcccgctggattcccacatttgtcttctttctgtctttaagactcagggaggctaaatcagtgtttgattgccccgccaacccttcctgaaacttcagaccctgggtaggggaagagaagggggcatgtggtatcctggagcattgtgtatagaactggattttcagacctgctgaggaccgtaaggcctgatggaacacagaactgaactgaggttcatggattttccaggactgtttcaaacatgcccattactaacggcaaaagggggattccctgatggaaccataatacccttggaaatactgtatggttttgttttgttttgttggtttttaaagatttttgtttgtttattgaattcatttcactgtagctctaaaatctgcttgtattccaagcatataaaattttcccccttagtgaattagttttaaaatgatattgttatatacatactatgaaatatgtataactttaacttctgttttaccagcatacccacacaaataacaagaatactacttatgaaatgtgcactttatcctcattccataaatgtcggtgcataccttatgtaagggagcagttcaataatccatgaaagaacttaaggcatttgttggtttatcagactcggaatctattttctcattgctctgaatatgtcatcactctaggttttacagatttattcctttgttacttctctaattcttcctttgtaaaaaaaaaaaaaagcaacactttttatgttatatgttgttcttacaaaccatactgaaagagtccattgtttaaaaatcttaatgtatcaaactgtataacttggccgctgtatgtcttaaaacctgcttttcaatgtgttgatacattcccaaggttacttaattcaacttaactatcatcttattcagcaccaagcatgtcccaggcactgtactaacctacagagatgctaagagaaaaaaaagacttgtttctgatctaatatcccagaaaaagtaactcattgctctgttaataatctcacatatacaagtagcttccctcccctctagttttttcttccttttcactgctgttatatttcatcatgataattcagcaggcccaagtaaaggttaaaaataaggtctatgcctagggaaactcagggcttctagtttctcttagaaaagctaagagaagataaggtctgaataatagcagaaaaaccaacatctacaaaacattaaactagtgttatacttgatgataacactatttgatgagtcttagagtccagacacaaagagacaaagctttgaagatgctttttgatctacctaggtggagttggtggtgctgatatttaaattcaggctactgcttcaatctcaattgctttgtaagtgaaaaacatgacccagaggacagcacagactatggccatggctcacatggtttacatccttcactgctcacgtgtttgctgtcaagccatttttacatctaaactaagatgtgcagcatttcacttatttagattcacttaacaaacaaatttttctgctttaaaaatgtcttattgtcccaagtgtactatagcggcatatagagctagctaatctctacaaaccctctgtaggccagtagttctcaaagtgtggtctctggaagagcagtatcagcatcatctgggaacttgtcacagatgcagattctagggaccactccagacctacacaatcagaaactcttgggggagggcccgaaatatctatgttttaccaagcccaccacatgattctgatgtactctaaatactgagaaaacctgttctagacaaatacccaagcaacaactccgcaggcagttaccaagtacggctggctacaactgctccatccgtgcctctttttaaagttcaaactcacaggtgactctaaggttatctacttttactcataagtaaaagccctagactggtgctaatgtcaaaccactggcctccactcaggcctccatcttctcatgccctcttaccagtatttaacttctgaggaagacaagtgatgctaaaacctgaaattccaatgaagccatatgaacagctgttcagttgcacttctaagactttacttagcagtaaattatagctcatgtgcattattttccagataacttagcttatgagtagcttatacaattatgaagatttaatattacagataaaatgtaaactgtttctttaaaattggggcttcaactttggaatttcacagcgtgctaaaataacagatttctcagaagtctttcagcaagataaacattattaagtaacttatttatgaaagtattaaaatgcttacatttgaacttgatggctaacttacaaagattctctatgtatcaaatgtaacttactgcgactaaacttaatttaatatttactctataaccaaatgaaatatatttaaaatatattgaatattttatattgttatatcctgacaagattataatattttaatgtactaatatttctgtaattatatctaaaatattattttattatattgcctaagaataaacatttgttaaattgg

SEQ ID NO: 301 - protein, 1670 aa, Homo sapiens
MSARTAPRPQVLLLPLLLVLLAAAPAASKGCVCKDKGQCFCDGAKGEKGEKGFPGPPGSPGQKGFTGPEGLPGPQGPKGFPGLPGLTGSKGVRGISGLPGFSGSPGLPGTPGNTGPYGLVGVPGCSGSKGEQGFPGLPGTLGYPGIPGAAGLKGQKGAPAKEEDIELDAKGDPGLPGAPGPQGLPGPPGFPGPVGPPGPPGFFGFPGAMGPRGPKGHMGERVIGHKGERGVKGLTGPPGPPGTVIVTLTGPDNRTDLKGEKGDKGAMGEPGPPGPSGLPGESYGSEKGAPGDPGLQGKPGKDGVPGFPGSEGVKGNRGFPGLMGEDGIKGQKGDIGPPGFRGPTEYYDTYQEKGDEGTPGPPGPRGARGPQGPSGPPGVPGSPGSSRPGLRGAPGWPGLKGSKGERGRPGKDAMGTPGSPGCAGSPGLPGSPGPPGPPGDIVFRKGPPGDHGLPGYLGSPGIPGVDGPKGEPGLLCTQCPYIPGPPGLPGLPGLHGVKGIPGRQGAAGLKGSPGSPGNTGLPGFPGFPGAQGDPGLKGEKGETLQPEGQVGVPGDPGLRGQPGRKGLDGIPGTPGVKGLPGPKGELALSGEKGDQGPPGDPGSPGSPGPAGPAGPPGYGPQGEPGLQGTQGVPGAPGPPGEAGPRGELSVSTPVPGPPGPPGPPGHPGPQGPPGIPGSLGKCGDPGLPGPDGEPGIPGIGFPGPPGPKGDQGFPGTKGSLGCPGKMGEPGLPGKPGLPGAKGEPAVAMPGGPGTPGFPGERGNSGEHGEIGLPGLPGLPGTPGNEGLDGPRGDPGQPGPPGEQGPPGRCIEGPRGAQGLPGLNGLKGQQGRRGKTGPKGDPGIPGLDRSGFPGETGSPGIPGHQGEMGPLGQRGYPGNPGILGPPGEDGVIGMMGFPGAIGPPGPPGNPGTPGQRGSPGIPGVKGQRGTPGAKGEQGDKGNPGPSEISHVIGDKGEPGLKGFAGNPGEKGNRGVPGMPGLKGLKGLPGPAGPPGPRGDLGSTGNPGEPGLRGIPGSMGNMGMPGSKGKRGTLGFPGRAGRPGLPGIHGLQGDKGEPGYSEGTRPGPPGPTGDPGLPGDMGKKGEMGQPGPPGHLGPAGPEGAPGSPGSPGLPGKPGPHGDLGFKGIKGLLGPPGIRGPPGLPGFPGSPGPMGIRGDQGRDGIPGPAGEKGETGLLRAPPGPRGNPGAQGAKGDRGAPGFPGLPGRKGAMGDAGPRGPTGIEGFPGPPGLPGAIIPGQTGNRGPPGSRGSPGAPGPPGPPGSHVIGIKGDKGSMGHPGPKGPPGTAGDMGPPGRLGAPGTPGLPGPRGDPGFQGFPGVKGEKGNPGFLGSIGPPGPIGPKGPPGVRGDPGTLKIISLPGSPGPPGTPGEPGMQGEPGPPGPPGNLGPCGPRGKPGKDGKPGTPGPAGEKGNKGSKGEPGPAGSDGLPGLKGKRGDSGSPATWTTRGFVFTRHSQTTAIPSCPEGTVPLYSGFSFLFVQGNQRAHGQDLGTLGSCLQRFTTMPFLFCNVNDVCNFASRNDYSYWLSTPALMPMNMAPITGRALEPYISRCTVCEGPAIAIAVHSQTTDIPPCPHGWISLWKGFSFIMFTSAGSEGTGQALASPGSCLEEFRASPFLECHGRGTCNYYSNSYSFWLASLNPERMFRKPIPSTVKAGELEKIISRCQVCMKKRH

SEQ ID NO: 302 - DNA, 7923 bp, Homo sapiens
gggagggacgaaccgcgcgaccgagccctacaaaacccgccccggccgagtggcgaggcgagctttccagccgggctcccagagccgcgctgcgcaggagacgcggtggcctgagagcctgagggtccccggactcgcccaggctctgagcgcgcgcccaccatgagcgcccggaccgcccccaggccgcaggtgctcctgctgccgctcctgctggtgctcctggcggcggcgcccgcagccagcaagggttgtgtctgtaaagacaaaggccagtgcttctgtgacggggccaaaggggagaagggggagaagggctttcctggaccccccggttctcctggccagaaaggattcacaggtcctgaaggcttgcctggaccgcagggacccaagggctttccaggacttccaggactcacgggttccaaaggtgtaaggggaataagtggattgccaggattttctggttctcctggacttccaggcaccccaggcaataccgggccttacggacttgtcggtgtaccaggatgcagtggttctaagggtgagcaggggtttccaggactcccagggacactgggctacccagggatcccgggtgctgctggtttgaaaggacaaaagggtgctcctgctaaagaagaagatatagaacttgatgcaaaaggcgaccccgggttgccaggggctccaggaccccagggtttgccaggccctccaggttttcctgggcctgttggcccacctggtcctccgggattctttggctttccaggagccatgggacctagaggacctaagggtcacatgggtgaaagagtgataggacataaaggagagcggggtgtgaaagggttaacaggacccccgggaccaccaggaacagttattgtgaccctaactggcccagataacagaacggacctcaagggggaaaagggagacaagggagcaatgggcgagcctggacctcctggaccctcaggactgcctggagaatcatatggatctgaaaagggtgctcctggagaccctggcctgcagggaaaacccggaaaagatggtgttcctggcttccctggaagtgagggagtcaagggcaacaggggtttccctgggttaatgggtgaagatggcattaagggacagaaaggggacattggccctccaggatttcgtggtccaacagaatattatgacacataccaggaaaagggagatgaaggcactccaggcccaccagggcccagaggagctcgtggcccacaaggtcccagtggtccccccggagttcctggaagtcctggatcatcaaggcctggcctcagaggagcccctggatggccaggcctgaaaggaagtaaaggggaacgaggccgcccaggaaaggatgccatggggactcctgggtccccaggttgtgctggttcaccaggtcttccaggatcaccgggacctccaggaccgccaggtgacatcgtttttcgcaagggtccacctggagatcacggactgccaggctatctagggtctccaggaatcccaggagttgatgggcccaaaggagaaccaggcctcctgtgtacacagtgcccttatatcccagggcctcccggtctcccaggattgccagggttacatggtgtaaaaggaatcccaggaagacaaggcgcagctggcttgaaaggaagcccagggtccccaggaaatacaggtcttccaggatttccaggtttcccaggtgcccagggtgacccaggacttaaaggagaaaaaggtgaaacacttcagcctgaggggcaagtgggtgtcccaggtgacccggggctcagaggccaacctgggagaaagggcttggatggaattcctggaactccgggagtgaaaggattaccaggacctaaaggcgaactggctctgagtggtgagaaaggggaccaaggtcctccaggggatcctggctcccctgggtccccaggacctgcaggaccagctggaccacctggctacggaccccaaggagaacctggtctccagggcacgcaaggagttcctggagcccccggaccacccggagaagccggccctaggggagagctcagtgtttcaacaccagttccaggcccaccaggacctccagggccccctggccatcctggcccccaaggtccacctggtatccctggatccctggggaaatgtggagatcctggtcttccagggcctgatggtgaaccaggaattccaggaattggatttcctgggcctcctggacctaagggagaccaaggttttccaggtacaaaaggatcactgggttgtcctggaaaaatgggagagcctgggttacctggaaagccaggcctcccaggagccaagggagaaccagcagtagccatgcctggaggaccaggaacaccaggttttccaggagaaagaggcaattctggggaacatggagaaattggactccctggacttccaggtctccctggaactccaggaaatgaagggcttgatggaccacgaggagatccagggcagcctggaccacctggagaacaaggacccccaggaaggtgcatagagggtcccaggggagcccaaggacttccaggcttaaatggattgaaagggcaacaaggcagaagaggtaaaacggggccaaagggagacccaggaattccaggcttggatagatcaggatttcctggagaaactggatcaccaggaattccaggtcatcaaggtgaaatgggaccactgggtcaaagaggatatccaggaaatccgggaattttagggccaccaggtgaagatggagtgattgggatgatgggctttcctggagccattggccctccagggccccctgggaacccaggcacaccagggcagagggggagccctggaattccaggagtaaagggccagagaggaaccccaggagccaagggggaacaaggagataaaggaaatcccgggccttcagagatatcccacgtaataggggacaaaggagaaccaggtctcaaaggattcgcaggaaatccaggtgagaaaggaaacagaggcgttccagggatgccaggtttaaagggcctcaaaggactacccggaccagcaggaccaccaggccccagaggagatttgggcagcactgggaatcctggagaaccaggactgcgtggtataccaggaagcatggggaacatgggcatgccaggttctaaaggaaaaaggggaactttgggattcccaggtcgagcaggaagaccaggcctcccaggtattcatggtctccagggagataagggagagccaggttattcagaaggtacaaggccaggaccaccgggaccaacgggggatccaggactgccgggtgatatgggaaagaaaggagaaatggggcaacctggcccacctggacatttggggcctgctggacctgagggagcccctggaagtcctggaagtcctggcctcccaggaaagccaggtcctcatggtgatttgggttttaaaggaatcaaaggcctcctgggccctccaggaatcagaggccctccaggtcttccaggatttccaggatctcctggaccaatgggtataagaggtgaccaaggacgtgatggaattcctggtccagccggagaaaagggagaaacgggtttattgagggcccctccaggcccaagagggaaccctggtgctcaaggagccaaaggagacaggggagccccaggttttcctggcctcccgggcagaaaaggggccatgggagatgctggacctcgaggacccacaggcatagaaggattcccagggccaccaggtctgcccggtgcaattatccctggccagacaggaaatcgtggtccaccaggctcaagaggaagcccaggtgcgcctggtccccctggacctccagggagtcatgtaataggcataaaaggagacaaagggtctatgggccaccctggcccaaaaggtccacctggaactgcaggagacatgggaccaccaggtcgtctgggagcaccaggtactccaggtcttccaggacccagaggtgatcctggattccaggggtttccaggcgtgaaaggagaaaagggtaatcctggatttctaggatccattggacctccaggaccaattgggccaaaaggaccacctggtgtacgtggagaccctggcacacttaagattatctcccttccaggaagcccagggccacctggcacacctggagaaccagggatgcagggagaacctgggccaccagggccacctggaaacctaggaccctgtgggccaagaggtaagccaggcaaggatggaaaaccaggaactcctggaccagctggagaaaaaggcaacaaaggttctaaaggagagccaggaccagctggatcagatggattgccaggtttgaaaggaaaacgtggagacagtggatcacctgcaacctggacaacgagaggctttgtcttcacccgacacagtcaaaccacagcaattccttcatgtccagaggggacagtgccactctacagtgggttttcttttctttttgtacaaggaaatcaacgagcccacggacaagaccttggaactcttggcagctgcctgcagcgatttaccacaatgccattcttattctgcaatgtcaatgatgtatgtaattttgcatctcgaaatgattattcatactggctgtcaacaccagctctgatgccaatgaacatggctcccattactggcagagcccttgagccttatataagcagatgcactgtttgtgaaggtcctgcgatcgccatagccgttcacagccaaaccactgacattcctccatgtcctcacggctggatttctctctggaaaggattttcattcatcatgaaagcctattccatcaactgtgaaagctggggaattagaaaaaataataagtcgctgtcaggtgtgcatgaagaaaagacactgaagctaaaaaagacagcagaactgctatttttcatcctaaagaacaaagtaatgacagaacatgctgttatttaggtatttttctttaaccaaacaatattgctccatgatgacttagtacaaagtttcaatttgtttccccacaaaacaaagcaattctttcaagtcagttctgtgatctgggtctctaatctgtgctgtttcaaagttctctgtggcaaagcagcaactattcacaaaatatcaccaaaaacctattccacttacatccaaggcactgtcactacggtgattgtatgaagtttgaatgctgcaagttatgaaatatttggcccgctggattcccacatttgtcttctttctgtctttaagactcagggaggctaaatcagtgtttgattgccccgccaacccttcctgaaacttcagaccctgggtaggggaagagaagggggcatgtggtatcctggagcattgtgtatagaactggattttcagacctgctgaggaccgtaaggcctgatggaacacagaactgaactgaggttcatggattttccaggactgtttcaaacatgcccattactaacggcaaaagggggattccctgatggaaccataatacccttggaaatactgtatggttttgttttgttttgttggtttttaaagatttttgtttgtttattgaattcatttcactgtagctctaaaatctgcttgtattccaagcatataaaattttcccccttagtgaattagttttaaaatgatattgttatatacatactatgaaatatgtataactttaacttctgttttaccagcatacccacacaaataacaagaatactacttatgaaatgtgcactttatcctcattccataaatgtcggtgcataccttatgtaagggagcagttcaataatccatgaaagaacttaaggcatttgttggtttatcagactcggaatctattttctcattgctctgaatatgtcatcactctaggttttacagatttattcctttgttacttctctaattcttcctttgtaaaaaaaaaaaaaagcaacactttttatgttatatgttgttcttacaaaccatactgaaagagtccattgtttaaaaatcttaatgtatcaaactgtataacttggccgctgtatgtcttaaaacctgcttttcaatgtgttgatacattcccaaggttacttaattcaacttaactatcatcttattcagcaccaagcatgtcccaggcactgtactaacctacagagatgctaagagaaaaaaaagacttgtttctgatctaatatcccagaaaaagtaactcattgctctgttaataatctcacatatacaagtagcttccctcccctctagttttttcttccttttcactgctgttatatttcatcatgataattcagcaggcccaagtaaaggttaaaaataaggtctatgcctagggaaactcagggcttctagtttctcttagaaaagctaagagaagataaggtctgaataatagcagaaaaaccaacatctacaaaacattaaactagtgttatacttgatgataacactatttgatgagtcttagagtccagacacaaagagacaaagctttgaagatgctttttgatctacctaggtggagttggtggtgctgatatttaaattcaggctactgcttcaatctcaattgctttgtaagtgaaaaacatgacccagaggacagcacagactatggccatggctcacatggtttacatccttcactgctcacgtgtttgctgtcaagccatttttacatctaaactaagatgtgcagcatttcacttatttagattcacttaacaaacaaatttttctgctttaaaaatgtcttattgtcccaagtgtactatagcggcatatagagctagctaatctctacaaaccctctgtaggccagtagttctcaaagtgtggtctctggaagagcagtatcagcatcatctgggaacttgtcacagatgcagattctagggaccactccagacctacacaatcagaaactcttgggggagggcccgaaatatctatgttttaccaagcccaccacatgattctgatgtactctaaatactgagaaaacctgttctagacaaatacccaagcaacaactccgcaggcagttaccaagtacggctggctacaactgctccatccgtgcctctttttaaagttcaaactcacaggtgactctaaggttatctacttttactcataagtaaaagccctagactggtgctaatgtcaaaccactggcctccactcaggcctccatcttctcatgccctcttaccagtatttaacttctgaggaagacaagtgatgctaaaacctgaaattccaatgaagccatatgaacagctgttcagttgcacttctaagactttacttagcagtaaattatagctcatgtgcattattttccagataacttagcttatgagtagcttatacaattatgaagatttaatattacagataaaatgtaaactgtttctttaaaattggggcttcaactttggaatttcacagcgtgctaaaataacagatttctcagaagtctttcagcaagataaacattattaagtaacttatttatgaaagtattaaaatgcttacatttgaacttgatggctaacttacaaagattctctatgtatcaaatgtaacttactgcgactaaacttaatttaatatttactctataaccaaatgaaatatatttaaaatatattgaatattttatattgttatatcctgacaagattataatattttaatgtactaatatttctgtaattatatctaaaatattattttattatattgcctaagaataaacatttgttaaattgg

SEQ ID NO: 303 - protein, 1637 aa, Homo sapiens
MSARTAPRPQVLLLPLLLVLLAAAPAASKGCVCKDKGQCFCDGAKGEKGEKGFPGPPGSPGQKGFTGPEGLPGPQGPKGFPGLPGLTGSKGVRGISGLPGFSGSPGLPGTPGNTGPYGLVGVPGCSGSKGEQGFPGLPGTLGYPGIPGAAGLKGQKGAPAKEEDIELDAKGDPGLPGAPGPQGLPGPPGFPGPVGPPGPPGFFGFPGAMGPRGPKGHMGERVIGHKGERGVKGLTGPPGPPGTVIVTLTGPDNRTDLKGEKGDKGAMGEPGPPGPSGLPGESYGSEKGAPGDPGLQGKPGKDGVPGFPGSEGVKGNRGFPGLMGEDGIKGQKGDIGPPGFRGPTEYYDTYQEKGDEGTPGPPGPRGARGPQGPSGPPGVPGSPGSSRPGLRGAPGWPGLKGSKGERGRPGKDAMGTPGSPGCAGSPGLPGSPGPPGPPGDIVFRKGPPGDHGLPGYLGSPGIPGVDGPKGEPGLLCTQCPYIPGPPGLPGLPGLHGVKGIPGRQGAAGLKGSPGSPGNTGLPGFPGFPGAQGDPGLKGEKGETLQPEGQVGVPGDPGLRGQPGRKGLDGIPGTPGVKGLPGPKGELALSGEKGDQGPPGDPGSPGSPGPAGPAGPPGYGPQGEPGLQGTQGVPGAPGPPGEAGPRGELSVSTPVPGPPGPPGPPGHPGPQGPPGIPGSLGKCGDPGLPGPDGEPGIPGIGFPGPPGPKGDQGFPGTKGSLGCPGKMGEPGLPGKPGLPGAKGEPAVAMPGGPGTPGFPGERGNSGEHGEIGLPGLPGLPGTPGNEGLDGPRGDPGQPGPPGEQGPPGRCIEGPRGAQGLPGLNGLKGQQGRRGKTGPKGDPGIPGLDRSGFPGETGSPGIPGHQGEMGPLGQRGYPGNPGILGPPGEDGVIGMMGFPGAIGPPGPPGNPGTPGQRGSPGIPGVKGQRGTPGAKGEQGDKGNPGPSEISHVIGDKGEPGLKGFAGNPGEKGNRGVPGMPGLKGLKGLPGPAGPPGPRGDLGSTGNPGEPGLRGIPGSMGNMGMPGSKGKRGTLGFPGRAGRPGLPGIHGLQGDKGEPGYSEGTRPGPPGPTGDPGLPGDMGKKGEMGQPGPPGHLGPAGPEGAPGSPGSPGLPGKPGPHGDLGFKGIKGLLGPPGIRGPPGLPGFPGSPGPMGIRGDQGRDGIPGPAGEKGETGLLRAPPGPRGNPGAQGAKGDRGAPGFPGLPGRKGAMGDAGPRGPTGIEGFPGPPGLPGAIIPGQTGNRGPPGSRGSPGAPGPPGPPGSHVIGIKGDKGSMGHPGPKGPPGTAGDMGPPGRLGAPGTPGLPGPRGDPGFQGFPGVKGEKGNPGFLGSIGPPGPIGPKGPPGVRGDPGTLKIISLPGSPGPPGTPGEPGMQGEPGPPGPPGNLGPCGPRGKPGKDGKPGTPGPAGEKGNKGSKGEPGPAGSDGLPGLKGKRGDSGSPATWTTRGFVFTRHSQTTAIPSCPEGTVPLYSGFSFLFVQGNQRAHGQDLGTLGSCLQRFTTMPFLFCNVNDVCNFASRNDYSYWLSTPALMPMNMAPITGRALEPYISRCTVCEGPAIAIAVHSQTTDIPPCPHGWISLWKGFSFIMKAYSINCESWGIRKNNKSLSGVHEEKTLKLKKTAELLFFILKNKVMTEHAVI

SEQ ID NO: 304 - DNA, 7630 bp, Homo sapiens
gggagggacgaaccgcgcgaccgagccctacaaaacccgccccggccgagtggcgaggcgagctttccagccgggctcccagagccgcgctgcgcaggagacgcggtggcctgagagcctgagggtccccggactcgcccaggctctgagcgcgcgcccaccatgagcgcccggaccgcccccaggccgcaggtgctcctgctgccgctcctgctggtgctcctggcggcggcgcccgcagccagcaagggttgtgtctgtaaagacaaaggccagtgcttctgtgacggggccaaaggggagaagggggagaagggctttcctggaccccccggttctcctggccagaaaggattcacaggtcctgaaggcttgcctggaccgcagggacccaagggctttccaggacttccaggactcacgggttccaaaggtgtaaggggaataagtggattgccaggattttctggttctcctggacttccaggcaccccaggcaataccgggccttacggacttgtcggtgtaccaggatgcagtggttctaagggtgagcaggggtttccaggactcccagggacactgggctacccagggatcccgggtgctgctggtttgaaaggacaaaagggtgctcctgctaaagaagaagatatagaacttgatgcaaaaggcgaccccgggttgccaggggctccaggaccccagggtttgccaggccctccaggttttcctgggcctgttggcccacctggtcctccgggattctttggctttccaggagccatgggacctagaggacctaagggtcacatgggtgaaagagtgataggacataaaggagagcggggtgtgaaagggttaacaggacccccgggaccaccaggaacagttattgtgaccctaactggcccagataacagaacggacctcaagggggaaaagggagacaagggagcaatgggcgagcctggacctcctggaccctcaggactgcctggagaatcatatggatctgaaaagggtgctcctggagaccctggcctgcagggaaaacccggaaaagatggtgttcctggcttccctggaagtgagggagtcaagggcaacaggggtttccctgggttaatgggtgaagatggcattaagggacagaaaggggacattggccctccaggatttcgtggtccaacagaatattatgacacataccaggaaaagggagatgaaggcactccaggcccaccagggcccagaggagctcgtggcccacaaggtcccagtggtccccccggagttcctggaagtcctggatcatcaaggcctggcctcagaggagcccctggatggccaggcctgaaaggaagtaaaggggaacgaggccgcccaggaaaggatgccatggggactcctgggtccccaggttgtgctggttcaccaggtcttccaggatcaccgggacctccaggaccgccaggtgacatcgtttttcgcaagggtccacctggagatcacggactgccaggctatctagggtctccaggaatcccaggagttgatgggcccaaaggagaaccaggcctcctgtgtacacagtgcccttatatcccagggcctcccggtctcccaggattgccagggttacatggtgtaaaaggaatcccaggaagacaaggcgcagctggcttgaaaggaagcccagggtccccaggaaatacaggtcttccaggatttccaggtttcccaggtgcccagggtgacccaggacttaaaggagaaaaaggtgaaacacttcagcctgaggggcaagtgggtgtcccaggtgacccggggctcagaggccaacctgggagaaagggcttggatggaattcctggaactccgggagtgaaaggattaccaggacctaaaggcgaactggctctgagtggtgagaaaggggaccaaggtcctccaggggatcctggctcccctgggtccccaggacctgcaggaccagctggaccacctggctacggaccccaaggagaacctggtctccagggcacgcaaggagttcctggagcccccggaccacccggagaagccggccctaggggagagctcagtgtttcaacaccagttccaggcccaccaggacctccagggccccctggccatcctggcccccaaggtccacctggtatccctggatccctggggaaatgtggagatcctggtcttccagggcctgatggtgaaccaggaattccaggaattggatttcctgggcctcctggacctaagggagaccaaggttttccaggtacaaaaggatcactgggttgtcctggaaaaatgggagagcctgggttacctggaaagccaggcctcccaggagccaagggagaaccagcagtagccatgcctggaggaccaggaacaccaggttttccaggagaaagaggcaattctggggaacatggagaaattggactccctggacttccaggtctccctggaactccaggaaatgaagggcttgatggaccacgaggagatccagggcagcctggaccacctggagaacaaggacccccaggaaggtgcatagagggtcccaggggagcccaaggacttccaggcttaaatggattgaaagggcaacaaggcagaagaggtaaaacggggccaaagggagacccaggaattccaggcttggatagatcaggatttcctggagaaactggatcaccaggaattccaggtcatcaaggtgaaatgggaccactgggtcaaagaggatatccaggaaatccgggaattttagggccaccaggtgaagatggagtgattgggatgatgggctttcctggagccattggccctccagggccccctgggaacccaggcacaccagggcagagggggagccctggaattccaggagtaaagggccagagaggaaccccaggagccaagggggaacaaggagataaaggaaatcccgggccttcagagatatcccacgtaataggggacaaaggagaaccaggtctcaaaggattcgcaggaaatccaggtgagaaaggaaacagaggcgttccagggatgccaggtttaaagggcctcaaaggactacccggaccagcaggaccaccaggccccagaggagatttgggcagcactgggaatcctggagaaccaggactgcgtggtataccaggaagcatggggaacatgggcatgccaggttctaaaggaaaaaggggaactttgggattcccaggtcgagcaggaagaccaggcctcccaggtattcatggtctccagggagataagggagagccaggttattcagaaggtacaaggccaggaccaccgggaccaacgggggatccaggactgccgggtgatatgggaaagaaaggagaaatggggcaacctggcccacctggacatttggggcctgctggacctgagggagcccctggaagtcctggaagtcctggcctcccaggaaagccaggtcctcatggtgatttgggttttaaaggaatcaaaggcctcctgggccctccaggaatcagaggccctccaggtcttccaggatttccaggatctcctggaccaatgggtataagaggtgaccaaggacgtgatggaattcctggtccagccggagaaaagggagaaacgggtttattgagggcccctccaggcccaagagggaaccctggtgctcaaggagccaaaggagacaggggagccccaggttttcctggcctcccgggcagaaaaggggccatgggagatgctggacctcgaggacccacaggcatagaaggattcccagggccaccaggtctgcccggtgcaattatccctggccagacaggaaatcgtggtccaccaggctcaagaggaagcccaggtgcgcctggtccccctggacctccagggagtcatgtaataggcataaaaggagacaaagggtctatgggccaccctggcccaaaaggtccacctggaactgcaggagacatgggaccaccaggtcgtctgggagcaccaggtactccaggtcttccaggacccagaggtgatcctggattccaggggtttccaggcgtgaaaggagaaaagggtaatcctggatttctaggatccattggacctccaggaccaattgggccaaaaggaccacctggtgtacgtggagaccctggcacacttaagattatctcccttccaggaagcccagggccacctggcacacctggagaaccagggatgcagggagaacctgggccaccagggccacctggaaacctaggaccctgtgggccaagaggtaagccaggcaaggatggaaaaccaggaactcctggaccagctggagaaaaaggcaacaaaggttctaaaggagagccaggaccagctggatcagatggattgccaggtttgaaaggaaaacgtggagacagtggatcacctgcaacctggacaacgagaggctttgtcttcacccgacacagtcaaaccacagcaattccttcatgtccagaggggacagtgccactctacagtgggttttcttttctttttgtacaaggaaatcaacgagcccacggacaagaccttgaaagcctattccatcaactgtgaaagctggggaattagaaaaaataataagtcgctgtcaggtgtgcatgaagaaaagacactgaagctaaaaaagacagcagaactgctatttttcatcctaaagaacaaagtaatgacagaacatgctgttatttaggtatttttctttaaccaaacaatattgctccatgatgacttagtacaaagtttcaatttgtttccccacaaaacaaagcaattctttcaagtcagttctgtgatctgggtctctaatctgtgctgtttcaaagttctctgtggcaaagcagcaactattcacaaaatatcaccaaaaacctattccacttacatccaaggcactgtcactacggtgattgtatgaagtttgaatgctgcaagttatgaaatatttggcccgctggattcccacatttgtcttctttctgtctttaagactcagggaggctaaatcagtgtttgattgccccgccaacccttcctgaaacttcagaccctgggtaggggaagagaagggggcatgtggtatcctggagcattgtgtatagaactggattttcagacctgctgaggaccgtaaggcctgatggaacacagaactgaactgaggttcatggattttccaggactgtttcaaacatgcccattactaacggcaaaagggggattccctgatggaaccataatacccttggaaatactgtatggttttgttttgttttgttggtttttaaagatttttgtttgtttattgaattcatttcactgtagctctaaaatctgcttgtattccaagcatataaaattttcccccttagtgaattagttttaaaatgatattgttatatacatactatgaaatatgtataactttaacttctgttttaccagcatacccacacaaataacaagaatactacttatgaaatgtgcactttatcctcattccataaatgtcggtgcataccttatgtaagggagcagttcaataatccatgaaagaacttaaggcatttgttggtttatcagactcggaatctattttctcattgctctgaatatgtcatcactctaggttttacagatttattcctttgttacttctctaattcttcctttgtaaaaaaaaaaaaaagcaacactttttatgttatatgttgttcttacaaaccatactgaaagagtccattgtttaaaaatcttaatgtatcaaactgtataacttggccgctgtatgtcttaaaacctgcttttcaatgtgttgatacattcccaaggttacttaattcaacttaactatcatcttattcagcaccaagcatgtcccaggcactgtactaacctacagagatgctaagagaaaaaaaagacttgtttctgatctaatatcccagaaaaagtaactcattgctctgttaataatctcacatatacaagtagcttccctcccctctagttttttcttccttttcactgctgttatatttcatcatgataattcagcaggcccaagtaaaggttaaaaataaggtctatgcctagggaaactcagggcttctagtttctcttagaaaagctaagagaagataaggtctgaataatagcagaaaaaccaacatctacaaaacattaaactagtgttatacttgatgataacactatttgatgagtcttagagtccagacacaaagagacaaagctttgaagatgctttttgatctacctaggtggagttggtggtgctgatatttaaattcaggctactgcttcaatctcaattgctttgtaagtgaaaaacatgacccagaggacagcacagactatggccatggctcacatggtttacatccttcactgctcacgtgtttgctgtcaagccatttttacatctaaactaagatgtgcagcatttcacttatttagattcacttaacaaacaaatttttctgctttaaaaatgtcttattgtcccaagtgtactatagcggcatatagagctagctaatctctacaaaccctctgtaggccagtagttctcaaagtgtggtctctggaagagcagtatcagcatcatctgggaacttgtcacagatgcagattctagggaccactccagacctacacaatcagaaactcttgggggagggcccgaaatatctatgttttaccaagcccaccacatgattctgatgtactctaaatactgagaaaacctgttctagacaaatacccaagcaacaactccgcaggcagttaccaagtacggctggctacaactgctccatccgtgcctctttttaaagttcaaactcacaggtgactctaaggttatctacttttactcataagtaaaagccctagactggtgctaatgtcaaaccactggcctccactcaggcctccatcttctcatgccctcttaccagtatttaacttctgaggaagacaagtgatgctaaaacctgaaattccaatgaagccatatgaacagctgttcagttgcacttctaagactttacttagcagtaaattatagctcatgtgcattattttccagataacttagcttatgagtagcttatacaattatgaagatttaatattacagataaaatgtaaactgtttctttaaaattggggcttcaactttggaatttcacagcgtgctaaaataacagatttctcagaagtctttcagcaagataaacattattaagtaacttatttatgaaagtattaaaatgcttacatttgaacttgatggctaacttacaaagattctctatgtatcaaatgtaacttactgcgactaaacttaatttaatatttactctataaccaaatgaaatatatttaaaatatattgaatattttatattgttatatcctgacaagattataatattttaatgtactaatatttctgtaattatatctaaaatattattttattatattgcctaagaataaacatttgttaaattgg

SEQ ID NO: 305 - protein, 1494 aa, Homo sapiens
MSARTAPRPQVLLLPLLLVLLAAAPAASKGCVCKDKGQCFCDGAKGEKGEKGFPGPPGSPGQKGFTGPEGLPGPQGPKGFPGLPGLTGSKGVRGISGLPGFSGSPGLPGTPGNTGPYGLVGVPGCSGSKGEQGFPGLPGTLGYPGIPGAAGLKGQKGAPAKEEDIELDAKGDPGLPGAPGPQGLPGPPGFPGPVGPPGPPGFFGFPGAMGPRGPKGHMGERVIGHKGERGVKGLTGPPGPPGTVIVTLTGPDNRTDLKGEKGDKGAMGEPGPPGPSGLPGESYGSEKGAPGDPGLQGKPGKDGVPGFPGSEGVKGNRGFPGLMGEDGIKGQKGDIGPPGFRGPTEYYDTYQEKGDEGTPGPPGPRGARGPQGPSGPPGVPGSPGSSRPGLRGAPGWPGLKGSKGERGRPGKDAMGTPGSPGCAGSPGLPGSPGPPGPPGDIVFRKGPPGDHGLPGYLGSPGIPGVDGPKGEPGLLCTQCPYIPGPPGLPGLPGLHGVKGIPGRQGAAGLKGSPGSPGNTGLPGFPGFPGAQGDPGLKGEKGETLQPEGQVGVPGDPGLRGQPGRKGLDGIPGTPGVKGLPGPKGELALSGEKGDQGPPGDPGSPGSPGPAGPAGPPGYGPQGEPGLQGTQGVPGAPGPPGEAGPRGELSVSTPVPGPPGPPGPPGHPGPQGPPGIPGSLGKCGDPGLPGPDGEPGIPGIGFPGPPGPKGDQGFPGTKGSLGCPGKMGEPGLPGKPGLPGAKGEPAVAMPGGPGTPGFPGERGNSGEHGEIGLPGLPGLPGTPGNEGLDGPRGDPGQPGPPGEQGPPGRCIEGPRGAQGLPGLNGLKGQQGRRGKTGPKGDPGIPGLDRSGFPGETGSPGIPGHQGEMGPLGQRGYPGNPGILGPPGEDGVIGMMGFPGAIGPPGPPGNPGTPGQRGSPGIPGVKGQRGTPGAKGEQGDKGNPGPSEISHVIGDKGEPGLKGFAGNPGEKGNRGVPGMPGLKGLKGLPGPAGPPGPRGDLGSTGNPGEPGLRGIPGSMGNMGMPGSKGKRGTLGFPGRAGRPGLPGIHGLQGDKGEPGYSEGTRPGPPGPTGDPGLPGDMGKKGEMGQPGPPGHLGPAGPEGAPGSPGSPGLPGKPGPHGDLGFKGIKGLLGPPGIRGPPGLPGFPGSPGPMGIRGDQGRDGIPGPAGEKGETGLLRAPPGPRGNPGAQGAKGDRGAPGFPGLPGRKGAMGDAGPRGPTGIEGFPGPPGLPGAIIPGQTGNRGPPGSRGSPGAPGPPGPPGSHVIGIKGDKGSMGHPGPKGPPGTAGDMGPPGRLGAPGTPGLPGPRGDPGFQGFPGVKGEKGNPGFLGSIGPPGPIGPKGPPGVRGDPGTLKIISLPGSPGPPGTPGEPGMQGEPGPPGPPGNLGPCGPRGKPGKDGKPGTPGPAGEKGNKGSKGEPGPAGSDGLPGLKGKRGDSGSPATWTTRGFVFTRHSQTTAIPSCPEGTVPLYSGFSFLFVQGNQRAHGQDLESLFHQL

SEQ ID NO: 306 - DNA, 7420 bp, Homo sapiens
gggagggacgaaccgcgcgaccgagccctacaaaacccgccccggccgagtggcgaggcgagctttccagccgggctcccagagccgcgctgcgcaggagacgcggtggcctgagagcctgagggtccccggactcgcccaggctctgagcgcgcgcccaccatgagcgcccggaccgcccccaggccgcaggtgctcctgctgccgctcctgctggtgctcctggcggcggcgcccgcagccagcaagggttgtgtctgtaaagacaaaggccagtgcttctgtgacggggccaaaggggagaagggggagaagggctttcctggaccccccggttctcctggccagaaaggattcacaggtcctgaaggcttgcctggaccgcagggacccaagggctttccaggacttccaggactcacgggttccaaaggtgtaaggggaataagtggattgccaggattttctggttctcctggacttccaggcaccccaggcaataccgggccttacggacttgtcggtgtaccaggatgcagtggttctaagggtgagcaggggtttccaggactcccagggacactgggctacccagggatcccgggtgctgctggtttgaaaggacaaaagggtgctcctgctaaagaagaagatatagaacttgatgcaaaaggcgaccccgggttgccaggggctccaggaccccagggtttgccaggccctccaggttttcctgggcctgttggcccacctggtcctccgggattctttggctttccaggagccatgggacctagaggacctaagggtcacatgggtgaaagagtgataggacataaaggagagcggggtgtgaaagggttaacaggacccccgggaccaccaggaacagttattgtgaccctaactggcccagataacagaacggacctcaagggggaaaagggagacaagggagcaatgggcgagcctggacctcctggaccctcaggactgcctggagaatcatatggatctgaaaagggtgctcctggagaccctggcctgcagggaaaacccggaaaagatggtgttcctggcttccctggaagtgagggagtcaagggcaacaggggtttccctgggttaatgggtgaagatggcattaagggacagaaaggggacattggccctccaggatttcgtggtccaacagaatattatgacacataccaggaaaagggagatgaaggcactccaggcccaccagggcccagaggagctcgtggcccacaaggtcccagtggtccccccggagttcctggaagtcctggatcatcaaggcctggcctcagaggagcccctggatggccaggcctgaaaggaagtaaaggggaacgaggccgcccaggaaaggatgccatggggactcctgggtccccaggttgtgctggttcaccaggtcttccaggatcaccgggacctccaggaccgccaggtgacatcgtttttcgcaagggtccacctggagatcacggactgccaggctatctagggtctccaggaatcccaggagttgatgggcccaaaggagaaccaggcctcctgtgtacacagtgcccttatatcccagggcctcccggtctcccaggattgccagggttacatggtgtaaaaggaatcccaggaagacaaggcgcagctggcttgaaaggaagcccagggtccccaggaaatacaggtcttccaggatttccaggtttcccaggtgcccagggtgacccaggacttaaaggagaaaaaggtgaaacacttcagcctgaggggcaagtgggtgtcccaggtgacccggggctcagaggccaacctgggagaaagggcttggatggaattcctggaactccgggagtgaaaggattaccaggacctaaaggcgaactggctctgagtggtgagaaaggggaccaaggtcctccaggggatcctggctcccctgggtccccaggacctgcaggaccagctggaccacctggctacggaccccaaggagaacctggtctccagggcacgcaaggagttcctggagcccccggaccacccggagaagccggccctaggggagagctcagtgtttcaacaccagttccaggcccaccaggacctccagggccccctggccatcctggcccccaaggtccacctggtatccctggatccctggggaaatgtggagatcctggtcttccagggcctgatggtgaaccaggaattccaggaattggatttcctgggcctcctggacctaagggagaccaaggttttccaggtacaaaaggatcactgggttgtcctggaaaaatgggagagcctgggttacctggaaagccaggcctcccaggagccaagggagaaccagcagtagccatgcctggaggaccaggaacaccaggttttccaggagaaagaggcaattctggggaacatggagaaattggactccctggacttccaggtctccctggaactccaggaaatgaagggcttgatggaccacgaggagatccagggcagcctggaccacctggagaacaaggacccccaggaaggtgcatagagggtcccaggggagcccaaggacttccaggcttaaatggattgaaagggcaacaaggcagaagaggtaaaacggggccaaagggagacccaggaattccaggcttggatagatcaggatttcctggagaaactggatcaccaggaattccaggtcatcaaggtgaaatgggaccactgggtcaaagaggatatccaggaaatccgggaattttagggccaccaggtgaagatggagtgattgggatgatgggctttcctggagccattggccctccagggccccctgggaacccaggcacaccagggcagagggggagccctggaattccaggagtaaagggccagagaggaaccccaggagccaagggggaacaaggagataaaggaaatcccgggccttcagagatatcccacgtaataggggacaaaggagaaccaggtctcaaaggattcgcaggaaatccaggtgagaaaggaaacagaggcgttccagggatgccaggtttaaagggcctcaaaggactacccggaccagcaggaccaccaggccccagaggagatttgggcagcactgggaatcctggagaaccaggactgcgtggtataccaggaagcatggggaacatgggcatgccaggttctaaaggaaaaaggggaactttgggattcccaggtcgagcaggaagaccaggcctcccaggtattcatggtctccagggagataagggagagccaggttattcagaaggtacaaggccaggaccaccgggaccaacgggggatccaggactgccgggtgatatgggaaagaaaggagaaatggggcaacctggcccacctggacatttggggcctgctggacctgagggagcccctggaagtcctggaagtcctggcctcccaggaaagccaggtcctcatggtgatttgggttttaaaggaatcaaaggcctcctgggccctccaggaatcagaggccctccaggtcttccaggatttccaggatctcctggaccaatgggtataagaggtgaccaaggacgtgatggaattcctggtccagccggagaaaagggagaaacgggtttattgagggcccctccaggcccaagagggaaccctggtgctcaaggagccaaaggagacaggggagccccaggttttcctggcctcccgggcagaaaaggggccatgggagatgctggacctcgaggacccacaggcatagaaggattcccagggccaccaggtctgcccggtgcaattatccctggccagacaggaaatcgtggtccaccaggctcaagaggaagcccaggtgcgcctggtccccctggacctccagggagtcatgtaataggcataaaaggagacaaagggtctatgggccaccctggcccaaaaggtccacctggaactgcaggagacatgggaccaccaggtcgtctgggagcaccaggtactccaggtcttccaggacccagaggtgatcctggattccaggggtttccaggcgtgaaaggagaaaagggtaatcctggatttctaggatccattggacctccaggaccaattgggccaaaaggaccacctggtgtacgtggagaccctggcacacttaagattatctcccttccaggaagcccagggccacctggcacacctggagaaccagggatgcagggagaacctgggccaccagggccacctggaaacctaggaccctgtgggccaagaggtaagccaggcaaggatggaaaaccaggaactcctggaccagctggagaaaaaggcaacaaaggttctaaaggagagccagaaagcctattccatcaactgtgaaagctggggaattagaaaaaataataagtcgctgtcaggtgtgcatgaagaaaagacactgaagctaaaaaagacagcagaactgctatttttcatcctaaagaacaaagtaatgacagaacatgctgttatttaggtatttttctttaaccaaacaatattgctccatgatgacttagtacaaagtttcaatttgtttccccacaaaacaaagcaattctttcaagtcagttctgtgatctgggtctctaatctgtgctgtttcaaagttctctgtggcaaagcagcaactattcacaaaatatcaccaaaaacctattccacttacatccaaggcactgtcactacggtgattgtatgaagtttgaatgctgcaagttatgaaatatttggcccgctggattcccacatttgtcttctttctgtctttaagactcagggaggctaaatcagtgtttgattgccccgccaacccttcctgaaacttcagaccctgggtaggggaagagaagggggcatgtggtatcctggagcattgtgtatagaactggattttcagacctgctgaggaccgtaaggcctgatggaacacagaactgaactgaggttcatggattttccaggactgtttcaaacatgcccattactaacggcaaaagggggattccctgatggaaccataatacccttggaaatactgtatggttttgttttgttttgttggtttttaaagatttttgtttgtttattgaattcatttcactgtagctctaaaatctgcttgtattccaagcatataaaattttcccccttagtgaattagttttaaaatgatattgttatatacatactatgaaatatgtataactttaacttctgttttaccagcatacccacacaaataacaagaatactacttatgaaatgtgcactttatcctcattccataaatgtcggtgcataccttatgtaagggagcagttcaataatccatgaaagaacttaaggcatttgttggtttatcagactcggaatctattttctcattgctctgaatatgtcatcactctaggttttacagatttattcctttgttacttctctaattcttcctttgtaaaaaaaaaaaaaagcaacactttttatgttatatgttgttcttacaaaccatactgaaagagtccattgtttaaaaatcttaatgtatcaaactgtataacttggccgctgtatgtcttaaaacctgcttttcaatgtgttgatacattcccaaggttacttaattcaacttaactatcatcttattcagcaccaagcatgtcccaggcactgtactaacctacagagatgctaagagaaaaaaaagacttgtttctgatctaatatcccagaaaaagtaactcattgctctgttaataatctcacatatacaagtagcttccctcccctctagttttttcttccttttcactgctgttatatttcatcatgataattcagcaggcccaagtaaaggttaaaaataaggtctatgcctagggaaactcagggcttctagtttctcttagaaaagctaagagaagataaggtctgaataatagcagaaaaaccaacatctacaaaacattaaactagtgttatacttgatgataacactatttgatgagtcttagagtccagacacaaagagacaaagctttgaagatgctttttgatctacctaggtggagttggtggtgctgatatttaaattcaggctactgcttcaatctcaattgctttgtaagtgaaaaacatgacccagaggacagcacagactatggccatggctcacatggtttacatccttcactgctcacgtgtttgctgtcaagccatttttacatctaaactaagatgtgcagcatttcacttatttagattcacttaacaaacaaatttttctgctttaaaaatgtcttattgtcccaagtgtactatagcggcatatagagctagctaatctctacaaaccctctgtaggccagtagttctcaaagtgtggtctctggaagagcagtatcagcatcatctgggaacttgtcacagatgcagattctagggaccactccagacctacacaatcagaaactcttgggggagggcccgaaatatctatgttttaccaagcccaccacatgattctgatgtactctaaatactgagaaaacctgttctagacaaatacccaagcaacaactccgcaggcagttaccaagtacggctggctacaactgctccatccgtgcctctttttaaagttcaaactcacaggtgactctaaggttatctacttttactcataagtaaaagccctagactggtgctaatgtcaaaccactggcctccactcaggcctccatcttctcatgccctcttaccagtatttaacttctgaggaagacaagtgatgctaaaacctgaaattccaatgaagccatatgaacagctgttcagttgcacttctaagactttacttagcagtaaattatagctcatgtgcattattttccagataacttagcttatgagtagcttatacaattatgaagatttaatattacagataaaatgtaaactgtttctttaaaattggggcttcaactttggaatttcacagcgtgctaaaataacagatttctcagaagtctttcagcaagataaacattattaagtaacttatttatgaaagtattaaaatgcttacatttgaacttgatggctaacttacaaagattctctatgtatcaaatgtaacttactgcgactaaacttaatttaatatttactctataaccaaatgaaatatatttaaaatatattgaatattttatattgttatatcctgacaagattataatattttaatgtactaatatttctgtaattatatctaaaatattattttattatattgcctaagaataaacatttgttaaattgg

SEQ ID NO: 307 - protein, 1424 aa, Homo sapiens
MSARTAPRPQVLLLPLLLVLLAAAPAASKGCVCKDKGQCFCDGAKGEKGEKGFPGPPGSPGQKGFTGPEGLPGPQGPKGFPGLPGLTGSKGVRGISGLPGFSGSPGLPGTPGNTGPYGLVGVPGCSGSKGEQGFPGLPGTLGYPGIPGAAGLKGQKGAPAKEEDIELDAKGDPGLPGAPGPQGLPGPPGFPGPVGPPGPPGFFGFPGAMGPRGPKGHMGERVIGHKGERGVKGLTGPPGPPGTVIVTLTGPDNRTDLKGEKGDKGAMGEPGPPGPSGLPGESYGSEKGAPGDPGLQGKPGKDGVPGFPGSEGVKGNRGFPGLMGEDGIKGQKGDIGPPGFRGPTEYYDTYQEKGDEGTPGPPGPRGARGPQGPSGPPGVPGSPGSSRPGLRGAPGWPGLKGSKGERGRPGKDAMGTPGSPGCAGSPGLPGSPGPPGPPGDIVFRKGPPGDHGLPGYLGSPGIPGVDGPKGEPGLLCTQCPYIPGPPGLPGLPGLHGVKGIPGRQGAAGLKGSPGSPGNTGLPGFPGFPGAQGDPGLKGEKGETLQPEGQVGVPGDPGLRGQPGRKGLDGIPGTPGVKGLPGPKGELALSGEKGDQGPPGDPGSPGSPGPAGPAGPPGYGPQGEPGLQGTQGVPGAPGPPGEAGPRGELSVSTPVPGPPGPPGPPGHPGPQGPPGIPGSLGKCGDPGLPGPDGEPGIPGIGFPGPPGPKGDQGFPGTKGSLGCPGKMGEPGLPGKPGLPGAKGEPAVAMPGGPGTPGFPGERGNSGEHGEIGLPGLPGLPGTPGNEGLDGPRGDPGQPGPPGEQGPPGRCIEGPRGAQGLPGLNGLKGQQGRRGKTGPKGDPGIPGLDRSGFPGETGSPGIPGHQGEMGPLGQRGYPGNPGILGPPGEDGVIGMMGFPGAIGPPGPPGNPGTPGQRGSPGIPGVKGQRGTPGAKGEQGDKGNPGPSEISHVIGDKGEPGLKGFAGNPGEKGNRGVPGMPGLKGLKGLPGPAGPPGPRGDLGSTGNPGEPGLRGIPGSMGNMGMPGSKGKRGTLGFPGRAGRPGLPGIHGLQGDKGEPGYSEGTRPGPPGPTGDPGLPGDMGKKGEMGQPGPPGHLGPAGPEGAPGSPGSPGLPGKPGPHGDLGFKGIKGLLGPPGIRGPPGLPGFPGSPGPMGIRGDQGRDGIPGPAGEKGETGLLRAPPGPRGNPGAQGAKGDRGAPGFPGLPGRKGAMGDAGPRGPTGIEGFPGPPGLPGAIIPGQTGNRGPPGSRGSPGAPGPPGPPGSHVIGIKGDKGSMGHPGPKGPPGTAGDMGPPGRLGAPGTPGLPGPRGDPGFQGFPGVKGEKGNPGFLGSIGPPGPIGPKGPPGVRGDPGTLKIISLPGSPGPPGTPGEPGMQGEPGPPGPPGNLGPCGPRGKPGKDGKPGTPGPAGEKGNKGSKGEPESLFHQL

SEQ ID NO: 308 - DNA, 2032 bp, Homo sapiens
gttactttttaaatggacaaaagtggctctcaatccagcacatgcacattgaagcaagttaaaggatttaatatgaagcacagaagcagatagtgccaaatagcaagcagtagttgttacacatttctggaaaagcagtgtccgtgttgttatgtacacctccaaaaaaagttcaaatgtgtaggggaattgttgtgtaaagtaaactgaactgcagggtagcagtattttaatagctattatagacctgtatttactgtatttaaatgagtaaaggaacaagcagtgacacatcactaggaagggtgagcagggcagcatttccttctcccactgctgctgagatggcagaaattagtcgaattcagtacgaaatggaatatactgaaggcattagtcagcgaatgagggtcccagaaaagttaaaagtagcaccgccaaacgctgacctggaacaaggattccaagaaggagttccaaatgctagtgtgataatgcaagttccggagaggattgttgtagcaggaaataatgaagatgtttcattttcaagaccagcagatcttgaccttattcagtcaactccctttaaacccctggcactgaaaacaccacctcgtgtacttacgctgagtgaaagaccactagattttctggatttagaaagacctcctacaacccctcaaaatgaagaaatccgagcagttggcagactaaaaagagagcggtctatgagtgaaaatgctgttcgccaaaatggacagctggtcagaaatgattctctgtggcacagatcagattctgccccaagaaataaaatttcaaggttccaggcaccgatttctgcaccggagtacactgtgacaccatcgccacaacaggctcgggtctgtcctccccatatgttacctgaagatggagctaatctttcctctgctcgtggcattttgtcgcttatccagtcttctactcgtagggcataccagcagatcttggatgtgctggatgaaaatcgcagacctgtgttgcgtggtgggtctgctgccgccacttctaatcctcatcatgacaacgtcaggtatggcatttcaaatatagatacaaccattgaaggaacgtcagatgacctgactgttgtagatgcagcttcactaagacgacagataatcaaactaaatagacgtctacaacttctggaagaggagaacaaagaacgtgctaaaagagaaatggtcatgtattcaattactgtagctttctggctgcttaatagctggctctggtttcgccgctagaggtaacatcagccctcaaaaatactgtctcaacagctggaaatataaaagatttgcaaacttctttgtttctgtctctgcattgtatgccattttatagtccacaccctgaaaatgtatttcttccagaaagtctggaggaaggacctatatttgtagaagtaaaggtatattctgtcactcagctgtattcacgtctgagcagttctgcagtaacacctgcttaaaattctccctttgcatgttttgtaaataggctccagttttgttttttaaaaggaatttattttttgcctcatcagtccacccaactgattctgaatgggagagagtctgtagagaattgattcagaaaagtgtctgtgaaagaaaaacaattattttgtcctgtttctcaaacagtgttaagcagttttgttaatagacatttttgcatcgacacttcaacattaacactttgaaagtcatggtctggtgccagatttaagaaactcgaaccacctaatatttcataaccttcttcattaggtacttgtacagattaatttctaacattgcagcagtttcatatgtgtgcaatatgtgcattctttcattttagttttgcacttggttttctataaagtacgtttttactcagttcatgcgtgaacaatttaaaaaacgacagaataaggtacaaatgtagtgtatttaataaactgtcaaccaaagaaaaaaaaaaaaaaaaaaaaaaa

SEQ ID NO: 309 - protein, 342 aa, Homo sapiens
MSKGTSSDTSLGRVSRAAFPSPTAAEMAEISRIQYEMEYTEGISQRMRVPEKLKVAPPNADLEQGFQEGVPNASVIMQVPERIVVAGNNEDVSFSRPADLDLIQSTPFKPLALKTPPRVLTLSERPLDFLDLERPPTTPQNEEIRAVGRLKRERSMSENAVRQNGQLVRNDSLWHRSDSAPRNKISRFQAPISAPEYTVTPSPQQARVCPPHMLPEDGANLSSARGILSLIQSSTRRAYQQILDVLDENRRPVLRGGSAAATSNPHHDNVRYGISNIDTTIEGTSDDLTVVDAASLRRQIIKLNRRLQLLEEENKERAKREMVMYSITVAFWLLNSWLWFRR

SEQ ID NO: 310 - DNA, 2307 bp, Homo sapiens
agccactttgacaacgtttctgagccaggggtgaccatgacctgctgcgaaggatggacatcctgcaatggattcagcctgctggttctactgctgttaggagtagttctcaatgtgatacctctaattgtcagcttagttgaggaagaccaattttctcaaaaccccatctcttgctttgagtggtggttcccaggaattataggagcaggtctgatggccattccagcaacaacaatgtccttgacagcaagaaaaagagcgtgctgcaacaacagaactggaatgtttctttcatcacttttcagtgtgatcacagtcattggtgctctgtattgcatgctgatatccatccaggctctcttaaaaggtcctctcatgtgtaattctccaagcaacagtaatgccaattgtgaattttcattgaaaaacatcagtgacattcatccagaatccttcaacttgcagtggtttttcaatgactcttgtgcacctcctactggtttcaataaacccaccagtaacgacaccatggcgagtggctggagagcatctagtttccacttcgattctgaagaaaacaaacataggcttatccacttctcagtatttttaggtctattgcttgttggaattctggaggtcctgtttgggctcagtcagatagtcatcggtttccttggctgtctgtgtggagtctctaagcgaagaagtcaaattgtgtagtttaatgggaataaaatgtaagtatcagtagtttgaattaatttgagaagtacacttgttttcaaagtcatctttgagatgatttaaaaaatcaacccttcacgtagaaagcacgttgtaaatgcataacactctcatatcagtggttgatttgggaaaggtggagagaattttcaattagttttgtgttgtactattcaaattttttacctcttcactgtgtgtagagaaaggagaagggaaggaggatgagaaggaacggaagtcatcctgaaaataaaagtacaggactttttttttttttttttgagacagggtctcaaaaaaggctggagtacagtagtacagtggtgctatctcagcttactgcagcctcaacctcctgggctcaggtgattctcccatctcagcctccctagtagctgggactacaggtgcgtgccactatgccaagctaatttttgtatttttagtagagatgggggttttccatattgcccaggctggtcccgaactcatggactcaagtgatctgcctgcctcagcctcctaaagtgctgcgattacaggcatgagccatcgcgcctaaaggacaggacctttttattgtatttctttaaagaataaatacataacctgaatgcaatcaagtctttagatctaattctcagcttgcagggaacactaggacaaatccaaaaagtgggtcagcgggcacagaatggcccaattttcaacaggaaaatgttataaaagaaaaatatttttgagggaactgttatagattaagagaatagaggcatgtttcagctaaacacatgtaaactttgtcagagataattgggaggagtatgtagaagaatcggattattgttaattttggtaggtctgataatggttttatagtataaaggctgagtaccccttatccaaaatgattaagatcagaagtgttttggctttcacatttttttggattttggaattttgcctataataatgagacatcttggggatgggatgcaagtctaaccacaaaattcatttatgtctcatacacactttgaacacctggcctgaaggtaatttcacacaatattttaaataactttgtgcatgaaacacaattttgactgcattttgactgcaactcatcacatgaggtcaggtatggaattttccacttgtggtgttacgttactggctcaaaaagttttggatctcggagcattctggattttgaatttttggattagtgatgctcaacctgtatacagaaatgtcctcatttttaaaaaaagaaatgcatatttatatgttttaaaattacttcaaccaaaagcaacggggagatgtttactgttatatttaggtgacaggtacatggcaattcattataccctcctattttcctatgtttacattattcattaattaaaaaacaatacctagaaaaacccaagactttcaaaagctattttctatatgtgccaatctttaaaaaacaggataacaagggtatttatcacattaaaatgttgtaaaacagcaaagctaaaatctaaaaaaaaaaaaaaaaaa

SEQ ID NO: 311 - protein, 229 aa, Homo sapiens
MTCCEGWTSCNGFSLLVLLLLGVVLNVIPLIVSLVEEDQFSQNPISCFEWWFPGIIGAGLMAIPATTMSLTARKRACCNNRTGMFLSSLFSVITVIGALYCMLISIQALLKGPLMCNSPSNSNANCEFSLKNISDIHPESFNLQWFFNDSCAPPTGFNKPTSNDTMASGWRASSFHFDSEENKHRLIHFSVFLGLLLVGILEVLFGLSQIVIGFLGCLCGVSKRRSQIV

SEQ ID NO: 312 - DNA, 4530 bp, Homo sapiens
gctcggagcgggctccgcggcttgcaaggcgcctgcgactcggtcccaggtcggcgggcggcgcacggcgggctcgcgcgggggccccggcgcgccgggcggcgcagtacgcagcgcgcggacccacgccacggccaggagcccagagcagcgcggccacactgcccaggggtcggccctcggccccggcgctcggagcgcggcggctgcctgggctttaatggctgctccgcggagcagcgcctagggctggaaggcggctgcggctcaggaagtcacccgagcaagcctccttcggggccggccgcacccgccgcggcgcgctccatgggggcgcgctccccccgggcggcccgctgacccgggacgccggggcccgctcgctcgccggccgcgcgtcccggccatgaactgagcccgcgggccagccccgcgcctgctccgcccgcgcctttcttctcgcgcctcctccgcccgccgccggcgggcccggctccccgggggctgcggcgccccgggctcggcggcccgcgggccccggggcgcggggcggcggcggcggggggcgcgcggctccgggcgcggcgcctgcaccatgaactaccagcagcagctggccaactcggctgccatccgggccgagatccagcgcttcgagtcggtccaccccaacatctactccatctacgagctgctggagcgcgtggaggagccggtgctgcagaaccagatccgggagcacgtcatcgccatcgaagatgccttcgtgaacagccaggaatggacgctgagtcgatctgtcccggagctcaaagtgggaattgtgggtaacttggccagcggcaagtctgccctggtgcaccggtacctgacgggcacatatgtccaggaggagtctccggaaggtggcaggttcaagaaagagattgtcgttgatggacagagctatctgctgctgatcagagatgaagggggccccccggaggcgcagtttgccatgtgggtggacgctgttatatttgtcttcagcttggaggatgaaataagtttccagaccgtttaccactactacagtcgaatggccaactatcggaacacgagcgagattcctctggttctggtgggaacccaggatgccataagttctgctaacccgagggtcatcgatgacgccagggcgaggaagctctccaacgacctgaaacggtgcacgtactacgagacgtgtgctacatacgggctgaatgtggagagggtcttccaggacgttgcccagaagattgttgccacaaggaagaagcagcagctgtccataggaccctgcaagtcgctacctaattctcccagccattcctccgtctgttccgcgcaggtgtctgccgtgcacatcagccagacaagtaatggaggtgggagtttaagcgactattcctcctccgttccatcgactcccagcaccagccagaaggaacttcggatcgatgttcctcccactgccaacacgcccacgcccgttcgcaagcagtctaagcgccggtccaacctgttcacctctcggaaagggagcgacccagacaaagagaagaaaggcctggagagtcgtgcggacagcattgggagcggccgagccatcccaattaaacagggcatgctgttgaagcgaagtggcaaatcgttgaataaagagtggaaaaagaaatatgtcaccctgtgtgacaatggcgtgctgacctatcatcccagtttacatgattacatgcagaatgttcatggtaaggagattgaccttctgagaaccactgtgaaagtcccagggaagaggccaccccgagccacgtcagcctgcgcacccatctccagccctaaaaccaatggcctatccaaggacatgagcagtttacacatctcacccaattcagggaatgtcactagtgcatctgggtctcagatggcaagcggcatcagcctggtctccttcaacagccgacccgacggcatgcaccagcgctcctactcagtctccagtgccgaccagtggagtgaggctacggtcattgcaaactcggccatcagcagtgacacagggctgggtgactccgtatgctccagccccagtatctccagcaccaccagccccaagctcgacccgcccccctcccctcacgccaacagaaagaagcaccgaaggaagaaaagcactagcaacttcaaagccgacggcctgtccggcactgctgaagaacaagaagaaaattttgagtttatcattgtgtccctcactggccaaacatggcactttgaagccacgacgtatgaggagcgggacgcctgggtccaagccatcgagagccagatcctggccagcctgcagtcgtgcgagagcagcaagaacaagtcccggctgacgagccagagcgaggccatggccctgcagtcgatccggaacatgcgcgggaactcccactgtgtggactgcgagacccagaatcccaactgggccagtttgaacttgggagccctcatgtgcatcgaatgctcagggatccaccggaatcttggcacccacctttcccgagtccgatctctggacctggatgactggccagtcgagctcatcaaggtgatgtcatccatcgggaacgagctagccaacagcgtctgggaagagagcagccaggggcggacgaaaccatcggtagactccacaagggaagagaaggaacggtggatccgtgccaagtacgagcagaagctcttcctggccccgctgccctgcacggagctgtccctgggccagcacctgctgcgggccaccgccgacgaggacctgcggacggccatcctgctgctggcacacggctcccgggacgaggtgaacgagacctgcggggagggagacggccgcacggcgctgcatctggcctgccgcaaggggaatgtggtcctggcgcagctcctgatctggtacggagtggacgtcacggcccgagatgcccacgggaacacagctctggcctacgcccggcaggcctccagccaggagtgcatcgacgtgctgctgcagtacggctgccccgacgagcgcttcgtgctcatggccacccctaacctgtccaggagaaacaataaccggaacaacagcagtgggagggtgcccaccatcatctgaggaacagccgtgcccgcctgctcgccgcacctgggacgcggcagcctcgccgcattctcgctcagaagtcgcagcacgtgagtcccgtcgcatcccctccctcttcctggtggccacctccctcccgcccacccactctcaccccaaacaaaatcacaaaacctggacatccctcaaggggcgaagaggcggccgggagactgcagaagtggctccttttcataaactcccctaaaccacacacaggagagagcgacgggcctcggccctttgatgatagcacatggcgcaggacccttgtcctggtggcacaagggatggggacgcgagggggaggggaggcgaggaacaaggagaaggggcaactttccttaactggcagttgagcacatagtacatttcccctctaccaaacggaacacttggattccatctcttctctgaggagctcgacggcataaatcagaagcaagcacagagtttgtcaggtttgaagcccctatgatggtgtgtgtcaaatcagttgtagctaatctgtccagggagaatactggcttcattacacttgtacagccgagttcttcccgcattactgctgtttaatagaacgtgattagtcatcgccgagaagaaagcatattagccgaggaggtagtcacgcggcacgcgccggtgattgccacgatgtgattgcaatactcttagaagcaccatattatcccagacatgttctttcaagcccttggagccctctctaaattcactgtcatcatttagtatctgtttaatttttcagtccaaagagaggaaatcagtcgctgagtattatttgactccggtctccttggtgcaaaaacaaaatgggaaaaataaataagaataactcagaaactcaaaaggaaaccacaaattcagctaataatagcatttcgagtatatttcgtaaactaaggaaatacacaaaaggctgttttttccgactgtaagagatatttgatgtccttttgccgaggtggatgtgttagtctcaggccctcctggaccacgttgcccaagtcacacaggcttctgtgttatgtatttagataagatgtgtgaaaatatatttgaataaaagaagttcataaatatgcattgatttttgtacagacaaatggcacctctcttaatttataaattgaactggatgtgaactaataatgtgcaactagttgagataagagggttacagatcattgtacatggaaaatattcccagcagtaaacacttccattaatgtgatctacggcttttgaaaaggagcatctcagaataagatggtggtacaatttgcttattaaaattgagaaagaaaaaaaaa

SEQ ID NO: 313 - protein, 857 aa, Homo sapiens
MNYQQQLANSAAIRAEIQRFESVHPNIYSIYELLERVEEPVLQNQIREHVIAIEDAFVNSQEWTLSRSVPELKVGIVGNLASGKSALVHRYLTGTYVQEESPEGGRFKKEIVVDGQSYLLLIRDEGGPPEAQFAMWVDAVIFVFSLEDEISFQTVYHYYSRMANYRNTSEIPLVLVGTQDAISSANPRVIDDARARKLSNDLKRCTYYETCATYGLNVERVFQDVAQKIVATRKKQQLSIGPCKSLPNSPSHSSVCSAQVSAVHISQTSNGGGSLSDYSSSVPSTPSTSQKELRIDVPPTANTPTPVRKQSKRRSNLFTSRKGSDPDKEKKGLESRADSIGSGRAIPIKQGMLLKRSGKSLNKEWKKKYVTLCDNGVLTYHPSLHDYMQNVHGKEIDLLRTTVKVPGKRPPRATSACAPISSPKTNGLSKDMSSLHISPNSGNVTSASGSQMASGISLVSFNSRPDGMHQRSYSVSSADQWSEATVIANSAISSDTGLGDSVCSSPSISSTTSPKLDPPPSPHANRKKHRRKKSTSNFKADGLSGTAEEQEENFEFIIVSLTGQTWHFEATTYEERDAWVQAIESQILASLQSCESSKNKSRLTSQSEAMALQSIRNMRGNSHCVDCETQNPNWASLNLGALMCIECSGIHRNLGTHLSRVRSLDLDDWPVELIKVMSSIGNELANSVWEESSQGRTKPSVDSTREEKERWIRAKYEQKLFLAPLPCTELSLGQHLLRATADEDLRTAILLLAHGSRDEVNETCGEGDGRTALHLACRKGNVVLAQLLIWYGVDVTARDAHGNTALAYARQASSQECIDVLLQYGCPDERFVLMATPNLSRRNNNRNNSSGRVPTII

SEQ ID NO: 314 - DNA, 4371 bp, Homo sapiens
gctcggagcgggctccgcggcttgcaaggcgcctgcgactcggtcccaggtcggcgggcggcgcacggcgggctcgcgcgggggccccggcgcgccgggcggcgcagtacgcagcgcgcggacccacgccacggccaggagcccagagcagcgcggccacactgcccaggggtcggccctcggccccggcgctcggagcgcggcggctgcctgggctttaatggctgctccgcggagcagcgcctagggctggaaggcggctgcggctcaggaagtcacccgagcaagcctccttcggggccggccgcacccgccgcggcgcgctccatgggggcgcgctccccccgggcggcccgctgacccgggacgccggggcccgctcgctcgccggccgcgcgtcccggccatgaactgagcccgcgggccagccccgcgcctgctccgcccgcgcctttcttctcgcgcctcctccgcccgccgccggcgggcccggctccccgggggctgcggcgccccgggctcggcggcccgcgggccccggggcgcggggcggcggcggcggggggcgcgcggctccgggcgcggcgcctgcaccatgaactaccagcagcagctggccaactcggctgccatccgggccgagatccagcgcttcgagtcggtccaccccaacatctactccatctacgagctgctggagcgcgtggaggagccggtgctgcagaaccagatccgggagcacgtcatcgccatcgaagatgccttcgtgaacagccaggaatggacgctgagtcgatctgtcccggagctcaaagtgggaattgtgggtaacttggccagcggcaagtctgccctggtgcaccggtacctgacgggcacatatgtccaggaggagtctccggaaggtggcaggttcaagaaagagattgtcgttgatggacagagctatctgctgctgatcagagatgaagggggccccccggaggcgcagtttgccatgtgggtggacgctgttatatttgtcttcagcttggaggatgaaataagtttccagaccgtttaccactactacagtcgaatggccaactatcggaacacgagcgagattcctctggttctggtgggaacccaggatgccataagttctgctaacccgagggtcatcgatgacgccagggcgaggaagctctccaacgacctgaaacggtgcacgtactacgagacgtgtgctacatacgggctgaatgtggagagggtcttccaggacgttgcccagaagattgttgccacaaggaagaagcagcagctgtccataggaccctgcaagtcgctacctaattctcccagccattcctccgtctgttccgcgcaggtgtctgccgtgcacatcagccagacaagtaatggaggtgggagtttaagcgactattcctcctccgttccatcgactcccagcaccagccagaaggaacttcggatcgatgttcctcccactgccaacacgcccacgcccgttcgcaagcagtctaagcgccggtccaacctgttcacctctcggaaagggagcgacccagacaaagagaagaaaggcctggagagtcgtgcggacagcattgggagcggccgagccatcccaattaaacagggcatgctgttgaagcgaagtggcaaatcgttgaataaagagtggaaaaagaaatatgtcaccctgtgtgacaatggcgtgctgacctatcatcccagtttacatgattacatgcagaatgttcatggtaaggagattgaccttctgagaaccactgtgaaagtcccagggaagaggccaccccgagccacgtcagcctgcgcacccatctccagccctaaaaccaatggcctatccaaggacatgagcagtttacacatctcacccaattcagacacagggctgggtgactccgtatgctccagccccagtatctccagcaccaccagccccaagctcgacccgcccccctcccctcacgccaacagaaagaagcaccgaaggaagaaaagcactagcaacttcaaagccgacggcctgtccggcactgctgaagaacaagaagaaaattttgagtttatcattgtgtccctcactggccaaacatggcactttgaagccacgacgtatgaggagcgggacgcctgggtccaagccatcgagagccagatcctggccagcctgcagtcgtgcgagagcagcaagaacaagtcccggctgacgagccagagcgaggccatggccctgcagtcgatccggaacatgcgcgggaactcccactgtgtggactgcgagacccagaatcccaactgggccagtttgaacttgggagccctcatgtgcatcgaatgctcagggatccaccggaatcttggcacccacctttcccgagtccgatctctggacctggatgactggccagtcgagctcatcaaggtgatgtcatccatcgggaacgagctagccaacagcgtctgggaagagagcagccaggggcggacgaaaccatcggtagactccacaagggaagagaaggaacggtggatccgtgccaagtacgagcagaagctcttcctggccccgctgccctgcacggagctgtccctgggccagcacctgctgcgggccaccgccgacgaggacctgcggacggccatcctgctgctggcacacggctcccgggacgaggtgaacgagacctgcggggagggagacggccgcacggcgctgcatctggcctgccgcaaggggaatgtggtcctggcgcagctcctgatctggtacggagtggacgtcacggcccgagatgcccacgggaacacagctctggcctacgcccggcaggcctccagccaggagtgcatcgacgtgctgctgcagtacggctgccccgacgagcgcttcgtgctcatggccacccctaacctgtccaggagaaacaataaccggaacaacagcagtgggagggtgcccaccatcatctgaggaacagccgtgcccgcctgctcgccgcacctgggacgcggcagcctcgccgcattctcgctcagaagtcgcagcacgtgagtcccgtcgcatcccctccctcttcctggtggccacctccctcccgcccacccactctcaccccaaacaaaatcacaaaacctggacatccctcaaggggcgaagaggcggccgggagactgcagaagtggctccttttcataaactcccctaaaccacacacaggagagagcgacgggcctcggccctttgatgatagcacatggcgcaggacccttgtcctggtggcacaagggatggggacgcgagggggaggggaggcgaggaacaaggagaaggggcaactttccttaactggcagttgagcacatagtacatttcccctctaccaaacggaacacttggattccatctcttctctgaggagctcgacggcataaatcagaagcaagcacagagtttgtcaggtttgaagcccctatgatggtgtgtgtcaaatcagttgtagctaatctgtccagggagaatactggcttcattacacttgtacagccgagttcttcccgcattactgctgtttaatagaacgtgattagtcatcgccgagaagaaagcatattagccgaggaggtagtcacgcggcacgcgccggtgattgccacgatgtgattgcaatactcttagaagcaccatattatcccagacatgttctttcaagcccttggagccctctctaaattcactgtcatcatttagtatctgtttaatttttcagtccaaagagaggaaatcagtcgctgagtattatttgactccggtctccttggtgcaaaaacaaaatgggaaaaataaataagaataactcagaaactcaaaaggaaaccacaaattcagctaataatagcatttcgagtatatttcgtaaactaaggaaatacacaaaaggctgttttttccgactgtaagagatatttgatgtccttttgccgaggtggatgtgttagtctcaggccctcctggaccacgttgcccaagtcacacaggcttctgtgttatgtatttagataagatgtgtgaaaatatatttgaataaaagaagttcataaatatgcattgatttttgtacagacaaatggcacctctcttaatttataaattgaactggatgtgaactaataatgtgcaactagttgagataagagggttacagatcattgtacatggaaaatattcccagcagtaaacacttccattaatgtgatctacggcttttgaaaaggagcatctcagaataagatggtggtacaatttgcttattaaaattgagaaagaaaaaaaaa

SEQ ID NO: 315 - protein, 804 aa, Homo sapiens
MNYQQQLANSAAIRAEIQRFESVHPNIYSIYELLERVEEPVLQNQIREHVIAIEDAFVNSQEWTLSRSVPELKVGIVGNLASGKSALVHRYLTGTYVQEESPEGGRFKKEIVVDGQSYLLLIRDEGGPPEAQFAMWVDAVIFVFSLEDEISFQTVYHYYSRMANYRNTSEIPLVLVGTQDAISSANPRVIDDARARKLSNDLKRCTYYETCATYGLNVERVFQDVAQKIVATRKKQQLSIGPCKSLPNSPSHSSVCSAQVSAVHISQTSNGGGSLSDYSSSVPSTPSTSQKELRIDVPPTANTPTPVRKQSKRRSNLFTSRKGSDPDKEKKGLESRADSIGSGRAIPIKQGMLLKRSGKSLNKEWKKKYVTLCDNGVLTYHPSLHDYMQNVHGKEIDLLRTTVKVPGKRPPRATSACAPISSPKTNGLSKDMSSLHISPNSDTGLGDSVCSSPSISSTTSPKLDPPPSPHANRKKHRRKKSTSNFKADGLSGTAEEQEENFEFIIVSLTGQTWHFEATTYEERDAWVQAIESQILASLQSCESSKNKSRLTSQSEAMALQSIRNMRGNSHCVDCETQNPNWASLNLGALMCIECSGIHRNLGTHLSRVRSLDLDDWPVELIKVMSSIGNELANSVWEESSQGRTKPSVDSTREEKERWIRAKYEQKLFLAPLPCTELSLGQHLLRATADEDLRTAILLLAHGSRDEVNETCGEGDGRTALHLACRKGNVVLAQLLIWYGVDVTARDAHGNTALAYARQASSQECIDVLLQYGCPDERFVLMATPNLSRRNNNRNNSSGRVPTII

SEQ ID NO: 316 - DNA, 5043 bp, Homo sapiens
gaaaaagaacagtgtgtcatgaagacaggcacctggaggtgatttgggtggcattcatgagaaaattcacgttacccgaatcattgacatagagtaactccacagcatgtgtcttcaagagcttccctaaaagattaaaggttatacaaaacttaaaagaagcagcaattctattcgcttgttattggacttgaaactccctttgacctcggaaactgaagatgaggttgccatgggaactgctggtactgcaatcattcattttgtgccttgcagatgattccacactgcatggcccgatttttattcaagaaccaagtcctgtaatgttccctttggattctgaggagaaaaaagtgaagctcaattgtgaagttaaaggaaatccaaaacctcatatcaggtggaagttaaatggaacagatgttgacactggtatggatttccgctacagtgttgttgaagggagcttgttgatcaataaccccaataaaacccaagatgctggaacgtaccagtgcacagcgacaaactcgtttggaacaattgttagcagagaagcaaagcttcagtttgcttatcttgacaactttaaaacaagaacaagaagcactgtgtctgtccgtcgaggtcaaggaatggtgctactgtgtggcccgccaccccattctggagagctgagttatgcctggatcttcaatgaatacccttcctatcaggataatcgccgctttgtttctcaagagactgggaatctgtatattgccaaagtagaaaaatcagatgttgggaattatacctgtgtggttaccaataccgtgacaaaccacaaggtcctggggccacctacaccactaatattgagaaatgatggagtgatgggtgaatatgagcccaaaatagaagtgcagttcccagaaacagttccgactgcaaaaggagcaacggtgaagctggaatgctttgctttaggaaatccagtaccaactattatctggcgaagagctgatggaaagccaatagcaaggaaagccagaagacacaagtcaaatggaattcttgagatccctaattttcagcaggaggatgctggtttatatgaatgtgtagctgaaaattccagagggaaaaatgtagcaaggggacagctaactttctatgctcaacctaattggattcaaaaaataaatgatattcacgtggccatggaagaaaatgtcttttgggaatgtaaagcaaatggaaggcctaagcctacatacaagtggctaaaaaatggcgaacctctgctaactcgggatagaattcaaattgagcaaggaacactcaacataacaatagtgaacctctcagatgctggcatgtatcagtgtttggcagagaataaacatggagttatcttttccaacgcagagcttagtgttatagctgtaggtccagatttttcaagaacactcttgaaaagagtaactcttgtcaaagtgggaggtgaagttgtcattgagtgtaagccaaaagcgtctccaaaacctgtttacacctggaagaaaggaagggatatattaaaagaaaatgaaagaattaccatttctgaagatggaaacctcagaatcatcaacgttactaaatcagacgctgggagttatacctgtatagccactaaccattttggaactgctagcagtactggaaacttggtagtgaaagatccaacaagggtaatggtacccccttccagtatggatgtcactgttggagagagtattgttttaccgtgccaggtaacgcatgatcactcgctagacatcgtgtttacttggtcatttaatggacacctgatagactttgacagagatggggaccactttgaaagagttggagggcaggattcagctggtgatttgatgatccgaaacatccaactgaagcatgctgggaaatatgtctgcatggtccaaacaagtgtggacaggctatctgctgctgcagacctgattgtaagaggtcctccaggtcccccagaggctgtgacaatagacgaaatcacagataccactgctcagctctcctggagacccgggcctgacaaccacagccccatcaccatgtatgtcattcaagccaggactccattctccgtgggctggcaagcagtcagtacagtcccagaactcattgatgggaagacattcacagcgaccgtggtgggtttgaacccttgggttgaatatgaattccgcacagttgcagccaacgtgattgggattggggagcccagccgcccctcagagaaacggagaacagaagaagctctccccgaagtcacaccagcgaatgtcagtggtggcggaggcagcaaatctgaactggttataacctgggagacggtccctgaggaattacagaatggtcgaggctttggttatgtggtggccttccggccctacggtaaaatgatctggatgctgacagtgctggcctcagctgatgcctctagatacgtgttcaggaatgagagcgtgcaccccttctctccctttgaggttaaagtaggtgtcttcaacaacaaaggagaaggccctttcagtcccaccacggtggtgtattctgcagaagaagaacccaccaaaccaccagccagtatctttgccagaagtctttctgccacagatattgaagttttctgggcctccccactggagaagaatagaggacgaatacaaggttatgaggttaaatattggagacatgaagacaaagaagaaaatgctagaaaaatacgaacagttggaaatcagacatcaacaaaaatcacgaacttaaaaggcagtgtgctgtatcacttagctgtcaaggcatataattctgctgggacaggcccctctagtgcaacagtcaatgtgacaacccgaaagccaccaccaagtcaaccccccggaaacatcatatggaattcatcagactccaaaattatcctgaattgggatcaagtgaaggccctggataatgagtcggaagtaaaaggatacaaagtcttgtacagatggaacagacaaagcagcacatctgtcattgaaacaaataaaacatcggtggagctttctttgcctttcgatgaagattatataatagaaattaagccattcagcgacggaggagatggcagcagcagtgaacaaattcgaattccaaagatatcaaatgcctacgcgagaggatctggggcttccacttcgaatgcatgtacgctgtcagccatcagtacaataatgatttccctcacagctaggtccagtttatgacaaaagttatctgaaggacttgctgtttataatataagcaacatttagctagttgttttgaagacacccagtactaagtaatattgttgttcaagtacatcttattactggaataaaaatgttttttgcttctttaggaatggcattatacagtacttcctcaaagcaaatctagctttgtctgaagtttctttggaaactctgcaatgcactgaagacatctgtaatatgatgttaccaaagcagtttacatatgtccttatatgcatattttttattatatatttagtgttttatagaattttttaaagttaacatataatgtagatattaattttttcctcggctgtaaaatgctatgggcaacacaatcatgcaattataatttgaaaatatttcctttaaagacagagtttgaaactcatcttggtaaataaattgcaaattactcgtacagttttacaaggatctcatggcagaacagcggaagacttggtccgtaactcaaggctgttgtatgcaaactactcttctagtggttaatgcacttgacatgtacagtatgtttcccatgccgttgtgattttgacatgtacagtatgttttcatgccgttgtgaattttgttgttcaacccaacttgagatggtttcaggaatggctgcaatctcaaaagctcaatgtactgcccaagaggcaccttgtgcaatattcccatccctgaatttagcattgtacaggaagattttcttttcactcaactgagttagcattgtctttgtggtagcattatcttagacattaaatttgaagtaacatatatcctgtagtaacatagacccaaagttactatagtcaaccaagtctttcaaaggataaaagatcattttattatctttaactgtatctattttgaatgtaaatttaaaaaaagtaattctctgtcaatggattcgtaatttctttacaaaatttcttatatataatatgtgtatctctgtaataatagagcccttcttttgaatcaaaattacatatggactttggaagattgctcctatttcaacaaatagttgctgcaagaatttttaatatgactctataaaagctctttagtacaattgtatggtttcttgatgattctgttttgcaataggtagcctagttgctttatatgctttaccttctaggtcttaaaatcacacattggaaaatgacaatatcaacaaaactgtattcttatgaaaagaactatttgttacaatgagaaaggttttgtgagtaaaccctactggacagtgacataaaaggcaatggaattttctataaacattttctcatgtaaacatgctgccaccttttcttctttctcagagaactcaaatttgctatagtttgtcatttttgcttacaaataatataacttttcaaccttctagttatatttatccaataaagtcataatcgggattccatttgtgtaaaaactagggtggtaaccggaaaaaaatattgtcagtatttcaagctgtgttcctttcttagtttgatatggttacttctatgttgaaataaaatttaaaatcacatgcaaaaaaaaaatcagcaaaataataaaatgaacgaaaaaaaatgacacccagggagttcccaaccccagtgtaaatgatatttaccagtgatctagcatatgtaatcttttttaaaggtattgttaataaatattctgtcatttgtaaaga

SEQ ID NO: 317 - protein, 1026 aa, Homo sapiens
MRLPWELLVLQSFILCLADDSTLHGPIFIQEPSPVMFPLDSEEKKVKLNCEVKGNPKPHIRWKLNGTDVDTGMDFRYSVVEGSLLINNPNKTQDAGTYQCTATNSFGTIVSREAKLQFAYLDNFKTRTRSTVSVRRGQGMVLLCGPPPHSGELSYAWIFNEYPSYQDNRRFVSQETGNLYIAKVEKSDVGNYTCVVTNTVTNHKVLGPPTPLILRNDGVMGEYEPKIEVQFPETVPTAKGATVKLECFALGNPVPTIIWRRADGKPIARKARRHKSNGILEIPNFQQEDAGLYECVAENSRGKNVARGQLTFYAQPNWIQKINDIHVAMEENVFWECKANGRPKPTYKWLKNGEPLLTRDRIQIEQGTLNITIVNLSDAGMYQCLAENKHGVIFSNAELSVIAVGPDFSRTLLKRVTLVKVGGEVVIECKPKASPKPVYTWKKGRDILKENERITISEDGNLRIINVTKSDAGSYTCIATNHFGTASSTGNLVVKDPTRVMVPPSSMDVTVGESIVLPCQVTHDHSLDIVFTWSFNGHLIDFDRDGDHFERVGGQDSAGDLMIRNIQLKHAGKYVCMVQTSVDRLSAAADLIVRGPPGPPEAVTIDEITDTTAQLSWRPGPDNHSPITMYVIQARTPFSVGWQAVSTVPELIDGKTFTATVVGLNPWVEYEFRTVAANVIGIGEPSRPSEKRRTEEALPEVTPANVSGGGGSKSELVITWETVPEELQNGRGFGYVVAFRPYGKMIWMLTVLASADASRYVFRNESVHPFSPFEVKVGVFNNKGEGPFSPTTVVYSAEEEPTKPPASIFARSLSATDIEVFWASPLEKNRGRIQGYEVKYWRHEDKEENARKIRTVGNQTSTKITNLKGSVLYHLAVKAYNSAGTGPSSATVNVTTRKPPPSQPPGNIIWNSSDSKIILNWDQVKALDNESEVKGYKVLYRWNRQSSTSVIETNKTSVELSLPFDEDYIIEIKPFSDGGDGSSSEQIRIPKISNAYARGSGASTSNACTLSAISTIMISLTARSSL

SEQ ID NO: 318 - DNA, 3072 bp, Homo sapiens
gaggatcttcagccaagatggtttttcttccttcagtgagatcttttgtctatttggcaatggaagaagattagtattagaggatacgtgttggaaatgtggtttttcaggagaccgatgtccagtgtttttttttttacaatcatttccaaccatttcagagctgggtctgccccatcaaagagcaagctctggactgcagatcctcattacgttttcaaccctgtccagtacatcataactgtttaagatagactgactgcaagccctaaatttaaaagactgttaacaaaacgccaaataagatgggtggagaaggatgtagacaagaatgttacaagggaaacaaaaacgatttttgcatttgagtgaaactactgtgatttctgaagaccaccttccttctttcccagacggtccctgaggaattacagaatggtcgaggctttggttatgtggtggccttccggccctacggtaaaatgatctggatgctgacagtgctggcctcagctgatgcctctagatacgtgttcaggaatgagagcgtgcaccccttctctccctttgaggttaaagtaggtgtcttcaacaacaaaggagaaggccctttcagtcccaccacggtggtgtattctgcagaagaagaacccaccaaaccaccagccagtatctttgccagaagtctttctgccacagatattgaagttttctgggcctccccactggagaagaatagaggacgaatacaaggttatgaggttaaatattggagacatgaagacaaagaagaaaatgctagaaaaatacgaacagttggaaatcagacatcaacaaaaatcacgaacttaaaaggcagtgtgctgtatcacttagctgtcaaggcatataattctgctgggacaggcccctctagtgcaacagtcaatgtgacaacccgaaagccaccaccaagtcaaccccccggaaacatcatatggaattcatcagactccaaaattatcctgaattgggatcaagtgaaggccctggataatgagtcggaagtaaaaggatacaaagtcttgtacagatggaacagacaaagcagcacatctgtcattgaaacaaataaaacatcggtggagctttctttgcctttcgatgaagattatataatagaaattaagccattcagcgacggaggagatggcagcagcagtgaacaaattcgaattccaaagatatcaaatgcctacgcgagaggatctggggcttccacttcgaatgcatgtacgctgtcagccatcagtacaataatgatttccctcacagctaggtccagtttatgacaaaagttatctgaaggacttgctgtttataatataagcaacatttagctagttgttttgaagacacccagtactaagtaatattgttgttcaagtacatcttattactggaataaaaatgttttttgcttctttaggaatggcattatacagtacttcctcaaagcaaatctagctttgtctgaagtttctttggaaactctgcaatgcactgaagacatctgtaatatgatgttaccaaagcagtttacatatgtccttatatgcatattttttattatatatttagtgttttatagaattttttaaagttaacatataatgtagatattaattttttcctcggctgtaaaatgctatgggcaacacaatcatgcaattataatttgaaaatatttcctttaaagacagagtttgaaactcatcttggtaaataaattgcaaattactcgtacagttttacaaggatctcatggcagaacagcggaagacttggtccgtaactcaaggctgttgtatgcaaactactcttctagtggttaatgcacttgacatgtacagtatgtttcccatgccgttgtgattttgacatgtacagtatgttttcatgccgttgtgaattttgttgttcaacccaacttgagatggtttcaggaatggctgcaatctcaaaagctcaatgtactgcccaagaggcaccttgtgcaatattcccatccctgaatttagcattgtacaggaagattttcttttcactcaactgagttagcattgtctttgtggtagcattatcttagacattaaatttgaagtaacatatatcctgtagtaacatagacccaaagttactatagtcaaccaagtctttcaaaggataaaagatcattttattatctttaactgtatctattttgaatgtaaatttaaaaaaagtaattctctgtcaatggattcgtaatttctttacaaaatttcttatatataatatgtgtatctctgtaataatagagcccttcttttgaatcaaaattacatatggactttggaagattgctcctatttcaacaaatagttgctgcaagaatttttaatatgactctataaaagctctttagtacaattgtatggtttcttgatgattctgttttgcaataggtagcctagttgctttatatgctttaccttctaggtcttaaaatcacacattggaaaatgacaatatcaacaaaactgtattcttatgaaaagaactatttgttacaatgagaaaggttttgtgagtaaaccctactggacagtgacataaaaggcaatggaattttctataaacattttctcatgtaaacatgctgccaccttttcttctttctcagagaactcaaatttgctatagtttgtcatttttgcttacaaataatataacttttcaaccttctagttatatttatccaataaagtcataatcgggattccatttgtgtaaaaactagggtggtaaccggaaaaaaatattgtcagtatttcaagctgtgttcctttcttagtttgatatggttacttctatgttgaaataaaatttaaaatcacatgcaaaaaaaaaatcagcaaaataataaaatgaacgaaaaaaaatgacacccagggagttcccaaccccagtgtaaatgatatttaccagtgatctagcatatgtaatcttttttaaaggtattgttaataaatattctgtcatttgtaaaga

SEQ ID NO: 319 - protein, 282 aa, Homo sapiens
MIWMLTVLASADASRYVFRNESVHPFSPFEVKVGVFNNKGEGPFSPTTVVYSAEEEPTKPPASIFARSLSATDIEVFWASPLEKNRGRIQGYEVKYWRHEDKEENARKIRTVGNQTSTKITNLKGSVLYHLAVKAYNSAGTGPSSATVNVTTRKPPPSQPPGNIIWNSSDSKIILNWDQVKALDNESEVKGYKVLYRWNRQSSTSVIETNKTSVELSLPFDEDYIIEIKPFSDGGDGSSSEQIRIPKISNAYARGSGASTSNACTLSAISTIMISLTARSSL

SEQ ID NO: 320 - DNA, 2318 bp, Homo sapiens
ataccagatggaggctttgatttgctcaacctaattggattcaaaaaataaatgatattcacgtggccatggaagaaaatgtcttttgggaatgtaaagcaaatggaaggcctaagcctacatacaagtggctaaaaaatggcgaacctctgctaactcgggatagaattcaaattgagcaaggaacactcaacataacaatagtgaacctctcagatgctggcatgtatcagtgtttggcagagaataaacatggagttatcttttccaacgcagagcttagtgttatagctgtaggtccagatttttcaagaacactcttgaaaagagtaactcttgtcaaagtgggaggtgaagttgtcattgagtgtaagccaaaagcgtctccaaaacctgtttacacctggaagaaaggaagggatatattaaaagaaaatgaaagaattaccatttctgaagatggaaacctcagaatcatcaacgttactaaatcagacgctgggagttatacctgtatagccactaaccattttggaactgctagcagtactggaaacttggtagtgaaagatccaacaagggtaatggtacccccttccagtatggatgtcactgttggagagagtattgttttaccgtgccaggtaacgcatgatcactcgctagacatcgtgtttacttggtcatttaatggacacctgatagactttgacagagatggggaccactttgaaagagttggagggcaggattcagctggtgatttgatgatccgaaacatccaactgaagcatgctgggaaatatgtctgcatggtccaaacaagtgtggacaggctatctgctgctgcagacctgattgtaagaggtcctccaggtcccccagaggctgtgacaatagacgaaatcacagataccactgctcagctctcctggagacccgggcctgacaaccacagccccatcaccatgtatgtcattcaagccaggactccattctccgtgggctggcaagcagtcagtacagtcccagaactcattgatgggaagacattcacagcgaccgtggtgggtttgaacccttgggttgaatatgaattccgcacagttgcagccaacgtgattgggattggggagcccagccgcccctcagagaaacggagaacagaagaagctctccccgaagtcacaccagcgaatgtcagtggtggcggaggcagcaaatctgaactggttataacctgggagacggtccctgaggaattacagaatggtcgaggctttggttatgtggtggccttccggccctacggtaaaatgatctggatgctgacagtgctggcctcagctgatgcctctagatacgtgttcaggaatgagagcgtgcaccccttctctccctttgaggttaaagtaggtgtcttcaacaacaaaggagaaggccctttcagtcccaccacggtggtgtattctgcagaagaagaacccaccaaaccaccagccagtatctttgccagaagtctttctgccacagatattgaagttttctgggcctccccactggagaagaatagaggacgaatacaaggttatgaggttaaatattggagacatgaagacaaagaagaaaatgctagaaaaatacgaacagttggaaatcagacatcaacaaaaatcacgaacttaaaaggcagtgtgctgtatcacttagctgtcaaggcatataattctgctgggacaggcccctctagtgcaacagtcaatgtgacaacccgaaagccaccaccaagtcaaccccccggaaacatcatatggaattcatcagactccaaaattatcctgaattgggatcaagtgaaggccctggataatgagtcggaagtaaaaggatacaaagtcttgtacagatggaacagacaaagcagcacatctgtcattgaaacaaataaaacatcggtggagctttctttgcctttcgatgaagattatataatagaaattaagccattcagcgacggaggagatggcagcagcagtgaacaaattcgaattccaaagatatcaaatgcctacgcgagaggatctggggcttccacttcgaatgcatgtacgctgtcagccatcagtacaataatgatttccctcacagctaggtccagtttatgacaaaagttatctgaaggacttgctgtttataatataagcaacatttagctagttgttttgaagacacccagtactaagtaatattgttgttcaagtacatcttattactggaataaaaatgttttttgcttctttaaaaaaaaaaaaaaaaaa

SEQ ID NO: 321 - protein, 698 aa, Homo sapiens
MEENVFWECKANGRPKPTYKWLKNGEPLLTRDRIQIEQGTLNITIVNLSDAGMYQCLAENKHGVIFSNAELSVIAVGPDFSRTLLKRVTLVKVGGEVVIECKPKASPKPVYTWKKGRDILKENERITISEDGNLRIINVTKSDAGSYTCIATNHFGTASSTGNLVVKDPTRVMVPPSSMDVTVGESIVLPCQVTHDHSLDIVFTWSFNGHLIDFDRDGDHFERVGGQDSAGDLMIRNIQLKHAGKYVCMVQTSVDRLSAAADLIVRGPPGPPEAVTIDEITDTTAQLSWRPGPDNHSPITMYVIQARTPFSVGWQAVSTVPELIDGKTFTATVVGLNPWVEYEFRTVAANVIGIGEPSRPSEKRRTEEALPEVTPANVSGGGGSKSELVITWETVPEELQNGRGFGYVVAFRPYGKMIWMLTVLASADASRYVFRNESVHPFSPFEVKVGVFNNKGEGPFSPTTVVYSAEEEPTKPPASIFARSLSATDIEVFWASPLEKNRGRIQGYEVKYWRHEDKEENARKIRTVGNQTSTKITNLKGSVLYHLAVKAYNSAGTGPSSATVNVTTRKPPPSQPPGNIIWNSSDSKIILNWDQVKALDNESEVKGYKVLYRWNRQSSTSVIETNKTSVELSLPFDEDYIIEIKPFSDGGDGSSSEQIRIPKISNAYARGSGASTSNACTLSAISTIMISLTARSSL

SEQ ID NO: 322 - DNA, 2367 bp, Homo sapiens
agtacccacggaaaacttgtttaccttgtcaccatgagtaaaagttaattcccactcctgaagagagcaaaccaactctgaaagagagtgaaaatgcagacaagacagttatcagataatggctatctggacgagagattctttcgtttgacagcagtttggttgttgggagttccagttcagctcctgcacagttgctctgtacaaatcctcctccatatttgcttagagaaaacgtgttgccatcccatcatgaaggaagctgcctgagagtttttaaccattacagccgtgatgatgaaagagtgaagaaccgcctctaagttaaaaagtgcacccagagataaggttcgttctcaatgccctgccgctgcttctcatcgcatggccaccgcatttctcaggccaggcacattgagcattggtcctgtgcctgacgctatgctagatgctggggttgcagccacgagcatagacacgacagacacggtcctcgccatcttctgttgagtactggtcggaacaagaggatcgtctgtagacaggctacagattgttttagattgaagtttcctgtcatgttcactcatctttaaatcctcatagtgaaaaggatatgatcatcgtggcgcatgtattactcatccttttgggggccactgagatactgcaagctgacttacttcctgatgaaaagatttcacttctcccacctgtcaatttcaccattaaagttactggtttggctcaagttcttttacaatggaaaccaaatcctgatcaagagcaaaggaatgttaatctagaatatcaagtgaaaataaacgctccaaaagaagatgactatgaaaccagaatcactgaaagcaaatgtgtaaccatcctccacaaaggcttttcagcaagtgtgcggaccatcctgcagaacgaccactcactactggccagcagctgggcttctgctgaacttcatgccccaccagggtctcctggaacctcaattgtgaatttaacttgcaccacaaacactacagaagacaattattcacgtttaaggtcataccaagtttcccttcactgcacctggcttgttggcacagatgcccctgaggacacgcagtattttctctactataggtatggctcttggactgaagaatgccaagaatacagcaaagacacactggggagaaatatcgcatgctggtttcccaggacttttatcctcagcaaagggcgtgactggcttgcggtgcttgttaacggctccagcaagcactctgctatcaggccctttgatcagctgtttgcccttcacgccattgatcaaataaatcctccactgaatgtcacagcagagattgaaggaactcgtctctctatccaatgggagaaaccagtgtctgcttttccaatccattgctttgattatgaagtaaaaatacacaatacaaggaatggatatttgcagatagaaaaattgatgaccaatgcattcatctcaataattgatgatctttctaagtacgatgttcaagtgagagcagcagtgagctccatgtgcagagaggcagggctctggagtgagtggagccaacctatttatgtgggaaatgatgaacacaagcccttgagagagtggtttgtcattgtgattatggcaaccatctgcttcatcttgttaattctctcgcttatctgtaaaatatgtcatttatggatcaagttgtttccaccaattccagcaccaaaaagtaatatcaaagatctctttgtaaccactaactatgagaaagctgggtccagtgagacggaaattgaagtcatctgttatatagagaagcctggagttgagaccctggaggattctgtgttttgactgtcactttggcatcctctgatgaactcacacatgcctcagtgcctcagtgaaaagaacagggatgctggctcttggctaagaggtgttcagaatttaggcaacactcaatttacctgcgaagcaatacacccagacacaccagtcttgtatctcttaaaagtatggatgcttcatccaaatcgcctcacctacagcagggaagttgactcatccaagcattttgccatgttttttctccccatgccgtacagggtagcacctcctcacctgccaatctttgcaatttgcttgactcacctcagacttttcattcacaacagacagcttttaaggctaacgtccagctgtatttacttctggctgtgcccgtttggctgtttaagctgccaattgtagcactcagctaccatctgaggaagaaagcattttgcatcagcctggagtgaaccatgaacttggattcaagactgtcttttctatagcaa

SEQ ID NO: 323 - protein, 420 aa, Homo sapiens
MIIVAHVLLILLGATEILQADLLPDEKISLLPPVNFTIKVTGLAQVLLQWKPNPDQEQRNVNLEYQVKINAPKEDDYETRITESKCVTILHKGFSASVRTILQNDHSLLASSWASAELHAPPGSPGTSIVNLTCTTNTTEDNYSRLRSYQVSLHCTWLVGTDAPEDTQYFLYYRYGSWTEECQEYSKDTLGRNIACWFPRTFILSKGRDWLAVLVNGSSKHSAIRPFDQLFALHAIDQINPPLNVTAEIEGTRLSIQWEKPVSAFPIHCFDYEVKIHNTRNGYLQIEKLMTNAFISIIDDLSKYDVQVRAAVSSMCREAGLWSEWSQPIYVGNDEHKPLREWFVIVIMATICFILLILSLICKICHLWIKLFPPIPAPKSNIKDLFVTTNYEKAGSSETEIEVICYIEKPGVETLEDSVF

SEQ ID NO: 324 - DNA, 2024 bp, Homo sapiens
agtacccacggaaaacttgtttaccttgtcaccatgagtaaaagttaattcccactcctgaagagagcaaaccaactctgaaagagagtgaaaatgcagacaagacagttatcagataatggctatctggacgagagattctttcgtttgacagcagtttggttgttgggagttccagttcagctcctgcacagttgctctgtacaaatcctcctccatatttgcttagagaaaacgtgttgccatcccatcatgaaggaagctgcctgagagtttttaaccattacagccgtgatgatgaaagagtgaagaaccgcctctaagttaaaaagtgcacccagagataaggttcgttctcaatgccctgccgctgcttctcatcgcatggccaccgcatttctcaggccaggcacattgagcattggtcctgtgcctgacgctatgctagatgctggggttgcagccacgagcatagacacgacagacacggtcctcgccatcttctgttgagtactggtcggaacaagaggatcgtctgtagacaggctacagattgttttagattgaagtttcctgtcatgttcactcatctttaaatcctcatagtgaaaaggatatgatcatcgtggcgcatgtattactcatccttttgggggccactgagatactgcaagctgacttacttcctgatgaaaagatttcacttctcccacctgtcaatttcaccattaaagttactggtttggctcaagttcttttacaatggaaaccaaatcctgatcaagagcaaaggaatgttaatctagaatatcaagtgaaaataaacgctccaaaagaagatgactatgaaaccagaatcactgaaagcaaatgtgtaaccatcctccacaaaggcttttcagcaagtgtgcggaccatcctgcagaacgaccactcactactggccagcagctgggcttctgctgaacttcatgccccaccagggtctcctggaacctcaattgtgaatttaacttgcaccacaaacactacagaagacaattattcacgtttaaggtcataccaagtttcccttcactgcacctggcttgttggcacagatgcccctgaggacacgcagtattttctctactataggtatggctcttggactgaagaatgccaagaatacagcaaagacacactggggagaaatatcgcatgctggtttcccaggacttttatcctcagcaaagggcgtgactggcttgcggtgcttgttaacggctccagcaagcactctgctatcaggccctttgatcagctgtttgcccttcacgccattgatcaaataaatcctccactgaatgtcacagcagagattgaaggaactcgtctctctatccaatgggagaaaccagtgtctgcttttccaatccattgctttgattatgaagtaaaaatacacaatacaaggaatggatatttgcagatagaaaaattgatgaccaatgcattcatctcaataattgatgatctttctaagtacgatgttcaagtgagagcagcagtgagctccatgtgcagagaggcagggctctggagtgagtggagccaacctatttatgtgggtaagtagcttatgtttattttacattggcagccttccttgtgatcaaaaaaggtaatcccagaaacgtacccgttcactcgtgggtcttaaaatggtttcatatctctattgtgactaattttctctcggtctactgccttttcaatcaggaatagatttgccatgaagccagtgaagtttttaagtgtctaggcttctcattagcgccaactctcctagacctggtgcctgttttttttccaagttttgtttctacttctatccattttttaaattaaactttttattttgaaataattatcacactcacaagctgtgggaagaaataatagagatcctgtgtctctttcatccagttttcctcaagggtaacatcttacaaaactatagtacaatagtggaatagaatatt

SEQ ID NO: 325 - protein, 333 aa, Homo sapiens
MIIVAHVLLILLGATEILQADLLPDEKISLLPPVNFTIKVTGLAQVLLQWKPNPDQEQRNVNLEYQVKINAPKEDDYETRITESKCVTILHKGFSASVRTILQNDHSLLASSWASAELHAPPGSPGTSIVNLTCTTNTTEDNYSRLRSYQVSLHCTWLVGTDAPEDTQYFLYYRYGSWTEECQEYSKDTLGRNIACWFPRTFILSKGRDWLAVLVNGSSKHSAIRPFDQLFALHAIDQINPPLNVTAEIEGTRLSIQWEKPVSAFPIHCFDYEVKIHNTRNGYLQIEKLMTNAFISIIDDLSKYDVQVRAAVSSMCREAGLWSEWSQPIYVGK

SEQ ID NO: 326 - DNA, 1694 bp, Homo sapiens
agtacccacggaaaacttgtttaccttgtcaccatgagtaaaagttaattcccactcctgaagagagcaaaccaactctgaaagagagtgaaaatgcagacaagacagttatcagataatggctatctggacgagagattctttcgtttgacagcagtttggttgttgggagttccagttcagctcctgcacagttgctctgtacaaatcctcctccatatttgcttagagaaaacgtgttgccatcccatcatgaaggaagctgcctgagagtttttaaccattacagccgtgatgatgaaagagtgaagaaccgcctctaagttaaaaagtgcacccagagataaggttcgttctcaatgccctgccgctgcttctcatcgcatggccaccgcatttctcaggccaggcacattgagcattggtcctgtgcctgacgctatgctagatgctggggttgcagccacgagcatagacacgacagacacggtcctcgccatcttctgttgagtactggtcggaacaagaggatcgtctgtagacaggctacagattgttttagattgaagtttcctgtcatgttcactcatctttaaatcctcatagtgaaaaggatatgatcatcgtggcgcatgtattactcatccttttgggggccactgagatactgcaagctgacttacttcctgatgaaaagatttcacttctcccacctgtcaatttcaccattaaagttactggtttggctcaagttcttttacaatggaaaccaaatcctgatcaagagcaaaggaatgttaatctagaatatcaagtgaaaataaacgctccaaaagaagatgactatgaaaccagaatcactgaaagcaaatgtgtaaccatcctccacaaaggcttttcagcaagtgtgcggaccatcctgcagaacgaccactcactactggccagcagctgggcttctgctgaacttcatgccccaccagggtctcctggaacctcaattgtgaatttaacttgcaccacaaacactacagaagacaattattcacgtttaaggtcataccaagtttcccttcactgcacctggcttgttggcacagatgcccctgaggacacgcagtattttctctactataggtatggctcttggactgaagaatgccaagaatacagcaaagacacactggggagaaatatcgcatgctggtttcccaggacttttatcctcagcaaagggcgtgactggcttgcggtgcttgttaacggctccagcaagcactctgctatcaggccctttgatcagctgtttgcccttcacgccattgatcaaataaatcctccactgaatgtcacagcagagattgaaggaactcgtctctctatccaatgggagaaaccagtgtctgcttttccaatccattgctttgattatgaagtaaaaatacacaatacaaggaatggatatttgcagatagaaaaattgatgaccaatgcattcatctcaataattgatgatctttctaagtacgatgttcaagtgagagcagcagtgagctccatgtgcagagaggcagggctctggagtgagtggagccaacctatttatgtggggttctcaagataaaggagataacatccagctttcctgccccacaccgtatctgaaataaaaacaacagcagggatagcagatt

SEQ ID NO: 327 - protein, 335 aa, Homo sapiens
MIIVAHVLLILLGATEILQADLLPDEKISLLPPVNFTIKVTGLAQVLLQWKPNPDQEQRNVNLEYQVKINAPKEDDYETRITESKCVTILHKGFSASVRTILQNDHSLLASSWASAELHAPPGSPGTSIVNLTCTTNTTEDNYSRLRSYQVSLHCTWLVGTDAPEDTQYFLYYRYGSWTEECQEYSKDTLGRNIACWFPRTFILSKGRDWLAVLVNGSSKHSAIRPFDQLFALHAIDQINPPLNVTAEIEGTRLSIQWEKPVSAFPIHCFDYEVKIHNTRNGYLQIEKLMTNAFISIIDDLSKYDVQVRAAVSSMCREAGLWSEWSQPIYVGFSR

SEQ ID NO: 328 - DNA, 2299 bp, Homo sapiens
agtacccacggaaaacttgtttaccttgtcaccatgagtaaaagttaattcccactcctgaagagagcaaaccaactctgaaagagagtgaaaatgcagacaagacagttatcagataatggctatctggacgagagattctttcgtttgacagcagtttggttgttgggagttccagttcagctcctgcacagttgctctgtacaaatcctcctccatatttgcttagagaaaacgtgttgccatcccatcatgaaggaagctgcctgagagtttttaaccattacagccgtgatgatgaaagagtgaagaaccgcctctaagttaaaaagtgcacccagagataaggttcgttctcaatgccctgccgctgcttctcatcgcatggccaccgcatttctcaggccaggcacattgagcattggtcctgtgcctgacgctatgctagatgctggggttgcagccacgagcatagacacgacagacacggtcctcgccatcttctgttgagtactggtcggaacaagaggatcgtctgtagacaggatatgatcatcgtggcgcatgtattactcatccttttgggggccactgagatactgcaagctgacttacttcctgatgaaaagatttcacttctcccacctgtcaatttcaccattaaagttactggtttggctcaagttcttttacaatggaaaccaaatcctgatcaagagcaaaggaatgttaatctagaatatcaagtgaaaataaacgctccaaaagaagatgactatgaaaccagaatcactgaaagcaaatgtgtaaccatcctccacaaaggcttttcagcaagtgtgcggaccatcctgcagaacgaccactcactactggccagcagctgggcttctgctgaacttcatgccccaccagggtctcctggaacctcaattgtgaatttaacttgcaccacaaacactacagaagacaattattcacgtttaaggtcataccaagtttcccttcactgcacctggcttgttggcacagatgcccctgaggacacgcagtattttctctactataggtatggctcttggactgaagaatgccaagaatacagcaaagacacactggggagaaatatcgcatgctggtttcccaggacttttatcctcagcaaagggcgtgactggcttgcggtgcttgttaacggctccagcaagcactctgctatcaggccctttgatcagctgtttgcccttcacgccattgatcaaataaatcctccactgaatgtcacagcagagattgaaggaactcgtctctctatccaatgggagaaaccagtgtctgcttttccaatccattgctttgattatgaagtaaaaatacacaatacaaggaatggatatttgcagatagaaaaattgatgaccaatgcattcatctcaataattgatgatctttctaagtacgatgttcaagtgagagcagcagtgagctccatgtgcagagaggcagggctctggagtgagtggagccaacctatttatgtgggaaatgatgaacacaagcccttgagagagtggtttgtcattgtgattatggcaaccatctgcttcatcttgttaattctctcgcttatctgtaaaatatgtcatttatggatcaagttgtttccaccaattccagcaccaaaaagtaatatcaaagatctctttgtaaccactaactatgagaaagctgggtccagtgagacggaaattgaagtcatctgttatatagagaagcctggagttgagaccctggaggattctgtgttttgactgtcactttggcatcctctgatgaactcacacatgcctcagtgcctcagtgaaaagaacagggatgctggctcttggctaagaggtgttcagaatttaggcaacactcaatttacctgcgaagcaatacacccagacacaccagtcttgtatctcttaaaagtatggatgcttcatccaaatcgcctcacctacagcagggaagttgactcatccaagcattttgccatgttttttctccccatgccgtacagggtagcacctcctcacctgccaatctttgcaatttgcttgactcacctcagacttttcattcacaacagacagcttttaaggctaacgtccagctgtatttacttctggctgtgcccgtttggctgtttaagctgccaattgtagcactcagctaccatctgaggaagaaagcattttgcatcagcctggagtgaaccatgaacttggattcaagactgtcttttctatagcaa

SEQ ID NO: 329 - protein, 420 aa, Homo sapiens; identical to SEQ ID NO: 323

SEQ ID NO: 330 - DNA, 1956 bp, Homo sapiens
agtacccacggaaaacttgtttaccttgtcaccatgagtaaaagttaattcccactcctgaagagagcaaaccaactctgaaagagagtgaaaatgcagacaagacagttatcagataatggctatctggacgagagattctttcgtttgacagcagtttggttgttgggagttccagttcagctcctgcacagttgctctgtacaaatcctcctccatatttgcttagagaaaacgtgttgccatcccatcatgaaggaagctgcctgagagtttttaaccattacagccgtgatgatgaaagagtgaagaaccgcctctaagttaaaaagtgcacccagagataaggttcgttctcaatgccctgccgctgcttctcatcgcatggccaccgcatttctcaggccaggcacattgagcattggtcctgtgcctgacgctatgctagatgctggggttgcagccacgagcatagacacgacagacacggtcctcgccatcttctgttgagtactggtcggaacaagaggatcgtctgtagacaggatatgatcatcgtggcgcatgtattactcatccttttgggggccactgagatactgcaagctgacttacttcctgatgaaaagatttcacttctcccacctgtcaatttcaccattaaagttactggtttggctcaagttcttttacaatggaaaccaaatcctgatcaagagcaaaggaatgttaatctagaatatcaagtgaaaataaacgctccaaaagaagatgactatgaaaccagaatcactgaaagcaaatgtgtaaccatcctccacaaaggcttttcagcaagtgtgcggaccatcctgcagaacgaccactcactactggccagcagctgggcttctgctgaacttcatgccccaccagggtctcctggaacctcaattgtgaatttaacttgcaccacaaacactacagaagacaattattcacgtttaaggtcataccaagtttcccttcactgcacctggcttgttggcacagatgcccctgaggacacgcagtattttctctactataggtatggctcttggactgaagaatgccaagaatacagcaaagacacactggggagaaatatcgcatgctggtttcccaggacttttatcctcagcaaagggcgtgactggcttgcggtgcttgttaacggctccagcaagcactctgctatcaggccctttgatcagctgtttgcccttcacgccattgatcaaataaatcctccactgaatgtcacagcagagattgaaggaactcgtctctctatccaatgggagaaaccagtgtctgcttttccaatccattgctttgattatgaagtaaaaatacacaatacaaggaatggatatttgcagatagaaaaattgatgaccaatgcattcatctcaataattgatgatctttctaagtacgatgttcaagtgagagcagcagtgagctccatgtgcagagaggcagggctctggagtgagtggagccaacctatttatgtgggtaagtagcttatgtttattttacattggcagccttccttgtgatcaaaaaaggtaatcccagaaacgtacccgttcactcgtgggtcttaaaatggtttcatatctctattgtgactaattttctctcggtctactgccttttcaatcaggaatagatttgccatgaagccagtgaagtttttaagtgtctaggcttctcattagcgccaactctcctagacctggtgcctgttttttttccaagttttgtttctacttctatccattttttaaattaaactttttattttgaaataattatcacactcacaagctgtgggaagaaataatagagatcctgtgtctctttcatccagttttcctcaagggtaacatcttacaaaactatagtacaatagtggaatagaatatt

SEQ ID NO: 331 - protein, 333 aa, Homo sapiens; identical to SEQ ID NO: 325

SEQ ID NO: 332 - DNA, 1626 bp, Homo sapiens
agtacccacggaaaacttgtttaccttgtcaccatgagtaaaagttaattcccactcctgaagagagcaaaccaactctgaaagagagtgaaaatgcagacaagacagttatcagataatggctatctggacgagagattctttcgtttgacagcagtttggttgttgggagttccagttcagctcctgcacagttgctctgtacaaatcctcctccatatttgcttagagaaaacgtgttgccatcccatcatgaaggaagctgcctgagagtttttaaccattacagccgtgatgatgaaagagtgaagaaccgcctctaagttaaaaagtgcacccagagataaggttcgttctcaatgccctgccgctgcttctcatcgcatggccaccgcatttctcaggccaggcacattgagcattggtcctgtgcctgacgctatgctagatgctggggttgcagccacgagcatagacacgacagacacggtcctcgccatcttctgttgagtactggtcggaacaagaggatcgtctgtagacaggatatgatcatcgtggcgcatgtattactcatccttttgggggccactgagatactgcaagctgacttacttcctgatgaaaagatttcacttctcccacctgtcaatttcaccattaaagttactggtttggctcaagttcttttacaatggaaaccaaatcctgatcaagagcaaaggaatgttaatctagaatatcaagtgaaaataaacgctccaaaagaagatgactatgaaaccagaatcactgaaagcaaatgtgtaaccatcctccacaaaggcttttcagcaagtgtgcggaccatcctgcagaacgaccactcactactggccagcagctgggcttctgctgaacttcatgccccaccagggtctcctggaacctcaattgtgaatttaacttgcaccacaaacactacagaagacaattattcacgtttaaggtcataccaagtttcccttcactgcacctggcttgttggcacagatgcccctgaggacacgcagtattttctctactataggtatggctcttggactgaagaatgccaagaatacagcaaagacacactggggagaaatatcgcatgctggtttcccaggacttttatcctcagcaaagggcgtgactggcttgcggtgcttgttaacggctccagcaagcactctgctatcaggccctttgatcagctgtttgcccttcacgccattgatcaaataaatcctccactgaatgtcacagcagagattgaaggaactcgtctctctatccaatgggagaaaccagtgtctgcttttccaatccattgctttgattatgaagtaaaaatacacaatacaaggaatggatatttgcagatagaaaaattgatgaccaatgcattcatctcaataattgatgatctttctaagtacgatgttcaagtgagagcagcagtgagctccatgtgcagagaggcagggctctggagtgagtggagccaacctatttatgtggggttctcaagataaaggagataacatccagctttcctgccccacaccgtatctgaaataaaaacaacagcagggatagcagatt

SEQ ID NO: 333 - protein, 335 aa, Homo sapiens; identical to SEQ ID NO: 327

SEQ ID NO: 334 - DNA, 6341 bp, Homo sapiens
cggcggggattaactttgcatgaataatgtgagtgcgcttggaaaagagacctcctgctccgcgggctcggggcaagagcccgcaggctaccttccccgggcaggggcgctcaacccaaccggctccagggcactggtaatttggctagaggaccgcgcggaggcagcgggatctgcgatttccttctggttggctgtcctgcgtgggtgccaagttccacacatgatttaatgaataagaaggagatgtcagtgaaaaaagggatccagaatgattactaacctatgactcccaacagtatgacagaaaatggccttacagcctgggacaaaccgaagcactgtccagaccgagaacacgactggaagctagtaggaatgtctgaagcctgcctacataggaagagccattcagagaggcgcagcacgttgaaaaatgaacagtcgtcgccacatctcatccagaccacttggactagctcaatattccatctggaccatgatgatgtgaacgaccagagtgtctcaagtgcccagaccttccaaacggaggagaagaaatgtaaagggtacatccccagttacttagacaaggacgagctctgtgtagtgtgtggtgacaaagccaccgggtatcactaccgctgtatcacgtgtgaaggctgcaagggtttctttagaagaaccattcagaaaaatctccatccatcctattcctgtaaatatgaaggaaaatgtgtcatagacaaagtcacgcgaaatcagtgccaggaatgtcgctttaagaaatgcatctatgttggcatggcaacagatttggtgctggatgacagcaagaggctggccaagaggaagctgatagaggagaaccgggagaaaagacggcgggaagagctgcagaagtccatcgggcacaagccagagcccacagacgaggaatgggagctcatcaaaactgtcaccgaagcccatgtggcgaccaacgcccaaggcagccactggaagcaaaaacggaaattcctgccagaagacattggacaagcaccaatagtcaatgccccagaaggtggaaaggttgacttggaagccttcagccattttacaaaaatcatcacaccagcaattaccagagtggtggattttgccaaaaagttgcctatgttttgtgagctgccatgtgaagaccagatcatcctcctcaaaggctgctgcatggagatcatgtcccttcgcgctgctgtgcgctatgacccagaaagtgagactttaaccttgaatggggaaatggcagtgacacggggccagctgaaaaatgggggtcttggggtggtgtcagacgccatctttgacctgggcatgtctctgtcttctttcaacctggatgacactgaagtagccctccttcaggccgtcctgctgatgtcttcagatcgcccggggcttgcctgtgttgagagaatagaaaagtaccaagatagtttcctgctggcctttgaacactatatcaattaccgaaaacaccacgtgacacacttttggccaaaactcctgatgaaggtgacagatctgcggatgataggagcctgccatgccagccgcttcctgcacatgaaggtggaatgccccacagaactcttcccccctttgttcttggaagtgttcgaggattagactgactggattcattctcataattcctacagcactactgggtgtcatttcattccattgcctagctcttttttgtttgtttctttgtgttgggagggattatttgggagggaaaagggaagtagtccttggcatagacatggatgaaattgccccttgaatgcgggtacttgaaactattgcatttcgttctccggtcctgtgatgtgaatgctctgaaggttttatggttgtggaggtggggtgggggacaatcattaactcaccagcaccaagcatcaccagctcccacccgtccctggtccaagacttgagtcagcaaaatggcgccacaggacactaaagaagccttaaaaccaagataatacgaccacctccacccaatcctgatgttcgcagggctgaagttaacagagcacagaccacctttagttagatgtggctttcagccttttagggaaagactcgaacaaattttcatctattcaagagcatgctgtttgcagcactctttatggtctcctaggagcataacttggaatgtacaggaatatttgtgtcctaaaaaaatcagctgcccttccaatatcatttttataacgttatggtttaattcaagttatacaaaggtgtgactcaaggatgtgcaggtattgactgatggaggccaacaaggaaaatattttttttcagtgagcccagagaaattagaaatcttcaccaatgtcagtgactgcatggtttccaaaaattcacatagtattacctcacagtaggaaggcttctttcccatttaggctcagagaacacttttacagaaatcaaacctatttacagggtggcaccccttttctgtggcatctgatctgtcatctcccaagctcctgaagttctttatccaggttgtatctttgctgagctgacaacagatttctctatggatcaaatattctaatcaaggaaagatacggtgaaacttcagtcttcttctggagaaatgctgaggcgagattagtgcagctacattctgagttgaaggaaatgcagtgttctgagggcccctttgtgtcctgatggctggaggacgcttcctcctggttagatcctcaagctccttgcctcattgacaaatgtctcctagtcccctttttccctctgactctgaggaactaaatagcttgactatctctaaacagagactggccctgccactgaccctcctgtccctctcatagcataccctgacagatactcaatagaaaacacctgcagaccatgtgcacacttaactttcctgcccaacctgcctccccaacggcccatgctagaatagcttgtgcccagaaaacaaacagtgacacttcatctcttcagcgtcagaaaatgggcatagaatgtacccatgcaattgaatgtatctcattctccactggcatagtagatataaactattcctttgcctaccttttactgccttatcctggaaatattggggaaaataagccatatcagtgagatttacctaaaaacaaaggaaggaaagtcactatggaaaccaagtagatgctttttgtaagtttggtggagcataactggcccagaagtctgggtgcctgagttctagttcgtgctctgtcaactggtagatttgtaattctaggtcttggttttcttacctggtgaataagtcatgatctctaaaacccttcctgcccttaatattgtctgaatttcaaggggaaaaaaaaaatctggttcctttaattatttttttttaacacttaaattcctaactttattagacaagaagtatggcccacttaacagttaaggaacgtaaatttgttattggctcgaaataataatttgacacaatactagtcaaccatttagaggccttggaaaaagaagaggaacagcactgaaaattccaagtatgattggaaattatctgggagcggggaattaaatattcaatgcatgaaagcaattgtactggcttctgggaaaaaggaaacaagaacattgctatggaacttgttacccagagaaaggaagtgaaaagatttacaattataagcacgaaattcattggcagattacctgctttatctacagacagattgttttggggtttggttttgtctaggcagcctctggccaggctccttaattgcttgctctgctaatatttcagcttcctctcttgactccttgaggaaccaaccgctctttggaagacaaacacttagccacctctgtgctccagggtaaccctgagaagctctgctgtctggggcaagctttctttccaaagggaatgagaggaaggcaagcaggcagggtcctgcagcgtcaggccttctggggaaagtttcctcattttgtttgacagggtcctcagtacatcagacacccagatttgaatataagttcagagcctgatctcaagctaaatcagaatgctttggggactaaccatgatcgagaattggccaaatagtatggcatataaacagccatccagccagccgcaagtaaaggaacgtttgatccttggcaccttaaatgattgattgccttcaataggcaaactgctggtctggaaatctcgttgaaggctgaatacttcatgcggagtaggacaagccttagcccaccttcaggttgaaaggaaaggccataggactcaaaagataatgactctgaaactaaactccttccttctgaagctgacagaggtacttagtgcatctcaagactccatctcataaaactcatttgtgagggatttgctctagatttttctaaacattttttcatctattgtccagacttgcaaatccagtgtggacctgatggagatacccttcacacctgcgctcccaccccctcggcagggagacgtctcagtagaggagaacacacccattatgctgggatttgtatttataaatcacttcccttttagggatgagcggtgtggggcgtgtgtgcgtgtgagtgtatgcgcgtgcgtgtgtgaccctcaagtgtactttgctcaatttagacgtgcagtatttccagaaacaatgaaaaaagtaagatgttttcttctttatgattctgctcaaaacaccacgtgccgcctcagagctttttctagagcctcggtcctcaatgacgcgcttgacctgttgatgcctcagcccagcgaagcccctcacctgtgccccgggcgacagctcttcagtgtgcagtgcaggcctggggtggactgccaggccttcgctctgtgccagcaacgccgttcttgttgctcctccatgaacaggggtacaagccctggcccctcctcgacactaagccccccacagactcagcctccaaggaaccgctgagcacccttgaagcatgtcattgtcagtgatacctttttattctatggaactctaacctattcgtgtcatattgaccttttgctgcatgagtcataaattatgaaatcagtcttacagtttttgaaatgtagccagcatttgtaaggctaaacctttttcatgaactgaatttaagtgaataaccaagccacagttcctcctcaaatggagagtgatgatcgacatttgaatctctttgccctttccaacggctatggcatcaggttctaaaataagctcgtaatttttcctgttattttaataatatggaaatattagcatagtgtttcttttgatagtgatagactataatccatatttaaattttatagagaagaaattttattgtactgtgatgtagatatttattatccaggtaaggatttgcccggtgtgtattttttacaattgagacattttactttaatctttaaaaaaaatgcattaaaaacacactcaaaaaaaaaaaaaaaaaaaaaaaaaaaaaaccagactgggggaaaaaaggtttggccttatcacagaatttttactgtgctgtataaatgtttgcaaatgcgaaaagtgtgcatttatagtgtgtttccacattaattaatgccgccttcaagagcaatattgtgcaggtaaaacgctgtttgtggctttctgttgcacagttaaagctgacccaccctatgcacaagacaatcaaatataaatctgtcctcctcaggatgcagataatactcatgtaaattatggagcacaatgtaagacaaaaggagacactttacatatgtattgttgatacagaaattatcagggcatgaatgagctgatgtgacattatgccacttctttcttttggttctcccttattaacttggcatttttaatttgaccatagagccaaattagttctccatgctttcttcgtagaaaatccttttttttcccataatgttttcatgccctgagaatcagaaaaatactacagaatagaaaaagatttacagtcattggaagatttgtgttttgcaaacagtgttaagtgatattgctagatggtgatatttttttcagcctaaaactctgttgaaatctgtgatcaaaatgttttaaactatccaaaaaaaatttgtatatttgggaaaaatggatttttacatagcttttgtatgcagatataaaactgtaattatgaatatagtgggcgtagataaactcataagcttaaattctaaaaaagaaaaagcttataacaga

SEQ ID NO: 335 - protein, 461 aa, Homo sapiens
MTPNSMTENGLTAWDKPKHCPDREHDWKLVGMSEACLHRKSHSERRSTLKNEQSSPHLIQTTWTSSIFHLDHDDVNDQSVSSAQTFQTEEKKCKGYIPSYLDKDELCVVCGDKATGYHYRCITCEGCKGFFRRTIQKNLHPSYSCKYEGKCVIDKVTRNQCQECRFKKCIYVGMATDLVLDDSKRLAKRKLIEENREKRRREELQKSIGHKPEPTDEEWELIKTVTEAHVATNAQGSHWKQKRKFLPEDIGQAPIVNAPEGGKVDLEAFSHFTKIITPAITRVVDFAKKLPMFCELPCEDQIILLKGCCMEIMSLRAAVRYDPESETLTLNGEMAVTRGQLKNGGLGVVSDAIFDLGMSLSSFNLDDTEVALLQAVLLMSSDRPGLACVERIEKYQDSFLLAFEHYINYRKHHVTHFWPKLLMKVTDLRMIGACHASRFLHMKVECPTELFPPLFLEVFED

SEQ ID NO: 336 - DNA, 1185 bp, Homo sapiens
ggcctccaccgccttccccggctgcccggcagcctcccctcgctcgctctcctcttcctctagggccccagcgcagctcgggagcccgcgcaccgaggcgctaggggcaccgcgcactagagggacacccgccgcgcctggacagcccccggcgggcgcccccctcgcacctcctgccccgcgcgggccgcgctcccctcccccgcgcctgtgtccccagggcgcagggccgcgcgtccagccccagacccgccggggtccctggggacgcgccagcccggcagtggctcgacgatggaggagccgcagcgcgcccgctcgcacacagtcaccaccaccgccagctccttcgcagagaacttctccaccagcagcagcagcttcgcctacgaccgggagttcctccgcaccctgcccggcttcctcatcgtggccgagatcgttctggggctgctggtatggacgcttattgctggaactgagtacttccgggtccccgcatttggctgggtcatgtttgtagctgtattttactgggtcctcaccgtcttcttcctcattatctacataacaatgacctacaccaggattccccaggtgccctggacaacagtgggcctgtgctttaacggcagtgccttcgtcttgtacctctctgccgctgttgtagatgcatcttccgtctcccctgagagggacagtcacaacttcaacagctgggcggcctcatcgttctttgccttcctggtcaccatctgctacgctggaaatacatatttcagttttatagcatggagatccaggaccatacagtgatttaccattttgataattaaaaggaaaaaaaaaggaagactctcactgtaaaaacagctgtaggtataatgtatattcccagagaattgtatttaactaattaatgttttttatattcttaaatttgctcacaaattgtggtttgttacaattaaactggatacttatttgcaaagtgttgtagcttataatgaactcttaagtatcttattaatgtattaatgtcttcatagatcatattttcttagacaatgtttaaatagataaattgctaatattgagaatgtgtcaagtttgtaaacctaacttttaagatgccagattcttttttgattaaatgttgcaaaatcccaaaaaaaaaaaaaaaaa

SEQ ID NO: 337 - protein, 173 aa, Homo sapiens
MEEPQRARSHTVTTTASSFAENFSTSSSSFAYDREFLRTLPGFLIVAEIVLGLLVWTLIAGTEYFRVPAFGWVMFVAVFYWVLTVFFLIIYITMTYTRIPQVPWTTVGLCFNGSAFVLYLSAAVVDASSVSPERDSHNFNSWAASSFFAFLVTICYAGNTYFSFIAWRSRTIQ

SEQ ID NO: 338 - DNA, 2588 bp, Homo sapiens
aggcgcgagggctggctgctgggccgacgaggggcggtgccaggccgtgggtccttagtcaagtgacgcgaagcggccggcctgggcgccgactgcagagccgggaggctggtggtcatgccggggttcctggttcgcatcctccctctgttgctggttctgctgcttctgggccctacgcgcggcttgcgcaatgccacccagaggatgtttgaaattgactatagccgggactccttcctcaaggatggccagccatttcgctacatctcaggaagcattcactactcccgtgtgccccgcttctactggaaggaccggctgctgaagatgaagatggctgggctgaacgccatccagacgtatgtgccctggaactttcatgagccctggccaggacagtaccagttttctgaggaccatgatgtggaatattttcttcggctggctcatgagctgggactgctggttatcctgaggcccgggccctacatctgtgcagagtgggaaatgggaggattacctgcttggctgctagagaaagagtctattcttctccgctcctccgacccagattacctggcagctgtggacaagtggttgggagtccttctgcccaagatgaagcctctcctctatcagaatggagggccagttataacagtgcaggttgaaaatgaatatggcagctactttgcctgtgattttgactacctgcgcttcctgcagaagcgctttcgccaccatctgggggatgatgtggttctgtttaccactgatggagcacataaaacattcctgaaatgtggggccctgcagggcctctacaccacggtggactttggaacaggcagcaacatcacagatgctttcctaagccagaggaagtgtgagcccaaaggacccttgatcaattctgaattctatactggctggctagatcactggggccaacctcactccacaatcaagaccgaagcagtggcttcctccctctatgatatacttgcccgtggggcgagtgtgaacttgtacatgtttataggtgggaccaattttgcctattggaatggggccaactcaccctatgcagcacagcccaccagctacgactatgatgccccactgagtgaggctggggacctcactgagaagtattttgctctgcgaaacatcatccagaagtttgaaaaagtaccagaaggtcctatccctccatctacaccaaagtttgcatatggaaaggtcactttggaaaagttaaagacagtgggagcagctctggacattctgtgtccctctgggcccatcaaaagcctttatcccttgacatttatccaggtgaaacagcattatgggtttgtgctgtaccggacaacacttcctcaagattgcagcaacccagcacctctctcttcacccctcaatggagtccacgatcgagcatatgttgctgtggatgggatcccccagggagtccttgagcgaaacaatgtgatcactctgaacataacagggaaagctggagccactctggaccttctggtagagaacatgggacgtgtgaactatggtgcatatatcaacgattttaagggtttggtttctaacctgactctcagttccaatatcctcacggactggacgatctttccactggacactgaggatgcagtgcgcagccacctggggggctggggacaccgtgacagtggccaccatgatgaagcctgggcccacaactcatccaactacacgctcccggccttttatatggggaacttctccattcccagtgggatcccagacttgccccaggacacctttatccagtttcctggatggaccaagggccaggtctggattaatggctttaaccttggccgctattggccagcccggggccctcagttgaccttgtttgtgccccagcacatcctgatgacctcggccccaaacaccatcaccgtgctggaactggagtgggcaccctgcagcagtgatgatccagaactatgtgctgtgacgttcgtggacaggccagttattggctcatctgtgacctacgatcatccctccaaacctgttgaaaaaagactcatgcccccacccccgcaaaaaaacaaagattcatggctggaccatgtatgatgatgaaagcctgtgtctttgagggattctaccctgaacatacctcacagatcctccctgtcatgccacatttcactgattggaatgtggaaatggaaaaggaatttaggatgtgcattttcacctgaggtttccctgcatccctgcagtgccaaagccccaccttcagggaccacctggaatgtgtgaggggctgacagcacagtaacgtgcatacatatctgcagggctggaatggaagctttaaaggtggtagtgatttttattttggaagaatcatgttacctttttgttaaataaaatttgtactcaaatgatgatgtcactgtttttaatgtgcaggtattgaattatatggtctgacttaaatcataactagacttgagtgggctgaataaaccacttcactaacttgaagttcaaaaggatggaaaata

SEQ ID NO: 339 - protein, 677 aa, Homo sapiens
MPGFLVRILPLLLVLLLLGPTRGLRNATQRMFEIDYSRDSFLKDGQPFRYISGSIHYSRVPRFYWKDRLLKMKMAGLNAIQTYVPWNFHEPWPGQYQFSEDHDVEYFLRLAHELGLLVILRPGPYICAEWEMGGLPAWLLEKESILLRSSDPDYLAAVDKWLGVLLPKMKPLLYQNGGPVITVQVENEYGSYFACDFDYLRFLQKRFRHHLGDDVVLFTTDGAHKTFLKCGALQGLYTTVDFGTGSNITDAFLSQRKCEPKGPLINSEFYTGWLDHWGQPHSTIKTEAVASSLYDILARGASVNLYMFIGGTNFAYWNGANSPYAAQPTSYDYDAPLSEAGDLTEKYFALRNIIQKFEKVPEGPIPPSTPKFAYGKVTLEKLKTVGAALDILCPSGPIKSLYPLTFIQVKQHYGFVLYRTTLPQDCSNPAPLSSPLNGVHDRAYVAVDGIPQGVLERNNVITLNITGKAGATLDLLVENMGRVNYGAYINDFKGLVSNLTLSSNILTDWTIFPLDTEDAVRSHLGGWGHRDSGHHDEAWAHNSSNYTLPAFYMGNFSIPSGIPDLPQDTFIQFPGWTKGQVWINGFNLGRYWPARGPQLTLFVPQHILMTSAPNTITVLELEWAPCSSDDPELCAVTFVDRPVIGSSVTYDHPSKPVEKRLMPPPPQKNKDSWLDHV

SEQ ID NO: 340 - DNA, 2963 bp, Homo sapiens
gttcctccgggagcccaacaccgttcccgcgcggccacgatgatccctccgagcagcccccgcgaggacggcgtggacgggctgcccaaggaggcggtgggcgccgagcaaccgccctctcctgcatccaccagcagccaggaatccaagctccagaaactaaaacgatcactttctttcaagaccaagagtttacggagcaaaagtgctgacaacttcttccagcgaaccaacagcgaagacatgaaactgcaagcacacatggtggctgagatcagccccagctccagcccactccctgctccaggaagcctgacgtccacacccgccagggctggtctgcatccaggtggcaaggctcatgcctttcaggaatacatcttcaagaagcccactttctgtgatgtctgcaaccacatgatagtgggaacaaatgctaagcatggactgcgctgcaaagcctgtaagatgagcatccaccacaagtgcacagatggcctggcaccccagcggtgcatgggcaagctgccaaaggggtttcggcgttactacagctcccccttgctcattcatgaacagtttggctgcattaaagaagttatgcccattgcctgtggcaataaggtggaccctgtctacgagaccctccgcttcggcacctccctggcccagaggacaaagaagggcagctccggcagtggctctgactcacctcacagaacctctacttcagatcttgtggaggttcctgaggaagccaatgggccaggaggcgggtatgacctaaggaaacgcagcaacagcgtgtttacatatccagaaaatggcactgatgatttcagagatccagcgaagaacataaaccaccagggatctctttccaaagacccattacagatgaacacctatgttgccttgtacaaatttgtaccacaggagaatgaagatttggaaatgaggccaggagacataattactcttttagaggattccaatgaagactggtggaaagggaaaattcaagacagaattggcttctttccagccaactttgttcagagactacaacaaaatgagaagatttttagatgtgttagaaccttcattgggtgtaaggaacaggggcagataacactgaaagagaatcagatctgcgtgagttctgaagaagaacaagatggttttatcagagtcctcagtggaaaaaagaaaggcctcatcccccttgatgtactagaaaacatctgattgctggctcctcctccgtttgcagtaggcaagctctgctgcgatgcctctgcctcatctcacactgcgtcaacccaaaggagctgccgcactgacccagccccccaggaaacagtgagacaagaatcaagtatctgagactgtggagtaatagccacaaaacagagggcccactgcacagcatatccaggctgccacaggtggggacgaggctgagagagtcagcaggcagagccagatgccatgcttggcagcagcagtaggactataaaccacagctgtcccccaggatcccactcctttcctgtctgtgtggtgtaagttaacacactggagtgtgctccagtttgcagggtagcccagtgcaaggttcagatccatgtagctaagtattatcctgcttccagacctatgtcaccagtaccaatcagtcagtgtcatcacatttcaggccccaagcaatctctgtgcaaagcatcagaaagacctgcttcccagcccccagcattccagtgctctccaggcttcctctctttgtgattgtgctgtccagagtgtccagcttgttctttctttctcttcagtcctctgagtacatctggtggtgtgcattagatgtgagggctatgttgacatggcatcacctccaaagacctgacctgcctaaagactgatgacaggccatccttcctgctgttctaggtactggcctgggtgacagagcaggacatgagacatagatacagtggggaggagaagtggggaaaggtggagcagagagttcttacttattgaagattatacagccctttcggttatgaagtccctgcttgaaggcaatggacctggggaagagactatcacaaaaagtctccattttcattttacatcctctctattggaggcagcacttttccctcatgctgtcctataggactccactttgaaggttgtgcctacgttgcagggaactaggaacatggaggggaaccaacaacagcatcttagaagaaatgtagccaaattggagtccattcttctttagggcagtatatgaaatcctagcagatgtaaaatggaaaagaatcctaatgcttcttccttcagaaagtagaggaactaggggcccaattagcatcatctaggggaatctctattactctgtacttatactaatgtttacaagaatgcaatatactgtgatgccttcctactcaagcctcctagcattcaaacttccatcctattagtcattaacgtggttaaacttcaattcacaatcaccttggaatcaatgtcagtttgatttattttgttacagagcaataaaatcattagaacaatggtttttaaaagacttaagtggatgcatcctatgcatgtaagcattatttcccaaaccaaagcatcattcatctccatttatttcttttgttcccgctcagtgtgaagttgggaactgagaggggatggctgctggtttcacagaagtttggatgccttactcttatcttaaagccagcatccagaatttcctccctctctgatgccacatgcaaaaccaggtgtacgatgtcaagatggattctttgagagccagggtagatcatatgactgcctttctgtaaaattggatgcctagtacaaatgctctttgcctctaattcagtattccatttaataaaaacaatacagtggctggaaaggagcatcag

SEQ ID NO: 341 - protein, 402 aa, Homo sapiens
MIPPSSPREDGVDGLPKEAVGAEQPPSPASTSSQESKLQKLKRSLSFKTKSLRSKSADNFFQRTNSEDMKLQAHMVAEISPSSSPLPAPGSLTSTPARAGLHPGGKAHAFQEYIFKKPTFCDVCNHMIVGTNAKHGLRCKACKMSIHHKCTDGLAPQRCMGKLPKGFRRYYSSPLLIHEQFGCIKEVMPIACGNKVDPVYETLRFGTSLAQRTKKGSSGSGSDSPHRTSTSDLVEVPEEANGPGGGYDLRKRSNSVFTYPENGTDDFRDPAKNINHQGSLSKDPLQMNTYVALYKFVPQENEDLEMRPGDIITLLEDSNEDWWKGKIQDRIGFFPANFVQRLQQNEKIFRCVRTFIGCKEQGQITLKENQICVSSEEEQDGFIRVLSGKKKGLIPLDVLENI

SEQ ID NO: 342 - DNA, 5632 bp, Homo sapiens
gttagcggcgtctcggttgccatggagaccaggagctccaaaacgcggaggtctttagcgtcccggaccaacgagtgccaggggacaatgtgggcgccaacttcgccaccagccgggtccagcagccccagccagcccacctggaagtcctccttgtattcctccctcgcctactctgaggccttccactacagcttcgcagcccggccccgccgcctcacgcagcttgcgctggcgcagcgtcccgagcctcagctgcttcgtctgcgcccctcctcgctgcgcacccaagatatctcgcacttgctcaccggcgtcttccgcaacttgtactcagccgaggtcatcggcgacgaagtgagcgcaagcttgatcaaggcccgcggcagcgagaatgagcgccacgaggagttcgtggaccagctgcagcagattcgggagctctataagcagcggctggatgagtttgaaatgttggagagacatatcactcaggcccaagcacgggctattgcggaaaatgagcgggtcatgagccaggctggagtacaggacctcgagagccttgtcaggttgcctccagtgaagagtgtctccagatggtgtatagacagcgagttgctacggaaacatcatttgatctccccagaagattactacaccgatacagtgccgtttcactctgcacctaaaggcatctccctacctggatgttcaaaactgacatttagctgtgagaagcgttccgtccagaagaaagagctgaacaagaagcttgaagattcatgcaggaagaagcttgctgagttcgaagatgagttagaccacactgtggacagcctgacatggaatttaactcctaaggccaaagaaaggaccagagaacctctcaagaaagcaagtcaaccaaggaataaaaactggatgaaccacttacgtgtgccacagagagagctagacagacttctgcttgccagaatggagagtcggaaccacttcctaaaaaatccccgtttttttcctcctaacactcgatatggaggcaagtctcttgtttttcctccaaagaagccagcaccgataggagaattccagagtacagagccagaacagagttgtgctgatactccagtgtttctagctaagccaccaattgggtttttcacagattatgaaattggtccagtttatgagatggtaattgcgctgcagaacaccaccacgaccagccgctacctgcgagtcctcccgccttccacgccatacttcgctctgggactggggatgttcccaggaaaaggtggaatggtggctcctggaatgacctgccagtacattgtccagttttttcccgactgccttggggattttgatgattttattttagtggagacccagtcagcccacacacttctgatccccctgcaggcccggaggccgccccccgtgctgacattgtcaccggtgttggactgtggttactgcctcattgggggagtcaagatgaccagattcatctgcaaaaatgtgggtttcagtgttggcaggttctgcattatgcccaaaacaagctggccaccactaagtttcaaggccattgcaaccgtcggctttgttgaacaacctccttttggaatcctgccttcggtgtttgagctggccccgggacatgctatattagtggaggtcttgttttccccaaagagcctaggaaaggcagagcagaccttcatcatcatgtgcgacaactgccagataaaggagctggtgaccataggaattgggcagctgattgctttggatctgatctatatttctggtgaaaaaagccagccagaccctggagagctcacagacttaacagcccagcacttcatacgatttgagcctgaaaaccttcggtccacggctaggaagcagctgattattagaaatgctacgcacgtggagctggccttctactggcagatcatgaagcccaacctgcagcccctcatgcctggagaaaccttcagcatggacagcatcaagtgctaccccgacaaggagactgccttctccatcatgcccagaaagggggttctaagcccccacacagaccacgagttcatcctgagcttttctcctcatgagctgagggattttcacagtgtgctccagatggtgctagaggaagtcccagagcctgtaagttcagaagcggagagcctggggcactcctcctactctgtggatgatgtgattgtcctggaaatcgaggtgaaaggctcagtagaacctttccaggttctcttagagccatatgccctcatcatcccaggggagaactacattgggataaatgtgaagaaggcttttaagatgtggaacaacagcaagtcacccatcagatacctgtgggggaagatcagcgactgccacatcattgaagtggagcccggcacaggggtcatagagcccagtgaggtcggggattttgagttgaactttactgggggtgtccctggccccacaagccaggacctgctgtgtgaaatcgaagactcgccctcgccagtggtgttacacattgaggctgtctttaaggggcctgccctcatcatcaacgtctcagcccttcagtttggtctgctccgcctggggcagaaagccacaaactccatccagatccggaacgtcagccagctcccagccacatggcgcatgaaggagagcccagtctccctccaggaaaggcctgaggatgtgtctcccttcgacattgagccttcgagtggccagcttcactctctgggggagtgcagggtggacatcaccttggaggccctgcactgccagcatctggagaccgtcctggagctggaggtggaaaatggtgcctggagctaccttcctgtgtatgctgaggtacagaagccccatgtgtacctacagagcagccaggtggaggttagaaatctctacctgggtgtgcccacgaagacaaccatcacacttatcaatggcacgctcctgcctacccagttccactggggcaagctcctcggacaccaagcagaattctgcatggtgacagtctcccccaaacatggcctgctgggcccaagtgaggagtgccagctcaagttggagttgactgctcatacccaggaagagctgacccatctggccctcccttgtcacgtgtcaggcatgaagaagccactggttctaggcatttctgggaagccccagggactgcaagtggccattaccatctctaaggagagctctgattgcagcacagagcagtggccaggccacccaaaggagctccgcctggactttggctcagcggtgccactgaggacccgtgtgactcgccagctcattctcaccaatcgctccccaatacggacccgtttctccctcaagtttgagtatttcgggagcccccaaaacagcctgagcaaaaagaccagccttcccaacatgcctcctgccctgctaaagacagtgcggatgcaagagcacctggccaagcgagagcagctggattttatggagagcatgctatcccacgggaaaggagctgctttcttccctcacttttcccagggcatgctggggccctaccagcagctgtgcattgacatcacaggctgtgccaacatgtggggcgagtactgggacaacctcatctgcacggtgggagacctgctgccggaagtcatcccagtgcacatggcagcggtgggctgccccatcagctccctgaggaccacctcctacactattgaccaggcccagaaggaaccagccatgaggttcggcacccaggtctccggaggagacacagttacccgaacccttcgcctgaataactccagcccctgtgacatccgcctggattgggagacctatgttccagaagacaaggaagaccggctggtggagctgctggtgttttatgggccacctttcccgctgcgggaccaagccgggaatgagcttgtgtgccctgatacccctgagggtggctgcctcctctggtccccaggcccctccagttcatcggaattcagccatgaaactgactcatcagttgagggcagctccagtgccagcaatagggtggcacagaagctcatctcagtcatcctgcaggcacatgagggggtgccctccggccacctgtactgtatcagccccaagcaggtggtggtccctgctgggggcagcagtaccatctacatctccttcacccctatggtgctcagccctgagatcctgcacaaggtggagtgtactggctacgccctgggtttcatgagcttggacagcaaggtggaaagggagattccagggaagaggcatcgcctgcaggactttgcggtgggacccctgaaactggacctgcatagctacgtgaggcctgcacagctaagtgtggagctggactacggcggcagtatggaattccagtgccaggccagtgacctcattcccgagcagccctgctctggggtgctgagtgagctggtgaccacccaccacctgaagctgaccaacactacagagatcccacactacttccggcttatggtctccaggcccttctccgtttctcaagatggggcgagccaggaccacagagctcctggccctggccagaagcaggagtgtgaggaggagacagcctcagcggacaagcagctggtgctccaagcacaggagaacatgctggtgaacgtgtccttctcactctccctggagctgctctcctatcagaagctcccagctgaccagacactgcctggggtggacattcagcagagtgcgagtggagagagagagatggtgtttactcagaacctgctcctggagtacaccaaccagaccactcaggtggtgcccctgcgggctgtggtggccgtgcctgagctgcagctctccaccagctgggtggactttgggacctgctttgtgagccagcagcgagtccgggaggtctacctgatgaacctgagcgggtgccgaagctactggactatgctgatgggccagcaggagccagccaaggccgctgtggccttcagggtctccccaaacagtgggctgctagaagcacgatccgccaatgcacccccaacctccatcgccttgcaggttttcttcactgccaggagtagtgagctgtacgagtccacgatggtggtggaaggtgtgctcggtgagaagtcctgcaccctgcggctccggggccaaggctcctatgatgagagatacatgttgcctcaccagccctgaggctccgccccagccctcagccccaggccccagctggagaaaaaacattgcccagggattaggagcagctcttcagcacaaagacacagacttggggacctggggacctctgggcagctcctggaatggaagaacccccttccacaatggtctcagcctaggccctcatgatatgtcctcagagctaacataaaggacaggccacaccacagcagagaccaccacattgagatcactactcagtgcatagcgaagaccagtatggcaaaattagtcttggaaaaaaaccacagccactaagataaattcatgcacttttactatgaaaaaaaaaaaaaaaaaa

SEQ ID NO: 343 - protein, 1755 aa, Homo sapiens
METRSSKTRRSLASRTNECQGTMWAPTSPPAGSSSPSQPTWKSSLYSSLAYSEAFHYSFAARPRRLTQLALAQRPEPQLLRLRPSSLRTQDISHLLTGVFRNLYSAEVIGDEVSASLIKARGSENERHEEFVDQLQQIRELYKQRLDEFEMLERHITQAQARAIAENERVMSQAGVQDLESLVRLPPVKSVSRWCIDSELLRKHHLISPEDYYTDTVPFHSAPKGISLPGCSKLTFSCEKRSVQKKELNKKLEDSCRKKLAEFEDELDHTVDSLTWNLTPKAKERTREPLKKASQPRNKNWMNHLRVPQRELDRLLLARMESRNHFLKNPRFFPPNTRYGGKSLVFPPKKPAPIGEFQSTEPEQSCADTPVFLAKPPIGFFTDYEIGPVYEMVIALQNTTTTSRYLRVLPPSTPYFALGLGMFPGKGGMVAPGMTCQYIVQFFPDCLGDFDDFILVETQSAHTLLIPLQARRPPPVLTLSPVLDCGYCLIGGVKMTRFICKNVGFSVGRFCIMPKTSWPPLSFKAIATVGFVEQPPFGILPSVFELAPGHAILVEVLFSPKSLGKAEQTFIIMCDNCQIKELVTIGIGQLIALDLIYISGEKSQPDPGELTDLTAQHFIRFEPENLRSTARKQLIIRNATHVELAFYWQIMKPNLQPLMPGETFSMDSIKCYPDKETAFSIMPRKGVLSPHTDHEFILSFSPHELRDFHSVLQMVLEEVPEPVSSEAESLGHSSYSVDDVIVLEIEVKGSVEPFQVLLEPYALIIPGENYIGINVKKAFKMWNNSKSPIRYLWGKISDCHIIEVEPGTGVIEPSEVGDFELNFTGGVPGPTSQDLLCEIEDSPSPVVLHIEAVFKGPALIINVSALQFGLLRLGQKATNSIQIRNVSQLPATWRMKESPVSLQERPEDVSPFDIEPSSGQLHSLGECRVDITLEALHCQHLETVLELEVENGAWSYLPVYAEVQKPHVYLQSSQVEVRNLYLGVPTKTTITLINGTLLPTQFHWGKLLGHQAEFCMVTVSPKHGLLGPSEECQLKLELTAHTQEELTHLALPCHVSGMKKPLVLGISGKPQGLQVAITISKESSDCSTEQWPGHPKELRLDFGSAVPLRTRVTRQLILTNRSPIRTRFSLKFEYFGSPQNSLSKKTSLPNMPPALLKTVRMQEHLAKREQLDFMESMLSHGKGAAFFPHFSQGMLGPYQQLCIDITGCANMWGEYWDNLICTVGDLLPEVIPVHMAAVGCPISSLRTTSYTIDQAQKEPAMRFGTQVSGGDTVTRTLRLNNSSPCDIRLDWETYVPEDKEDRLVELLVFYGPPFPLRDQAGNELVCPDTPEGGCLLWSPGPSSSSEFSHETDSSVEGSSSASNRVAQKLISVILQAHEGVPSGHLYCISPKQVVVPAGGSSTIYISFTPMVLSPEILHKVECTGYALGFMSLDSKVEREIPGKRHRLQDFAVGPLKLDLHSYVRPAQLSVELDYGGSMEFQCQASDLIPEQPCSGVLSELVTTHHLKLTNTTEIPHYFRLMVSRPFSVSQDGASQDHRAPGPGQKQECEEETASADKQLVLQAQENMLVNVSFSLSLELLSYQKLPADQTLPGVDIQQSASGEREMVFTQNLLLEYTNQTTQVVPLRAVVAVPELQLSTSWVDFGTCFVSQQRVREVYLMNLSGCRSYWTMLMGQQEPAKAAVAFRVSPNSGLLEARSANAPPTSIALQVFFTARSSELYESTMVVEGVLGEKSCTLRLRGQGSYDERYMLPHQP

SEQ ID NO: 344 - DNA, 5508 bp, Homo sapiens
gttagcggcgtctcggttgccatggagaccaggagctccaaaacgcggaggtctttagcgtcccggaccaacgagtgccaggggacaatgtgggcgccaacttcgccaccagccgggtccagcagccccagccagcccacctggaagtcctccttgtattcctccctcgcctactctgaggccttccactacagcttcgcagcccggccccgccgcctcacgcagcttgcgctggcgcagcgtcccgagcctcagctgcttcgtctgcgcccctcctcgctgcgcacccaagatatctcgcacttgctcaccggcgtcttccgcaacttgtactcagccgaggtcatcggcgacgaagtgagcgcaagcttgatcaaggcccgcggcagcgagaatgagcgccacgaggagttcgtggaccagctgcagcagattcgggagctctataagcagcggctggatgagtttgaaatgttggagagacatatcactcaggcccaagcacgggctattgcggaaaatgagcgggtcatgagccaggctggagtacaggacctcgagagccttgtcaggttgcctccagtgaagagtgtctccagatggtgtatagacagcgagttgctacggaaacatcatttgatctccccagaagattactacaccgatacagtgccgtttcactctgcacctaaaggcatctccctacctggatgttcaaaactgacatttagctgtgagaagcgttccgtccagaagaaagagctgaacaagaagcttgaagattcatgcaggaagaagcttgctgagttcgaagatgagttagaccacactgtggacagcctgacatggaatttaactcctaaggccaaagaaaggaccagagaacctctcaagaaagcaagtcaaccaaggaataaaaactggatgaaccacttacgtgtgccacagagagagctagacagacttctgcttgccagaatggagagtcggaaccacttcctaaaaaatccccgtttttttcctcctaacactcgatatggaggcaagtctcttgtttttcctccaaagaagccagcaccgataggagaattccagagtacagagccagaacagagttgtgctgatactccagtgtttctagctaagccaccaattgggtttttcacagattatgaaattggtccagtttatgagatggtaattgcgctgcagaacaccaccacgaccagccgctacctgcgagtcctcccgccttccacgccatacttcgctctgggactggggatgttcccaggaaaaggtggaatggtggctcctggaatgacctgccagtacattgtccagttttttcccgactgccttggggattttgatgattttattttagtggagacccagtcagcccacacacttctgatccccctgcaggcccggaggccgccccccgtgctgacattgtcaccggtgttggactgtggttactgcctcattgggggagtcaagatgaccagattcatctgcaaaaatgtgggtttcagtgttggcaggttctgcattatgcccaaaacaagctggccaccactaagtttcaaggccattgcaaccgtcggctttgttgaacaacctccttttggaatcctgccttcggtgtttgagctggccccgggacatgctatattagtggaggtcttgttttccccaaagagcctaggaaaggcagagcagaccttcatcatcatgtgcgacaactgccagataaaggagctggtgaccataggaattgggcagctgattgctttggatctgatctatatttctggtgaaaaaagccagccagaccctggagagctcacagacttaacagcccagcacttcatacgatttgagcctgaaaaccttcggtccacggctaggaagcagctgattattagaaatgctacgcacgtggagctggccttctactggcagatcatgaagcccaacctgcagcccctcatgcctggagaaaccttcagcatggacagcatcaagtgctaccccgacaaggagactgccttctccatcatgcccagaaagggggttctaagcccccacacagaccacgagttcatcctgagcttttctcctcatgagctgagggattttcacagtgtgctccagatggtgctagaggaagtcccagagcctgtaagttcagaagcggagagcctggggcactcctcctactctgtggatgatgtgattgtcctggaaatcgaggtgaaaggctcagtagaacctttccaggttctcttagagccatatgccctcatcatcccaggggagaactacattgggataaatgtgaagaaggcttttaagatgtggaacaacagcaagtcacccatcagatacctgtgggggaagatcagcgactgccacatcattgaagtggagcccggcacaggggtcatagagcccagtgaggtcggggattttgagttgaactttactgggggtgtccctggccccacaagccaggacctgctgtgtgaaatcgaagactcgccctcgccagtggtgttacacattgaggctgtctttaaggggcctgccctcatcatcaacgtctcagcccttcagtttggtctgctccgcctggggcagaaagccacaaactccatccagatccggaacgtcagccagctcccagccacatggcgcatgaaggagagcccagtctccctccaggaaaggcctgaggatgtgtctcccttcgacattgagccttcgagtggccagcttcactctctgggggagtgcagggtggacatcaccttggaggccctgcactgccagcatctggagaccgtcctggagctggaggtggaaaatggtgcctggagctaccttcctgtgtatgctgaggtacagaagccccatgtgtacctacagagcagccaggtggaggttagaaatctctacctgggtgtgcccacgaagacaaccatcacacttatcaatggcacgctcctgcctacccagttccactggggcaagctcctcggacaccaagcagaattctgcatggtgacagtctcccccaaacatggcctgctgggcccaagtgaggagtgccagctcaagttggagttgactgctcatacccaggaagagctgacccatctggccctcccttgtcacgtgtcaggcatgaagaagccactggttctaggcatttctgggaagccccagggactgcaagtggccattaccatctctaaggagagctctgattgcagcacagagcagtggccaggccacccaaaggagctccgcctggactttggctcagcggtgccactgaggacccgtgtgactcgccagctcattctcaccaatcgctccccaatacggacccgtttctccctcaagtttgagtatttcgggagcccccaaaacagcctgagcaaaaagaccagccttcccaacatgcctcctgccctgctaaagacagtgcggatgcaagagcacctggccaagcgagagcagctggattttatggagagcatgctatcccacgggaaaggagctgctttcttccctcacttttcccagggcatgctggggccctaccagcagctgtgcattgacatcacaggctgtgccaacatgtggggcgagtactgggacaacctcatctgcacggtgggagacctgctgccggaagtcatcccagtgcacatggcagcggtgggctgccccatcagctccctgaggaccacctcctacactattgaccaggcccagaaggaaccagccatgaggttcggcacccaggtctccggaggagacacagttacccgaacccttcgcctgaataactccagcccctgtgacatccgcctggattgggagacctatgttccagaagacaaggaagaccggctggtggagctgctggtgttttatgggccacctttcccgctgcgggaccaagccgggaatgagcttgtgtgccctgatacccctgagggtggctgcctcctctggtccccaggcccctccagttcatcggaattcagccatgaaactgactcatcagttgagggcagctccagtgccagcaatagggtggcacagaagctcatctcagtcatcctgcaggcacatgagggggtgccctccggccacctgtactgtatcagccccaagcaggtggtggtccctgctgggggcagcagtaccatctacatctccttcacccctatggtgctcagccctgagatcctgcacaaggtggagtgtactggctacgccctgggtttcatgagcttggacagcaaggtggaaagggagattccagggaagaggcatcgcctgcaggactttgcggtgggacccctgaaactggacctgcatagctacgtgaggcctgcacagctaagtgtggagctggactacggcggcagtatggaattccagtgccaggccagtgacctcattcccgagcagccctgctctggggtgctgagtgagctggtgaccacccaccacctgaagctgaccaacactacagagatcccacactacttccggcttatggtctccaggcccttctccgtttctcaagatggggcgagccaggaccacagagctcctggccctggccagaagcaggagtgtgaggaggagacagcctcagcggacaagcagctggtgctccaagcacaggagaacatgctggtgaacgtgtccttctcactctccctggagctgctctcctatcagaagctcccagctgaccagacactgcctggggtggacattcagcagagtgcgagtggagagagagagatggtgtttactcagaacctgctcctggagtacaccaaccagaccactcaggtggtgcccctgcgggctgtggtggccgtgcctgagctgcagctctccaccagctgggtggactttgggacctgctttgtgagccagcagcgagtccgggaggtctacctgatgaacctgagcgggtgccgaagctactggactatgctgatgggagtagtgagctgtacgagtccacgatggtggtggaaggtgtgctcggtgagaagtcctgcaccctgcggctccggggccaaggctcctatgatgagagatacatgttgcctcaccagccctgaggctccgccccagccctcagccccaggccccagctggagaaaaaacattgcccagggattaggagcagctcttcagcacaaagacacagacttggggacctggggacctctgggcagctcctggaatggaagaacccccttccacaatggtctcagcctaggccctcatgatatgtcctcagagctaacataaaggacaggccacaccacagcagagaccaccacattgagatcactactcagtgcatagcgaagaccagtatggcaaaattagtcttggaaaaaaaccacagccactaagataaattcatgcacttttactatgaaaaaaaaaaaaaaaaaa

SEQ ID NO: 345 - protein, 1778 aa, Homo sapiens
METRSSKTRRSLASRTNECQGTMWAPTSPPAGSSSPSQPTWKSSLYSSLAYSEAFHYSFAARPRRLTQLALAQRPEPQLLRLRPSSLRTQDISHLLTGVFRNLYSAEVIGDEVSASLIKARGSENERHEEFVDQLQQIRELYKQRLDEFEMLERHITQAQARAIAENERVMSQAGVQDLESLVRLPPVKSVSRWCIDSELLRKHHLISPEDYYTDTVPFHSAPKGISLPGCSKLTFSCEKRSVQKKELNKKLEDSCRKKLAEFEDELDHTVDSLTWNLTPKAKERTREPLKKASQPRNKNWMNHLRVPQRELDRLLLARMESRNHFLKNPRFFPPNTRYGGKSLVFPPKKPAPIGEFQSTEPEQSCADTPVFLAKPPIGFFTDYEIGPVYEMVIALQNTTTTSRYLRVLPPSTPYFALGLGMFPGKGGMVAPGMTCQYIVQFFPDCLGDFDDFILVETQSAHTLLIPLQARRPPPVLTLSPVLDCGYCLIGGVKMTRFICKNVGFSVGRFCIMPKTSWPPLSFKAIATVGFVEQPPFGILPSVFELAPGHAILVEVLFSPKSLGKAEQTFIIMCDNCQIKELVTIGIGQLIALDLIYISGEKSQPDPGELTDLTAQHFIRFEPENLRSTARKQLIIRNATHVELAFYWQIMKPNLQPLMPGETFSMDSIKCYPDKETAFSIMPRKGVLSPHTDHEFILSFSPHELRDFHSVLQMVLEEVPEPVSSEAESLGHSSYSVDDVIVLEIEVKGSVEPFQVLLEPYALIIPGENYIGINVKKAFKMWNNSKSPIRYLWGKISDCHIIEVEPGTGVIEPSEVGDFELNFTGGVPGPTSQDLLCEIEDSPSPVVLHIEAVFKGPALIINVSALQFGLLRLGQKATNSIQIRNVSQLPATWRMKESPVSLQERPEDVSPFDIEPSSGQLHSLGECRVDITLEALHCQHLETVLELEVENGAWSYLPVYAEVQKPHVYLQSSQVEVRNLYLGVPTKTTITLINGTLLPTQFHWGKLLGHQAEFCMVTVSPKHGLLGPSEECQLKLELTAHTQEELTHLALPCHVSGMKKPLVLGISGKPQGLQVAITISKESSDCSTEQWPGHPKELRLDFGSAVPLRTRVTRQLILTNRSPIRTRFSLKFEYFGSPQNSLSKKTSLPNMPPALLKTVRMQEHLAKREQLDFMESMLSHGKGAAFFPHFSQGMLGPYQQLCIDITGCANMWGEYWDNLICTVGDLLPEVIPVHMAAVGCPISSLRTTSYTIDQAQKEPAMRFGTQVSGGDTVTRTLRLNNSSPCDIRLDWETYVPEDKEDRLVELLVFYGPPFPLRDQAGNELVCPDTPEGGCLLWSPGPSSSSEFSHETDSSVEGSSSASNRVAQKLISVILQAHEGVPSGHLYCISPKQVVVPAGGSSTIYISFTPMVLSPEILHKVECTGYALGFMSLDSKVEREIPGKRHRLQDFAVGPLKLDLHSYVRPAQLSVELDYGGSMEFQCQASDLIPEQPCSGVLSELVTTHHLKLTNTTEIPHYFRLMVSRPFSVSQDGASQDHRAPGPGQKQECEEETASADKQLVLQAQENMLVNVSFSLSLELLSYQKLPADQTLPGVDIQQSASGEREMVFTQNLLLEYTNQTTQVVPLRAVVAVPELQLSTSWVDFGTCFVSQQRVREVYLMNLSGCRSYWTMLMGVVSCTSPRWWWKVCSVRSPAPCGSGAKAPMMRDTCCLTSPEAPPQPSAPGPSWRKNIAQGLGAALQHKDTDLGTWGPLGSSWNGRTPFHNGLSLGPHDMSSELT

SEQ ID NO: 346 - DNA, 1695 bp, Homo sapiens
atgtggttctgcgcgtgtgcggacggctgtctgttaactccgcggtcagttcccggactggtggctggtctgcagggttgacctgcgcaatgcagaggctgcaggtagtgctgggccacctgaggggtccggccgattccggctggatgccgcaggccgcgccttgcctgagcggtgccccgcaggcctcggccgcggacgtggtggtggtgcacgggcggcgcacggccatctgccgggcgggccgcggcggcttcaaggacaccacccccgacgagcttctctcggcagtcatgaccgcggttctcaaggacgtgaatctgaggccggaacagctgggggacatctgtgtcggaaatgtgctgcagcctggggccggggcaatcatggcccgaatcgcccagtttctgagtgacatcccggagactgtgcctttgtccactgtcaatagacagtgttcgtcggggctacaggcagtggccagcatagcaggtggcatcagaaatgggtcttatgacattggcatggcctgtggggtggagtccatgtccctggctgacagagggaaccctggaaatattacttcgcgcttgatggagaaggagaaggccagagattgcctgattcctatggggataacctctgagaatgtggctgagcggtttggcatttcacgggagaagcaggatacctttgccctggcttcccagcagaaggcagcaagagcccagagcaagggctgtttccaagctgagattgtgcctgtgaccaccacggtccatgatgacaagggcaccaagaggagcatcactgtgacccaggatgagggtatccgccccagcaccaccatggagggcctggccaaactgaagcctgccttcaagaaagatggttctaccacagctggaaactctagccaggtgagtgatggggcagctgccatcctgctggcccggaggtccaaggcagaagagttgggccttcccatccttggggtcctgaggtcttatgcagtggttggggtcccacctgacatcatgggcattggacctgcctatgccatcccagtagctttgcaaaaagcagggctgacagtgagtgacgtggacatcttcgagatcaatgaggcctttgcaagccaggctgcctactgtgtggagaagctacgactcccccctgagaaggtgaaccccctggggggtgcagtggccttagggcacccactgggctgcactggggcacgacaggtcatcacgctgctcaatgagctgaagcgccgtgggaagagggcatacggagtggtgtccatgtgcatcgggactggaatgggagccgctgccgtctttgaataccctgggaactgagtgaggtcccaggctggaggcgctacgcagacagtcctgctgctctagcagcaaggcagtaacaccacaaaagcaaaaccacatgggaaaactcagcactggtggtggtggcagtggacagatcaaggcacttcaactcatttggaaaatgtgaacactgatgacatggtataggagtgggtggggtgttgagccacccatcagaccctctttagctgtgcaagataaaagcagcctgggtcacccaggccacaaggccatggttaattcttaaggcaaggcaaatccatggatgagaagtgcaatgggcatagtaaaagtgcatgaattt

SEQ ID NO: 347 - protein, 424 aa, Homo sapiens
MQRLQVVLGHLRGPADSGWMPQAAPCLSGAPQASAADVVVVHGRRTAICRAGRGGFKDTTPDELLSAVMTAVLKDVNLRPEQLGDICVGNVLQPGAGAIMARIAQFLSDIPETVPLSTVNRQCSSGLQAVASIAGGIRNGSYDIGMACGVESMSLADRGNPGNITSRLMEKEKARDCLIPMGITSENVAERFGISREKQDTFALASQQKAARAQSKGCFQAEIVPVTTTVHDDKGTKRSITVTQDEGIRPSTTMEGLAKLKPAFKKDGSTTAGNSSQVSDGAAAILLARRSKAEELGLPILGVLRSYAVVGVPPDIMGIGPAYAIPVALQKAGLTVSDVDIFEINEAFASQAAYCVEKLRLPPEKVNPLGGAVALGHPLGCTGARQVITLLNELKRRGKRAYGVVSMCIGTGMGAAAVFEYPGN

SEQ ID NO: 348 - DNA, 2826 bp, Homo sapiens
tcgagacctcaagggtagaggtgggcacccccgcctccgcacttttgctcggggctccagattgtagggcagggcggcgcttctcggaaagcgaaagccggcggggcggggcgggtgccgcaggagaaagaggaagcgctggcagacaatgcgacccgaccgcgctgaggctccaggaccgcccgccatggctgcaggaggtcccggcgcggggtctgcggccccggtctcctccacatcctcccttcccctggctgctctcaacatgcgagtgcggcgccgcctgtctctgttcttgaacgtgcggacacaggtggcggccgactggaccgcgctggcggaggagatggactttgagtacttggagatccggcaactggagacacaagcggaccccactggcaggctgctggacgcctggcagggacgccctggcgcctctgtaggccgactgctcgagctgcttaccaagctgggccgcgacgacgtgctgctggagctgggacccagcattgaggaggattgccaaaagtatatcttgaagcagcagcaggaggaggctgagaagcctttacaggtggccgctgtagacagcagtgtcccacggacagcagagctggcgggcatcaccacacttgatgaccccctggggcatatgcctgagcgtttcgatgccttcatctgctattgccccagcgacatccagtttgtgcaggagatgatccggcaactggaacagacaaactatcgactgaagttgtgtgtgtctgaccgcgatgtcctgcctggcacctgtgtctggtctattgctagtgagctcatcgaaaagaggtgccgccggatggtggtggttgtctctgatgattacctgcagagcaaggaatgtgacttccagaccaaatttgcactcagcctctctccaggtgcccatcagaagcgactgatccccatcaagtacaaggcaatgaagaaagagttccccagcatcctgaggttcatcactgtctgcgactacaccaacccctgcaccaaatcttggttctggactcgccttgccaaggccttgtccctgccctgaagactgttctgaggccctgggtgtgtgtgtatctgtctgcctgtccatgtacttctgccctgcctcctcctttcgttgtaggaggaatctgtgctctacttacctctcaattcctggagatgccaacttcacagacacgtctgcagcagctggacatcacatttcatgtcctgcatggaaccagtggctgtgagtggcatgtccacttgctggattatcagccaggacactatagaacaggaccagctgagactaagaaggaccagcagagccagctcagctctgagccattcacacatcttcaccctcagtttcctcacttgaggagtgggatggggagaacagagagtagctgtgtttgaatccctgtaggaaatggtgaagcatagctctgggtctcctgggggagaccaggcttggctgcgggagagctggctgttgctggactacatgctggccactgctgtgaccacgacactgctggggcagcttcttccacagtgatgcctactgatgcttcagtgcctctgcacaccgcccattccacttcctccttccccacagggcaggtggggaagcagtttggcccagcccaaggagaccccaccttgagccttatttcctaatgggtccacctctcatctgcatctttcacacctcccagcttctgcccaaccttcagcagtgacaagtccccaagagactcgcctgagcagcttgggctgcttttcatttccacctgtcaggatgcctgtggtcatgctctcagctccacctggcatgagaagggatcctggcctctggcatattcatcaagtatgagttctggggatgagtcactgtaatgatgtgagcagggagccttcctccctgggccacctgcagagagctttcccaccaactttgtaccttgattgccttacaaagttatttgtttacaaacagcgaccatataaaagcctcctgccccaaagcttgtgggcacatgggcacatacagactcacatacagacacacacatatatgtacagacatgtactctcacacacacaggcaccagcatacacacgtttttctaggtacagctcccaggaacagctaggtgggaaagtcccatcactgagggagcctaaccatgtccctgaacaaaaattgggcactcatctattccttttctcttgtgtccctactcattgaaaccaaactctggaaaggacccaatgtaccagtatttatacctctaatgaagcacagagagaggaagagagctgcttaaactcacacaacaatgaactgcagacacagctgttctctccctctctccttcccagagcaatttatactttaccctcaggctgtcctctggggagaaggtgccatggtcttaggtgtctgtgccccaggacagaccctaggaccctaaatccaatagaaaatgcatatctttgctccactttcagccaggctggagcaaggtaccttttcttaggatcttgggagggaatggatgcccctctctgcatgatcttgttgaggcatttagctgccatgcacctgtccccctttaatactgggcattttaaagccatctcaagaggcatcttctacatgttttgtacgcattaaaataatttcaaagatatctgagaaaagccgatatttgccattcttcctatatcctggaatatatcttgcatcctgagtttataataataaataatattctaccttggaaaaaaaaaaaaaaa

SEQ ID NO: 349 - protein, 296 aa, Homo sapiens
MAAGGPGAGSAAPVSSTSSLPLAALNMRVRRRLSLFLNVRTQVAADWTALAEEMDFEYLEIRQLETQADPTGRLLDAWQGRPGASVGRLLELLTKLGRDDVLLELGPSIEEDCQKYILKQQQEEAEKPLQVAAVDSSVPRTAELAGITTLDDPLGHMPERFDAFICYCPSDIQFVQEMIRQLEQTNYRLKLCVSDRDVLPGTCVWSIASELIEKRCRRMVVVVSDDYLQSKECDFQTKFALSLSPGAHQKRLIPIKYKAMKKEFPSILRFITVCDYTNPCTKSWFWTRLAKALSLP

SEQ ID NO: 350 - DNA, 4525 bp, Homo sapiens
ttggcccgtgcgtggggctggggtggagggcgggacagaggggctgggcccaggcaaagcttctgtcgctgctgctgcggaggccgaggacaggacgtgggctgggccgggcagtgccggactcggaggagcaggaggcgaggtccgccggagctctgagcccccgctgctctgccgcgcggtgaccccgcgccccggcgccgtccgacccgtggctgttccgagacgattggtgggggcgcggcggcggcggcggcggctgttgggggtggggagacgcgcggcgaggagacgagcgaggtcagcgagtttgagggaggaccgcgagccgctgccgccgtcatgtccgaggactcgagcgccctgccctggtccatcaacagggacgattacgagctgcaggaggtgatcgggagtggagcaactgctgtagtccaagcagcttattgtgcccctaaaaaggagaaagtggcaatcaaacggataaaccttgagaaatgtcaaactagcatggatgaactcctgaaagaaattcaagccatgagtcaatgccatcatcctaatattgtatcttactacacatcttttgtggtaaaagatgagctgtggcttgtcatgaagctgctaagtggaggttctgttctggatattattaagcacattgtggcaaaaggggaacacaaaagtggagtcctagatgaatctaccattgctacgatactccgagaagtactggaagggctggaatatctgcataaaaatggacagatccacagagatgtgaaagctggaaacattcttcttggagaagatggctcagtacagattgcagactttggggttagtgcttttttagcaactggtggtgatattacccgaaataaagtgagaaagacctttgttggcaccccttgttggatggcacctgaagttatggaacaggtccgtggttatgatttcaaagctgatatttggagttttggaattacagcaattgaattggctacaggggcggctccttatcataaatatccaccaatgaaggttttaatgctgacactgcagaacgatcctccttctttggaaactggtgttcaagataaagaaatgctgaaaaaatatggaaaatcatttagaaaaatgatttcattgtgccttcaaaaagatccagaaaaaagaccaacagcagcagaactattaaggcacaaatttttccagaaagcaaagaataaagaatttcttcaagaaaaaacattgcagagagcaccaaccatttctgaaagagcaaaaaaggttcggagagtaccaggttccagtgggcgtcttcataagacagaggatggaggctgggagtggagtgatgatgaatttgatgaagaaagtgaggaagggaaagcagcaatttcacaactcaggtctccccgagtgaaagaatcaatatcaaattctgagctctttccaacaactgatcctgtgggtactttgctccaagttccagaacagatctctgctcatctacctcagccagctgggcagattgctacacagccaactcaagtctctctcccacccaccgcagagccagcaaaaacagctcaggctttgtcttcaggatcaggttcacaagaaaccaagatcccaatcagtctagtactaagattaaggaattccaaaaaagaactaaatgatattcgatttgaatttactcctgggagagatacagcagagggtgtctctcaggaactcatttctgctggcctggtcgacggaagggatttagtaatagtggcagctaatttgcagaaaattgtggaagaacctcagtcaaatcgatctgtcactttcaaactggcatctggtgtcgaaggctcagatattcctgatgatggtaaactgataggatttgcccagctcagcatcagctaaaccacaaccctggaagaggcggcctaaggagattccacacatgcgtatctctgttgcttctattggcctaaacccactactgccaaagaacccagcaacaaacctcccggctaggagctttagaagtctttatgttcttcctgccatcattcctccttttcccacagggaaagaaaagttggatcactagtggccagcatccccagagttccgttagtaaacttacttcatatgtcccctgtcttcctccatctgagaagtggcccatgtgcttcaaggcccaggagggagatctgtcagctcattcttgccttactccaatgatggcccaggtggaaaagtagcagctgtatcgggcttcctcatcctgcctgttcccccacacctgccaggatatggacatcttgggatatctctttaccactgaagtagaattgattgttcagctggagcccagagaatttaatttaatgttttttctttgtacctgatgtgaattctagcaacctttgttaggaaaaagcacagcctcagatggaggcagcctaaactgtgttcttgttttgttcatggtgtttctaagcgttttgctgaagctgctctcaggcacccccttcttcattgctctctccagaaagggttgctagccttaacttcagctggtgcaaaacatctgactgtagccgaacttcagccatcagatccttcaaagtggaactttggattgtttttacagacaacatcgagtaatggcttgtaaatgtgaattttgccagaggtggtttttgaacaggaaaatcataattcatatcattggagaagtatttattttcaaatatcaaattgaagaaaaactcaatcctcccatgaaaatcagttcgcctggcctccaagtcgtgaggaaatgggtatgcaaggctgagatttctacagcaataaaggagacacacactgggccagagaggcctgccttctgcctgctctcctgcactgaccctttggagggggtctctgtgtgctgaagctaactcaagatggaaagtgaaaccacatgtgccgtgacctttaggttttatgagtagacagtgttcatttgattttctacagaaataatataaattattctttaggtttaaaaaagagcactcataatgcaatatgtgaataatcagtgaggttgatttttcttttttcctaccgtttcatagtctttgtctaactgctagtaaccctaccgagttttatatatgagtgggatactcaatctggccttaaaaagatacacaaagatgggctgtgggtccctggaaagggggagagttgccctttacagaatcactcgagccctttccagcactgttggtctgatgaacaaggttgttttaccttattttctcttggaacatatctgaaaaccttccccacaaataacttgtcacaccttttgtttcattctgagtctttagttttagtcatgggctttcttcacctgctctaggtgcaaaggcatgttgggaaagagatggatgttggggaggaagagaggagatggatttcagttgggagttaggaggagagtaggtgagatgatcagacaccggagttcaacgtcccagcagtcttggtaaaaggagggagcctgctgagccaggagggagaaaagaagattgaccagcttgctagaaaaatacttagcttttctttttctttttttgtggaggggggacggagaggaacaaggatggggaggtaggaatgaggtatagaaaagagatagcatcttctttggcacaagactagtggcttaccgcttaccttagagttttgttttttttttttcaaacccatcaaaatctacttatttatgaatccaaggggtggcagcatcactctgttctagcattctttgtggagatggtctggtgcctagctgggagtgagcagcagcccatcccctgttcactttctctagcccatcattacctgtgaactgcagtggggcagtcatggcaaatagaattgggctggggtttctccttcttttcagttcattgtttgccctgctaggaattagaagacagacaccatgtcccaggacagtgttacttcttctgcatgatgtgtggtagactccctttgctggcttgtgcagtgatactgagaaaatacatgaacagaaactgcccaggtggaacagcacgtaacctagtgagtgactgtactcctttctaggaatgctgattcagagtgcacctctttgactaggtcccaggatccccttgtccctggagtagggactaactatagcacaaagtaatatgtgccaatgctatttgtgaaatgtttggtctttctaaacgactaaaggatttgttgggtttttgcttaagttttgaaccaaatcctagagccagctgataatatttaataatctggaggagagaataatgatgtaccaataagtggagattcctccttatgatgtatgctaggttatggaagatgtaaaatattcaactttttcctcctttttttggactttgtattttactgcatgttttcttcatttttaatcaataaagagtaaattgtccttaaa

SEQ ID NO: 351 - protein, 527 aa, Homo sapiens
MSEDSSALPWSINRDDYELQEVIGSGATAVVQAAYCAPKKEKVAIKRINLEKCQTSMDELLKEIQAMSQCHHPNIVSYYTSFVVKDELWLVMKLLSGGSVLDIIKHIVAKGEHKSGVLDESTIATILREVLEGLEYLHKNGQIHRDVKAGNILLGEDGSVQIADFGVSAFLATGGDITRNKVRKTFVGTPCWMAPEVMEQVRGYDFKADIWSFGITAIELATGAAPYHKYPPMKVLMLTLQNDPPSLETGVQDKEMLKKYGKSFRKMISLCLQKDPEKRPTAAELLRHKFFQKAKNKEFLQEKTLQRAPTISERAKKVRRVPGSSGRLHKTEDGGWEWSDDEFDEESEEGKAAISQLRSPRVKESISNSELFPTTDPVGTLLQVPEQISAHLPQPAGQIATQPTQVSLPPTAEPAKTAQALSSGSGSQETKIPISLVLRLRNSKKELNDIRFEFTPGRDTAEGVSQELISAGLVDGRDLVIVAANLQKIVEEPQSNRSVTFKLASGVEGSDIPDDGKLIGFAQLSIS

SEQ ID NO: 352 - DNA, 2555 bp, Homo sapiens
acagagctaccctagtgtccccaggctgaggaggtagtgactggcatacatggctcagtttgtccaggtcctggctgaaataggtgactttggtcgcttccagatacagctattgatcctgctgtgtgttctcaacttcctgtctcccttctacttttttgcccatgtcttcatggtcctagatgagccccaccactgtgcagtggcttgggtgaagaaccacactttcaacctgagtgctgctgaacagctggtactgagcgtgcccctggacactgcaggtcacccagagccctgcctcatgttccggccaccccccgccaatgccagcctgcaggacatcctcagccaccgcttcaatgagacgcagccttgtgatatgggctgggaatatcctgagaacaggctcccatccctgaagaatgagttcaacctggtttgtgatcggaagcacctgaaggacaccacacagtcagtgttcatggctgggctccttgttggcaccctcatgtttgggcccctctgcgaccggattggccgcaaggccacaatcctggcgcagctgctcctcttcaccctcatcggcctggccacagcttttgtgcccagctttgagctctacatggccctgcgctttgctgtggctactgccgtcgctggacttagcttcagcaatgtcaccctactgacagaatgggtggggccctcatggaggacgcaggccgtggtcctggcccagtgcaacttctccctcgggcagatggtgcttgcgggactcgcctacggtttccgcaactggaggctccttcagatcaccggcactgcgcctggcttactgctcttcttctacttctgggctctgccagaatctgcacgttggctcctgacccgtgggaggatggacgaggcgatacaactgatccagaaggcggcctcggtcaataggcggaaactctccccggagctcatgaaccagctggtcccagagaagacaggcccctcagggaatgccctggatctgttcagacacccccagctccggaaggtgaccctgattatcttctgtgtctggtttgtggacagtctggggtactacggcctgagcctccaagtgggggacttcggcctggacgtctatctgacgcagctcatctttggagctgttgaggtgcctgcccgctgttccagcatcttcatgatgcagaggtttggccgcaagtggagccagttggggaccttggtcttgggtggcctgatgtgtatcatcatcatcttcatcccagcagatctgcccgtggtggtcaccatgctggctgtggtggggaagatggccacagctgctgcctttaccatctcctatgtgtactctgccgagcttttccccaccatcctccggcagacaggcatggggctggtgggcatcttctcacggatcgggggcatcctcacaccacttgtgatcctgctgggagagtaccacgctgccctccccatgctcatctacggcagcctccccatcgtggccggcctgctgtgcaccctgctgccagagacgcatggccagggcctgaaagacaccctccaggacctggagctggggcctcacccacggtcccccaaatcagtgccctcagagaaggaaacagaggccaagggaagaacttccagcccgggagtggcctttgtgagcagcacatacttctgattgaggtctctaagagctggaccatcagcagcagggagctgcctaaacacctccttggatatggccaggacccacagggacacagggcaagaccagccttgcttatggaggcaggacaccacaatctggcccatggctgtcacctcctgccgagtccaatcccagactgggaaccaccatctgagacaggacctcccggcctccttcacctttctcatctccagagccctgcccccaatactctgtctgggttaggatcttgggtatgtcttggaattaacttgtcctctaacaatcttcatggggtatggctctcttgatctcctcaatctggagtcccctgccctcaaaacacagtgatgttcagaacagaacacaaggtaagccctttccaatttgtgggaacaggaggggagaggaaacaaatgtgaagttgtggactctacccaggcaggtggatgaaaatgctgtggataaaaggaaggttatgattccttctagcggatggaccagattcctctggctaacgtatggccccataggtcactgggtcatacagagagaagattcagttcagcctaaatcaaaacttccaccttgtgttcacttcaaagatggcccaacccccgccctacactcagctcatgcctaacctatgtgtggctcagggaccagcttggggaaggaaaggaggtttgttctgctccccgcctcaccccgcctcctcctgctcatgctcagctgcttctggaccttccagggcccatgcagggtgagggaaagggtagaggtcttttcaccgagctgctgctggttgcagttctttctggtgcacattggctaatgccag

SEQ ID NO: 353 - protein, 551 aa, Homo sapiens
MAQFVQVLAEIGDFGRFQIQLLILLCVLNFLSPFYFFAHVFMVLDEPHHCAVAWVKNHTFNLSAAEQLVLSVPLDTAGHPEPCLMFRPPPANASLQDILSHRFNETQPCDMGWEYPENRLPSLKNEFNLVCDRKHLKDTTQSVFMAGLLVGTLMFGPLCDRIGRKATILAQLLLFTLIGLATAFVPSFELYMALRFAVATAVAGLSFSNVTLLTEWVGPSWRTQAVVLAQCNFSLGQMVLAGLAYGFRNWRLLQITGTAPGLLLFFYFWALPESARWLLTRGRMDEAIQLIQKAASVNRRKLSPELMNQLVPEKTGPSGNALDLFRHPQLRKVTLIIFCVWFVDSLGYYGLSLQVGDFGLDVYLTQLIFGAVEVPARCSSIFMMQRFGRKWSQLGTLVLGGLMCIIIIFIPADLPVVVTMLAVVGKMATAAAFTISYVYSAELFPTILRQTGMGLVGIFSRIGGILTPLVILLGEYHAALPMLIYGSLPIVAGLLCTLLPETHGQGLKDTLQDLELGPHPRSPKSVPSEKETEAKGRTSSPGVAFVSSTYF

SEQ ID NO: 354 - DNA, 1977 bp, Homo sapiens
ggctcccatgctggtctctgatgtttaggaagtggtgtcagcagagactgagctgcaccctttctttggacagatggcaggagaggagaacttcaaggaagagctcagatcccaggatgcttccaggaacttgaaccagcatgaggtagcaggacatccacattcctggtctctggagatgctgttacgcagattgagggctgtccacaccaagcaggatgacaagtttgccaacctcctggatgcggtgggggagtttggcacattccagcagaggctagtagccctcacctttatccccagcatcatgtcggccttcttcatgtttgctgaccacttcgtgttcacagcccagaagccctattgcaataccagctggatcctggcagtgggcccccacctgtccaaagctgagcagctgaatctgaccataccccaagcacccaatggcagtttcctgacatgcttcatgtaccttcctgtgccttggaatctggattctatcatccagtttggcctcaatgacacagacacatgccaagatgggtggatctatcctgacgctaagaagcgatcgctgatcaatgagtttgacttggtatgtggcatggagacgaagaaggacactgcacagatcatgttcatggcagggctcccgataggctctctcatcttcaggctcataactgacaagatgggccgctaccctgccatcctgctgtcactgctggggctgatcatcttcggctttgggacagccttcatgaacagctttcacctgtatttgttctttcgctttggcatctcgcagtcagtggtgggctacgccatcagcagcatttctttggccactgagtggttagtgggtgagcaccgggcccatgccattatcctgggacactgctttttcgctgttggggccgtgttgctgacagggatcgcctacagtcttccccactggcagctgctgtttctggtgggtgggatacttgtgatccccttcatctcctatatctggattctcccggagtccccgcggtggctgatgatgaaagggaaggtgaaggaggccaagcaggtgctgtgctacgccgcaagtgtgaacaagaagaccattccttcaaatctgctggacgagctgcagctgcccagaaagaaggtgactcgggcctctgtcctggacttctgtaagaataggcagctctgcaaggtgaccttggtgatgagctgtgtgtggtttaccgtcagttacacctattttacgttgagcctgagaatgagagagctgggcgtgagcgtccacttcagacacgtggtccccagcatcatggaggtgcctgcccggctgtgctgcatctttctcctccagcagattgggaggaagtggagcctggctgtgactctcctccaagccatcatctggtgcttgcttctccttttcctccctgaaggggaggatggcctcagactcaagtggccacgttgtccggccacagagctgaaatccatgacgatcttggtgctcatgctcagagagttcagcctggccgccactgtcactgtgttcttcctctacaccgctgagctcctccccactgtgctcagggcgacaggtctggggctggtgtctctggcctcggtggctggagccatcttgtccctgacaatcatcagccagaccccctccctcctgcccatctttctctgctgcgtcttagccatcgtggccttttccctctcctccctgctgccggaaacgcgagatcagcccctctccgagagcctgaaccactcctcacagataaggaataaggtcaaggacatgaagactaaggaaacatcatctgatgatgtctgaggaagcggccaagaatgtcattctcaatgcccagatcctgagattggacccataccctgtctccaaccctgccttgaagcaattcaataaagaggaagcaaacagccaggctccctgag

SEQ ID NO: 355 - protein, 594 aa, Homo sapiens
MAGEENFKEELRSQDASRNLNQHEVAGHPHSWSLEMLLRRLRAVHTKQDDKFANLLDAVGEFGTFQQRLVALTFIPSIMSAFFMFADHFVFTAQKPYCNTSWILAVGPHLSKAEQLNLTIPQAPNGSFLTCFMYLPVPWNLDSIIQFGLNDTDTCQDGWIYPDAKKRSLINEFDLVCGMETKKDTAQIMFMAGLPIGSLIFRLITDKMGRYPAILLSLLGLIIFGFGTAFMNSFHLYLFFRFGISQSVVGYAISSISLATEWLVGEHRAHAIILGHCFFAVGAVLLTGIAYSLPHWQLLFLVGGILVIPFISYIWILPESPRWLMMKGKVKEAKQVLCYAASVNKKTIPSNLLDELQLPRKKVTRASVLDFCKNRQLCKVTLVMSCVWFTVSYTYFTLSLRMRELGVSVHFRHVVPSIMEVPARLCCIFLLQQIGRKWSLAVTLLQAIIWCLLLLFLPEGEDGLRLKWPRCPATELKSMTILVLMLREFSLAATVTVFFLYTAELLPTVLRATGLGLVSLASVAGAILSLTIISQTPSLLPIFLCCVLAIVAFSLSSLLPETRDQPLSESLNHSSQIRNKVKDMKTKETSSDDV

SEQ ID NO: 356 - DNA, 522 bp, Homo sapiens
atgtccacatctgctcaggtgaatgtatccttctcgctctccctggagctgctctcctatcagaagctcccagccaaccagatgctgcctggggtggacattcagcagagcgcgagtggagagagagagatggtgtttactcagaacctgctcctggagcacaccaaccagaccactcaggtgctgctcctgcaggccatagtgaccgtgcctgagctgcagctctccaccagctgggtggactttaggacctgctttgtgagccagcaacgagtctgggaggtctacctaatgcacctgagcagctgccgaagttactggggccttcttgctggagcagtaagctatacaaggccacgttggtggtgcaagaagtgcttggcaagaaggtctgtaccctgtggttctggggccaagagtcttaggatgactagagatacctgtcccctcaccagctctgaggctctgccctatccctcagccccagcccgcagctatggaataaacatggcccagggctga

SEQ ID NO: 357 - protein, 173 aa, Homo sapiens
MSTSAQVNVSFSLSLELLSYQKLPANQMLPGVDIQQSASGEREMVFTQNLLLEHTNQTTQVLLLQAIVTVPELQLSTSWVDFRTCFVSQQRVWEVYLMHLSSCRSYWGLLAGAVSYTRPRWWCKKCLARRSVPCGSGAKSLRMTRDTCPLTSSEALPYPSAPARSYGINMAQG

SEQ ID NO: 358 - DNA, 3694 bp, Homo sapiens
cagtccggccgggcggagctaggggcgggcccctgcgtctctgggcgctggagcgcggcgactatcacgccgcgtggcggacggacggactgacggacgcgcagccttacccgaaaggccatggcggagcacgcccctcgccgctgctgcctgggctgggacttcagcacgcagcaggtaaaggttgttgctgttgatgcagagttgaatgtcttctatgaggaaagtgtgcattttgacagagatcttccagaatttgggactcagggcggtgttcatgtgcacaaggatgggctgacggtcacttctccagtactaatgtgggtccaggcactggatatcatcttggagaagatgaaggcttcgggcttcgacttctctcaagtcctagccttgtccggggcgggccagcaacacggaagtatatactggaaggctggagcccagcaggcactgacaagcttatcaccagacctccggctacaccagcagcttcaggactgtttctccatcagcgactgcccggtgtggatggactccagcaccacagcccagtgccgccagctggaggctgctgtgggtggtgctcaggctctcagctgcctcacggggtcccgtgcctatgagcgttttacagggaaccaaattgcaaaaatttaccagcagaaccccgaggcctactcacatacagagagaatttctttggtcagtagctttgctgcttccctgttccttggctcttactcccctattgactacagtgatggttctggaatgaatttgttgcagatacaggataaagtctggtcccaggcttgccttggtgcctgtgcacctcatttagaggagaagcttagcccaccagtaccatcatgctcagttgtgggagccatttcttcctactacgtccagcgctacggatttcctccaggatgcaaagtggtggccttcactggggacaacccagcgtcgctggcaggcatgagactggaggaaggtgacattgcggtcagcctgggcaccagtgacaccctgtttctctggctccaagagcccatgcctgccctggaaggccacatcttctgcaacccggttgactcccagcactacatggcactcctgtgctttaaaaatggctccctcatgagagagaagatccgcaacgagtctgtatcccgttcctggagcgatttctctaaggcactgcagtccacagagatgggcaacggtggaaacctgggtttttattttgatgtaatggagatcacccctgaaattattggacgtcataggtttaacacagaaaaccacaaggttgcagcattccctggggatgtggaggttcgagcactaattgaaggacaattcatggccaagaggattcacgcagaaggcctgggctatcgagtcatgtccaagacaaagattttggccacaggaggagcatctcacaatagagaaatcttacaggtgcttgcagatgtgtttgatgccccggtgtatgttatagacactgccaactcggcctgtgtgggttctgcataccgagcttttcatggtcttgcaggtggaacagatgtgcccttttcagaggttgtgaagttagctccaaatcccagactagctgctaccccaagcccgggagcttctcaggtctacgaggcccttctcccccagtatgccaaactcgagcagagaatcttgtctcagacccgggggcctccggagtgaacaggcatccctgttgcccctgcctgcccagatttactgaccccatttgtcgacatggccccagacaggagggatccacttctctgttctgaacagctcttcctgcccctactgactccttggagtgtccaggaccatcttaaagccgccctcagcacatctgcatgaagatagataggcactcctgtccctgtgcccgtgtgccccagggcaggaaagcatctctcttttcctgtcttttatcccaggaggcaggacaacactgagactgggatatgtccaataaaaactatgacttttccccttgcagaggcagaattaaagctaatctagggactcaaatcagcagaatgggggagacaaagcccggtctcaccccctaacctcatcctatctctttctccaaccctgactgcccactcctccacaaaccgtgacccatagccgcccccaccccataccttgatctaccatccatcctcttccccaatccaaaccccacagtctcttctctcccacaccctgccctccttgtttcagctgtctgaggtgcctcgcagggcctctcttacttgccccatgctcaccctttccatgctgtccccattctctcctttcaccatctctcctctccccctccttcatctctcctccctccccaaactcacttggcataattcacaacctcccacccaaacaatgggcctggtggacgtgcttcctgtgccctccctttagctatgcccacagatcactgagagggaccatctcccaagtggtgcagtttagaacttctctccctttttctccctcattccctctctcttcttgcagtccacttgctgaagaagttgtgtcatttctctggaagaatttccaaaattctggatttcttttttattttggagtatttcatcagctgaaaagtgattctcactttgagttttcttcctatatttgtatagtgagttcctttttccttcctctttatccctcctgttttactttatacctctctattccttgctcaaattattgcaaaagcctctatagaaagtcctctgtgatctgactcctgcagactcttccagatttttctgcccaaggcctttactgagctcaggactccagctaaatcaaaatacgcatgttctcacccagagtgacaaaatcctgcagataggtttaagacctagtggctcagagcagtagctactgggaagttaaaaggaaggggcttagaaaatgaatgggaccaaaggcatcacttctgatggagatgaagccatcttgaaagtgagtggtgtcctttggaggcatggtggatgaaaggcgcaaaggaagcaagaggttaaagataatggcccattagatacaacagcaagcccaagattccgaagaagacagacaactccccctagtaccacctagacattactttttaaagacattttacattattgtccagcagaaaaaggctgtcttggaccatgaaacagtaaactgtaactaaacacttcaacatgaatttgaaaataaataattgtggatataaaagaacaccagagatcagaaattcaaaaactcagaataaaaatgaaaaagctacaagcatatatgagaagagaactgactgaacttgggaaataatttgaacaaaaagataaatcttcacagatatgaatactaaattatatcttaatgaaaatagatatggtcacaagtacattaaggcacgtagaaggtaggagtaagaaaagctaagagaagcaaaacaaacaaagcaatattaaaggaagagccaaaaagacccagaaataaaatgacagataaagaagattgtcaaagaaaagatgatacaggtaagattggaactcatgaagacaaaagataagacagtggcatagagttaatatttaaaattcaaatattaaaactcaaataaaccccaaagaacttttgg

SEQ ID NO: 359 - protein, 536 aa, Homo sapiens
MAEHAPRRCCLGWDFSTQQVKVVAVDAELNVFYEESVHFDRDLPEFGTQGGVHVHKDGLTVTSPVLMWVQALDIILEKMKASGFDFSQVLALSGAGQQHGSIYWKAGAQQALTSLSPDLRLHQQLQDCFSISDCPVWMDSSTTAQCRQLEAAVGGAQALSCLTGSRAYERFTGNQIAKIYQQNPEAYSHTERISLVSSFAASLFLGSYSPIDYSDGSGMNLLQIQDKVWSQACLGACAPHLEEKLSPPVPSCSVVGAISSYYVQRYGFPPGCKVVAFTGDNPASLAGMRLEEGDIAVSLGTSDTLFLWLQEPMPALEGHIFCNPVDSQHYMALLCFKNGSLMREKIRNESVSRSWSDFSKALQSTEMGNGGNLGFYFDVMEITPEIIGRHRFNTENHKVAAFPGDVEVRALIEGQFMAKRIHAEGLGYRVMSKTKILATGGASHNREILQVLADVFDAPVYVIDTANSACVGSAYRAFHGLAGGTDVPFSEVVKLAPNPRLAATPSPGASQVYEALLPQYAKLEQRILSQTRGPPE

SEQ ID NO: 360 - DNA, 3720 bp, Homo sapiens
aggatacagcggcttctgcgcgacttataagagctccttgtgcggcgccattttaagcctctcggtctgtggcagcagcgttggcccggccccgggagcggagagcgaggggaggcggagacggaggaaggtctgaggagcagcttcagtccccgccgagccgccaccgcaggtcgaggacggtcggactcccgcggcgggaggagcctgttcccctgagggtatttgaagtataccatacaactgttttgaaaatccagcgtggacaatggctactcaagctgatttgatggagttggacatggccatggaaccagacagaaaagcggctgttagtcactggcagcaacagtcttacctggactctggaatccattctggtgccactaccacagctccttctctgagtggtaaaggcaatcctgaggaagaggatgtggatacctcccaagtcctgtatgagtgggaacagggattttctcagtccttcactcaagaacaagtagctgatattgatggacagtatgcaatgactcgagctcagagggtacgagctgctatgttccctgagacattagatgagggcatgcagatcccatctacacagtttgatgctgctcatcccactaatgtccagcgtttggctgaaccatcacagatgctgaaacatgcagttgtaaacttgattaactatcaagatgatgcagaacttgccacacgtgcaatccctgaactgacaaaactgctaaatgacgaggaccaggtggtggttaataaggctgcagttatggtccatcagctttctaaaaaggaagcttccagacacgctatcatgcgttctcctcagatggtgtctgctattgtacgtaccatgcagaatacaaatgatgtagaaacagctcgttgtaccgctgggaccttgcataacctttcccatcatcgtgagggcttactggccatctttaagtctggaggcattcctgccctggtgaaaatgcttggttcaccagtggattctgtgttgttttatgccattacaactctccacaaccttttattacatcaagaaggagctaaaatggcagtgcgtttagctggtgggctgcagaaaatggttgccttgctcaacaaaacaaatgttaaattcttggctattacgacagactgccttcaaattttagcttatggcaaccaagaaagcaagctcatcatactggctagtggtggaccccaagctttagtaaatataatgaggacctatacttacgaaaaactactgtggaccacaagcagagtgctgaaggtgctatctgtctgctctagtaataagccggctattgtagaagctggtggaatgcaagctttaggacttcacctgacagatccaagtcaacgtcttgttcagaactgtctttggactctcaggaatctttcagatgctgcaactaaacaggaagggatggaaggtctccttgggactcttgttcagcttctgggttcagatgatataaatgtggtcacctgtgcagctggaattctttctaacctcacttgcaataattataagaacaagatgatggtctgccaagtgggtggtatagaggctcttgtgcgtactgtccttcgggctggtgacagggaagacatcactgagcctgccatctgtgctcttcgtcatctgaccagccgacaccaagaagcagagatggcccagaatgcagttcgccttcactatggactaccagttgtggttaagctcttacacccaccatcccactggcctctgataaaggctactgttggattgattcgaaatcttgccctttgtcccgcaaatcatgcacctttgcgtgagcagggtgccattccacgactagttcagttgcttgttcgtgcacatcaggatacccagcgccgtacgtccatgggtgggacacagcagcaatttgtggagggggtccgcatggaagaaatagttgaaggttgtaccggagcccttcacatcctagctcgggatgttcacaaccgaattgttatcagaggactaaataccattccattgtttgtgcagctgctttattctcccattgaaaacatccaaagagtagctgcaggggtcctctgtgaacttgctcaggacaaggaagctgcagaagctattgaagctgagggagccacagctcctctgacagagttacttcactctaggaatgaaggtgtggcgacatatgcagctgctgttttgttccgaatgtctgaggacaagccacaagattacaagaaacggctttcagttgagctgaccagctctctcttcagaacagagccaatggcttggaatgagactgctgatcttggacttgatattggtgcccagggagaaccccttggatatcgccaggatgatcctagctatcgttcttttcactctggtggatatggccaggatgccttgggtatggaccccatgatggaacatgagatgggtggccaccaccctggtgctgactatccagttgatgggctgccagatctggggcatgcccaggacctcatggatgggctgcctccaggtgacagcaatcagctggcctggtttgatactgacctgtaaatcatcctttaggtaagaagttttaaaaagccagtttgggtaaaatacttttactctgcctacagaacttcagaaagacttggttggtagggtgggagtggtttaggctatttgtaaatctgccacaaaaacaggtatatactttgaaaggagatgtcttggaacattggaatgttctcagatttctggttgttatgtgatcatgtgtggaagttattaactttaatgttttttgccacagcttttgcaacttaatactcaaatgagtaacatttgctgttttaaacattaatagcagcctttctctctttatacagctgtattgtctgaacttgcattgtgattggcctgtagagttgctgagagggctcgaggggtgggctggtatctcagaaagtgcctgacacactaaccaagctgagtttcctatgggaacaattgaagtaaactttttgttctggtcctttttggtcgaggagtaacaatacaaatggattttgggagtgactcaagaagtgaagaatgcacaagaatggatcacaagatggaatttatcaaaccctagccttgcttgttaaatttttttttttttttttttaagaatatctgtaatggtactgactttgcttgctttgaagtagctctttttttttttttttttttttttttgcagtaactgttttttaagtctctcgtagtgttaagttatagtgaatactgctacagcaatttctaatttttaagaattgagtaatggtgtagaacactaattcataatcactctaattaattgtaatctgaataaagtgtaacaattgtgtagcctttttgtataaaatagacaaatagaaaatggtccaattagtttcctttttaatatgcttaaaataagcaggtggatctatttcatgtttttgatcaaaaactatttgggatatgtatgggtagggtaaatcagtaagaggtgttatttggaaccttgttttggacagtttaccagttgccttttatcccaaagttgttgtaacctgctgtgatacgatgcttcaagagaaaatgcggttataaaaaatggttcagaattaaacttttaattcattcgattg

SEQ ID NO: 361 - protein, 781 aa, Homo sapiens
MATQADLMELDMAMEPDRKAAVSHWQQQSYLDSGIHSGATTTAPSLSGKGNPEEEDVDTSQVLYEWEQGFSQSFTQEQVADIDGQYAMTRAQRVRAAMFPETLDEGMQIPSTQFDAAHPTNVQRLAEPSQMLKHAVVNLINYQDDAELATRAIPELTKLLNDEDQVVVNKAAVMVHQLSKKEASRHAIMRSPQMVSAIVRTMQNTNDVETARCTAGTLHNLSHHREGLLAIFKSGGIPALVKMLGSPVDSVLFYAITTLHNLLLHQEGAKMAVRLAGGLQKMVALLNKTNVKFLAITTDCLQILAYGNQESKLIILASGGPQALVNIMRTYTYEKLLWTTSRVLKVLSVCSSNKPAIVEAGGMQALGLHLTDPSQRLVQNCLWTLRNLSDAATKQEGMEGLLGTLVQLLGSDDINVVTCAAGILSNLTCNNYKNKMMVCQVGGIEALVRTVLRAGDREDITEPAICALRHLTSRHQEAEMAQNAVRLHYGLPVVVKLLHPPSHWPLIKATVGLIRNLALCPANHAPLREQGAIPRLVQLLVRAHQDTQRRTSMGGTQQQFVEGVRMEEIVEGCTGALHILARDVHNRIVIRGLNTIPLFVQLLYSPIENIQRVAAGVLCELAQDKEAAEAIEAEGATAPLTELLHSRNEGVATYAAAVLFRMSEDKPQDYKKRLSVELTSSLFRTEPMAWNETADLGLDIGAQGEPLGYRQDDPSYRSFHSGGYGQDALGMDPMMEHEMGGHHPGADYPVDGLPDLGHAQDLMDGLPPGDSNQLAWFDTDL

SEQ ID NO: 362 - DNA, 2572 bp, Homo sapiens
gttgtcgctgttgcagccgagttcagccgggagcagagcgaaccgcaccggcccgagcggagcgccgcacgttcccaaccgcgaggccagacatctgactgttggtgtgagaccagtgctcctggtggtgtgccctgagccatggaggcgcctttgcagacagagatggtggagctggtgcccaatggcaaacactcagaggggctgctcccggtcatcacccccatggcaggcaaccagagggtcgaggaccctgcacggagctgtatggagggcaagagcttcctacagaaaagtcccagcaaggagccacacttcactgacttcgaggggaagacatcattcgggatgtcagtgttcaacctcagcaatgccatcatgggcagcggcatcctgggactcgcctatgccatggccaatacgggcattatccttttcctgttcctgttgacagctgtcgccttgctctccagctactccatccacctgctactcaagtcctcaggggtcgtgggcatccgtgcctatgagcagctgggctaccgtgcctttgggaccccaggaaagctggcagcagccctggccatcacgctccagaacatcggagccatgtccagctacctgtacatcatcaagtctgagctgccacttgtcatacagaccttcctgaacctggaggagaaaacctcggactggtacatgaacgggaactacctggtaatccttgtctctgtcaccatcattctgcccctggcactgatgcggcagcttggctacctgggctactccagcggcttctctcttagctgcatggtgttcttcctaattgcagtcatctacaaaaagttccacgtgccctgcccactgccccccaacttcaacaacaccacaggcaacttcagccacgtggagatcgtgaaggagaaggtgcagctgcaggtcgagcctgaggcttcagccttctgcactcccagctacttcacgctcaactcacagacagcatacaccatccccatcatggccttcgccttcgtctgccaccccgaggtgctgcccatctatactgagctcaaggacccctccaagaagaagatgcagcacatctccaacctgtccatcgctgtcatgtacatcatgtacttcctggctgccctcttcggctacctcaccttctacaacggggtggagtcggagctgctgcacacctacagcaaggtggacccgtttgacgtcctgatcctgtgtgtgcgcgtggccgtgctgacagcagtcacgctcacagtgcccatcgttctgttcccggtgcgccgcgccatccagcagatgctgtttccaaaccaggagttcagctggctgcggcatgtgcttattgccgttggcctgctcacttgtatcaacctgctggtcatctttgcccccaacatcctgggcatctttggggtcatcggtgccacatctgccccattcctcatcttcatcttccctgccatcttctacttccgaatcatgcccacggagaaggagcctgcaagatccacccccaaaatcctggccctgtgttttgctatgcttggcttcttgctgatgaccatgagcttgagcttcatcatcattgactgggcctcagggaccagccggcatggaggaaaccactagggtgaccctcatcctgttctgtctactcaccctagcagccctgcccagactcttcagcccctgctcccatccagtggccagtcgggggaggagaaagacgcgattaacactgtggcattcagccaggccccatgtcctctctgtggaaggtttttgttcaagagccaggaccaaggcccttgggccactaccctgctaggctctggagctgtagaggcttcctgaactgggagcagggtagggctgtcgccttagatcccgcccaagcccctcattccctccttgcacagatgcatacactggggcccagcagctgcctcctgaggtgacacagcctgtaggaacatacacagctgggatcagcctgcagccatcccccgaccctgctgctaggccacggtctgcgccctggggcctcatctcccccagcccacttgttttccccccttttattccctaggcccttttcagactcctgggcccttggatactcttctcccatctcccttcacaggatgacaccctcccataccccatagctggggccagcaggttctgctgagggtggggctggtgtagggacccccaagagacccctgtcctgtcccttcaccagtcctggggaggctgggactccccctgccacaagcctgggccacagctcacattccactgctgggagaagaaacaggccgaggcccagagtggcctgcccccgggagccaaagaccccagtggccacactgggatagggtggggaggctggcagccctcttttataaatattatacataagaaaaaaaaaaaaaaaaaaaaaaaaaaaaaaaaaaaaaaaaaaaaaaaaaaaaaaaaaaaaaaaaaaaaaaaaaaaaaaaaaaaaaaaaaaaaaaaaaaaaaaaaaaaaaaaaaaaaaaaa

SEQ ID NO: 363 - protein, 504 aa, Homo sapiens
MEAPLQTEMVELVPNGKHSEGLLPVITPMAGNQRVEDPARSCMEGKSFLQKSPSKEPHFTDFEGKTSFGMSVFNLSNAIMGSGILGLAYAMANTGIILFLFLLTAVALLSSYSIHLLLKSSGVVGIRAYEQLGYRAFGTPGKLAAALAITLQNIGAMSSYLYIIKSELPLVIQTFLNLEEKTSDWYMNGNYLVILVSVTIILPLALMRQLGYLGYSSGFSLSCMVFFLIAVIYKKFHVPCPLPPNFNNTTGNFSHVEIVKEKVQLQVEPEASAFCTPSYFTLNSQTAYTIPIMAFAFVCHPEVLPIYTELKDPSKKKMQHISNLSIAVMYIMYFLAALFGYLTFYNGVESELLHTYSKVDPFDVLILCVRVAVLTAVTLTVPIVLFPVRRAIQQMLFPNQEFSWLRHVLIAVGLLTCINLLVIFAPNILGIFGVIGATSAPFLIFIFPAIFYFRIMPTEKEPARSTPKILALCFAMLGFLLMTMSLSFIIIDWASGTSRHGGNH

SEQ ID NO: 364 - DNA, 2200 bp, Homo sapiens
actgccgacccgagtgcttcccgcagagggctggtggtgggagcggagtgggtcgggcggggccgagccgggccgtgggccgtgtgggggccgggcggcggccgggccggcggacggcgggatgggctgcaccgtgagcgccgaggacaaggcggcggccgagcgctctaagatgatcgacaagaacctgcgggaggacggagagaaggcggcgcgggaggtgaagttgctgctgttgggtgctggggagtcagggaagagcaccatcgtcaagcagatgaagatcatccacgaggatggctactccgaggaggaatgccggcagtaccgggcggttgtctacagcaacaccatccagtccatcatggccattgtcaaagccatgggcaacctgcagatcgactttgccgacccctccagagcggacgacgccaggcagctatttgcactgtcctgcaccgccgaggagcaaggcgtgctccctgatgacctgtccggcgtcatccggaggctctgggctgaccatggtgtgcaggcctgctttggccgctcaagggaataccagctcaacgactcagctgcctactacctgaacgacctggagcgtattgcacagagtgactacatccccacacagcaagatgtgctacggacccgcgtaaagaccacggggatcgtggagacacacttcaccttcaaggacctacacttcaagatgtttgatgtgggtggtcagcggtctgagcggaagaagtggatccactgctttgagggcgtcacagccatcatcttctgcgtagccttgagcgcctatgacttggtgctagctgaggacgaggagatgaaccgcatgcatgagagcatgaagctattcgatagcatctgcaacaacaagtggttcacagacacgtccatcatcctcttcctcaacaagaaggacctgtttgaggagaagatcacacacagtcccctgaccatctgcttccctgagtacacaggggccaacaaatatgatgaggcagccagctacatccagagtaagtttgaggacctgaataagcgcaaagacaccaaggagatctacacgcacttcacgtgcgccaccgacaccaagaacgtgcagttcgtgtttgacgccgtcaccgatgtcatcatcaagaacaacctgaaggactgcggcctcttctgaggggcagcggggcctggcgggatgggccaccgccgactttgtaccccccaacccctgaggaagatgggggcaagaagatcacgctccccgcctgttcccccgccgcttttctcctctttcctctctttgttctcagctccccctgtcccctcagctccagacgtaggggaggggttgccacaggcctccctgtttgaagcctgcccttgtctgagatgctggtaatggccatggtacccccttctgggcatctgttctggtttttaaccattgtcttgttctgtgatgaggggaggggggcacatgctgagtctcccaaggctgcgtctggaggggcccctgcttctccagcctggacccccagctttgcccaacaccagcccctgccccagcccaagtccaaatgtttacagggagcctcctgcccagtcccccaaccccagccgctcggaggccccaaaggaaaaagcacaagaagcgtgagacgccaccattcctggaaaccacagtccacctgctcattctcgtagctttttaaaaaaatgaaagtaaaggaaaaaaaaaaaactgcaaatctagaaaactttttagagaaaaactatttaaaactgtcagatcctgaccagcaagcccccccccagccccccttccaagtgactccgtgccttgagtgtgtctgcgtgtttacacccgtccctctgctggccgcccccgtgcgagcggcacccctgccctgccctccacagaattgggttccaagggctgttccagacaactgccaacgtcactgagggccctgccccagcggccctggccccaggctctattaacctaaaatgtagctccctagcgctaacctaggaaccgccgctgcctgctggggggccacgcccctcatgcccttgtcccaggcccggggccttcagcgttgaacacttccttgcttttttcacatgttttatggaattgttcacctggtttgaaataataaaatgtagaaagaaaaaaaat

SEQ ID NO: 365 - protein, 355 aa, Homo sapiens
MGCTVSAEDKAAAERSKMIDKNLREDGEKAAREVKLLLLGAGESGKSTIVKQMKIIHEDGYSEEECRQYRAVVYSNTIQSIMAIVKAMGNLQIDFADPSRADDARQLFALSCTAEEQGVLPDDLSGVIRRLWADHGVQACFGRSREYQLNDSAAYYLNDLERIAQSDYIPTQQDVLRTRVKTTGIVETHFTFKDLHFKMFDVGGQRSERKKWIHCFEGVTAIIFCVALSAYDLVLAEDEEMNRMHESMKLFDSICNNKWFTDTSIILFLNKKDLFEEKITHSPLTICFPEYTGANKYDEAASYIQSKFEDLNKRKDTKEIYTHFTCATDTKNVQFVFDAVTDVIIKNNLKDCGLF

SEQ ID NO: 366 - DNA, 2986 bp, Homo sapiens
gggcgggggctgcttcttaaaggagccgtcagagggtccccagcggccccagggtgggaaggggccagagtggagagatgctgctgcggaagtcctcggtggagtgtgagaaggcagccagtgttggcctggaagacctctagaacctgagaagaggcagcgatcctggggcagagtccagggcagctcaaggctcctccacacacacacccgctgaaccctgagcaccctgagctgctgagatggggcgggccggggctgccgccgtgatcccgggcctggccctgctctgggcagtggggctggggagtgccgcccccagccccccacgccttcggctctccttccaagagctccaggcctggcatggtctccagactttcagcctggagcgaacctgctgctaccaggccttgctggtggatgaggagcgtggacgcctgtttgtgggtgccgagaaccatgtggcctccctcaacctggacaacatcagcaagcgggccaagaagctggcctggccggcccctgtggaatggcgagaggagtgcaactgggcagggaaggacattggtactgagtgcatgaacttcgtgaagttgctgcatgcctacaaccgcacccatttgctggcctgtggcacgggagccttccacccaacctgtgcctttgtggaagtgggccaccgggcagaggagcccgtcctccggctggacccaggaaggatagaggatggcaaggggaagagtccttatgaccccaggcatcgggctgcctccgtgctggtgggggaggagctatactcaggggtggcagcagacctcatgggacgagactttaccatctttcgcagcctagggcaacgtccaagtctccgaacagagccacacgactcccgctggctcaatgagcccaagtttgtcaaggtattttggatcccggagagcgagaacccagacgacgacaaaatctacttcttctttcgtgagacggcggtagaggcggcgccggcactgggacgcctgtccgtgtcccgcgttggccagatctgccggaacgacgtgggcggccagcgcagcctggtcaacaagtggacgacgttcctgaaggcgcggctggtgtgctcggtgcccggcgtcgagggcgacacccacttcgatcagctccaggatgtgtttctgttgtcctcgcgggaccaccggaccccgctgctctatgccgtcttctccacgtccagcatcttccagggctctgcggtgtgcgtgtacagcatgaacgacgtgcgccgggccttcttgggaccctttgcacacaaggaggggcccatgcaccagtgggtgtcataccagggtcgcgtcccctacccgcggccaggcatgtgccccagcaagacctttggcaccttcagttccaccaaggacttcccagacgatgtcatccagtttgcgcggaaccaccccctcatgtacaactctgtcctgcccactggggggcgccctcttttcctacaagttggagccaattacaccttcactcaaattgccgcggaccgggttgcagccgctgacggacactatgacgtcctcttcattggcacagacgttggcacggtgctgaaggtgatctcggtccccaagggcagtaggcccagcgcagaggggctgctcctggaggagctgcacgtgtttgaggactcggccgctgtcaccagcatgcaaatttcttccaagaggcaccagctgtacgtagcctcgcggagcgcggtggcccagatcgcgttgcaccgctgcgctgcccacggccgcgtctgcaccgaatgctgtctggcgcgtgacccctactgcgcctgggacggggtcgcgtgcacgcgcttccagcccagtgccaagaggcggttccggcggcaagacgtaaggaatggcgaccccagcacgttgtgctccggagactcgtctcgtcccgcgctgctggaacacaaggtgttcggcgtggagggcagcagcgcctttctggagtgtgagccccgctcgctgcaggcgcgcgtggagtggactttccagcgcgcaggggtgacagcccacacccaggtgctggcagaggagcgcaccgagcgcaccgcccggggactactgctgcgcaggctgcggcgccgggactcgggcgtgtacttgtgcgccgccgtcgagcagggctttacgcaaccgctgcgtcgcctgtcgctgcacgtgttgagtgctacgcaggccgaacgactggcgcgggccgaggaggctgcgcccgccgcgccgccgggccccaaactctggtaccgggactttctgcagctggtggagccgggcggaggtggcagcgcgaactccctgcgcatgtgccgcccgcagcctgcgctgcagtcactgcccctggagtcgcggagaaagggccgtaaccggaggacccacgcccctgagcctcgcgctgagcgggggccgcgcagcgcaacgcactggtgaccagactgtccccacgccgggaaccaagcaggagacgacaggcgagagaggagccagacagaccctgaaaagaaggacgggttggggccgggcacattgggggtcaccggccgatggagacaccaaccgacaggccctggctgagggcagctgcgcgggcttatttattaacaggataacccttgaatgtagcagccccgggagggcggcacaggtcgggcgcaggattcagccggagggaagggacggggaagccgagctccagagcaacgaccagggccgaggaggtgcctggagtgcccaccctgggagacagaccccacctccttgggtagtgagcagtgagcagaaagctgtgaacaggctgggctgctggaggtggggcgaggcaggccgactgtactaaagtaacgcaataaacgcattatcagccaaaaaaaaaaaaaaaaaaaaaaaaaaaaaaaaaaaaaaaaaaaaaaaaaaaaaaaaaaaaaaaa

SEQ ID NO: 367 - protein, 748 aa, Homo sapiens
MGRAGAAAVIPGLALLWAVGLGSAAPSPPRLRLSFQELQAWHGLQTFSLERTCCYQALLVDEERGRLFVGAENHVASLNLDNISKRAKKLAWPAPVEWREECNWAGKDIGTECMNFVKLLHAYNRTHLLACGTGAFHPTCAFVEVGHRAEEPVLRLDPGRIEDGKGKSPYDPRHRAASVLVGEELYSGVAADLMGRDFTIFRSLGQRPSLRTEPHDSRWLNEPKFVKVFWIPESENPDDDKIYFFFRETAVEAAPALGRLSVSRVGQICRNDVGGQRSLVNKWTTFLKARLVCSVPGVEGDTHFDQLQDVFLLSSRDHRTPLLYAVFSTSSIFQGSAVCVYSMNDVRRAFLGPFAHKEGPMHQWVSYQGRVPYPRPGMCPSKTFGTFSSTKDFPDDVIQFARNHPLMYNSVLPTGGRPLFLQVGANYTFTQIAADRVAAADGHYDVLFIGTDVGTVLKVISVPKGSRPSAEGLLLEELHVFEDSAAVTSMQISSKRHQLYVASRSAVAQIALHRCAAHGRVCTECCLARDPYCAWDGVACTRFQPSAKRRFRRQDVRNGDPSTLCSGDSSRPALLEHKVFGVEGSSAFLECEPRSLQARVEWTFQRAGVTAHTQVLAEERTERTARGLLLRRLRRRDSGVYLCAAVEQGFTQPLRRLSLHVLSATQAERLARAEEAAPAAPPGPKLWYRDFLQLVEPGGGGSANSLRMCRPQPALQSLPLESRRKGRNRRTHAPEPRAERGPRSATHW

SEQ ID NO: 368 - DNA, 2989 bp, Homo sapiens
gggcgggggctgcttcttaaaggagccgtcagagggtccccagcggccccagggtgggaaggggccagagtggagagatgctgctgcggaagtcctcggtggagtgtgagaaggcagccagtgttggcctggaagacctctagaacctgagaagaggcagcgatcctggggcagagtccagggcagctcaaggctcctccacacacacacccgctgaaccctgagcaccctgagctgctgagatggggcgggccggggctgccgccgtgatcccgggcctggccctgctctgggcagtggggctggggagtgccgcccccagccccccacgccttcggctctccttccaagagctccaggcctggcatggtctccagactttcagcctggagcgaacctgctgctaccaggccttgctggtggatgaggagcgtggacgcctgtttgtgggtgccgagaaccatgtggcctccctcaacctggacaacatcagcaagcgggccaagaagctggcctggccggcccctgtggaatggcgagaggagtgcaactgggcagggaaggacattggtactgagtgcatgaacttcgtgaagttgctgcatgcctacaaccgcacccatttgctggcctgtggcacgggagccttccacccaacctgtgcctttgtggaagtgggccaccgggcagaggagcccgtcctccggctggacccaggaaggatagaggatggcaaggggaagagtccttatgaccccaggcatcgggctgcctccgtgctggtgggggaggagctatactcaggggtggcagcagacctcatgggacgagactttaccatctttcgcagcctagggcaacgtccaagtctccgaacagagccacacgactcccgctggctcaatgagcccaagtttgtcaaggtattttggatcccggagagcgagaacccagacgacgacaaaatctacttcttctttcgtgagacggcggtagaggcggcgccggcactgggacgcctgtccgtgtcccgcgttggccagatctgccggaacgacgtgggcggccagcgcagcctggtcaacaagtggacgacgttcctgaaggcgcggctggtgtgctcggtgcccggcgtcgagggcgacacccacttcgatcagctccaggatgtgtttctgttgtcctcgcgggaccaccggaccccgctgctctatgccgtcttctccacgtccagcagcatcttccagggctctgcggtgtgcgtgtacagcatgaacgacgtgcgccgggccttcttgggaccctttgcacacaaggaggggcccatgcaccagtgggtgtcataccagggtcgcgtcccctacccgcggccaggcatgtgccccagcaagacctttggcaccttcagttccaccaaggacttcccagacgatgtcatccagtttgcgcggaaccaccccctcatgtacaactctgtcctgcccactggggggcgccctcttttcctacaagttggagccaattacaccttcactcaaattgccgcggaccgggttgcagccgctgacggacactatgacgtcctcttcattggcacagacgttggcacggtgctgaaggtgatctcggtccccaagggcagtaggcccagcgcagaggggctgctcctggaggagctgcacgtgtttgaggactcggccgctgtcaccagcatgcaaatttcttccaagaggcaccagctgtacgtagcctcgcggagcgcggtggcccagatcgcgttgcaccgctgcgctgcccacggccgcgtctgcaccgaatgctgtctggcgcgtgacccctactgcgcctgggacggggtcgcgtgcacgcgcttccagcccagtgccaagaggcggttccggcggcaagacgtaaggaatggcgaccccagcacgttgtgctccggagactcgtctcgtcccgcgctgctggaacacaaggtgttcggcgtggagggcagcagcgcctttctggagtgtgagccccgctcgctgcaggcgcgcgtggagtggactttccagcgcgcaggggtgacagcccacacccaggtgctggcagaggagcgcaccgagcgcaccgcccggggactactgctgcgcaggctgcggcgccgggactcgggcgtgtacttgtgcgccgccgtcgagcagggctttacgcaaccgctgcgtcgcctgtcgctgcacgtgttgagtgctacgcaggccgaacgactggcgcgggccgaggaggctgcgcccgccgcgccgccgggccccaaactctggtaccgggactttctgcagctggtggagccgggcggaggtggcagcgcgaactccctgcgcatgtgccgcccgcagcctgcgctgcagtcactgcccctggagtcgcggagaaagggccgtaaccggaggacccacgcccctgagcctcgcgctgagcgggggccgcgcagcgcaacgcactggtgaccagactgtccccacgccgggaaccaagcaggagacgacaggcgagagaggagccagacagaccctgaaaagaaggacgggttggggccgggcacattgggggtcaccggccgatggagacaccaaccgacaggccctggctgagggcagctgcgcgggcttatttattaacaggataacccttgaatgtagcagccccgggagggcggcacaggtcgggcgcaggattcagccggagggaagggacggggaagccgagctccagagcaacgaccagggccgaggaggtgcctggagtgcccaccctgggagacagaccccacctccttgggtagtgagcagtgagcagaaagctgtgaacaggctgggctgctggaggtggggcgaggcaggccgactgtactaaagtaacgcaataaacgcattatcagccaaaaaaaaaaaaaaaaaaaaaaaaaaaaaaaaaaaaaaaaaaaaaaaaaaaaaaaaaaaaaaaa

SEQ ID NO: 369 - protein, 749 aa, Homo sapiens
MGRAGAAAVIPGLALLWAVGLGSAAPSPPRLRLSFQELQAWHGLQTFSLERTCCYQALLVDEERGRLFVGAENHVASLNLDNISKRAKKLAWPAPVEWREECNWAGKDIGTECMNFVKLLHAYNRTHLLACGTGAFHPTCAFVEVGHRAEEPVLRLDPGRIEDGKGKSPYDPRHRAASVLVGEELYSGVAADLMGRDFTIFRSLGQRPSLRTEPHDSRWLNEPKFVKVFWIPESENPDDDKIYFFFRETAVEAAPALGRLSVSRVGQICRNDVGGQRSLVNKWTTFLKARLVCSVPGVEGDTHFDQLQDVFLLSSRDHRTPLLYAVFSTSSSIFQGSAVCVYSMNDVRRAFLGPFAHKEGPMHQWVSYQGRVPYPRPGMCPSKTFGTFSSTKDFPDDVIQFARNHPLMYNSVLPTGGRPLFLQVGANYTFTQIAADRVAAADGHYDVLFIGTDVGTVLKVISVPKGSRPSAEGLLLEELHVFEDSAAVTSMQISSKRHQLYVASRSAVAQIALHRCAAHGRVCTECCLARDPYCAWDGVACTRFQPSAKRRFRRQDVRNGDPSTLCSGDSSRPALLEHKVFGVEGSSAFLECEPRSLQARVEWTFQRAGVTAHTQVLAEERTERTARGLLLRRLRRRDSGVYLCAAVEQGFTQPLRRLSLHVLSATQAERLARAEEAAPAAPPGPKLWYRDFLQLVEPGGGGSANSLRMCRPQPALQSLPLESRRKGRNRRTHAPEPRAERGPRSATHW

SEQ ID NO: 370 - DNA, 1526 bp, Homo sapiens
gctgcatttgtccagtcctgctactggatgccatcattggcccccgactgcccactgcttgccatgcctgaggagacccaagaagactccgtggcgccaatgatgcccagccagaggagcagggggccattggcccccaaccacgtgcatgaggtatgcctgcaccaggtggagtccatcagcgacctacatagtggagcaggcacactgcgcccctatctaactgaagaggcacgaccgtgggatgagctgctgggcgttttgccgccgtcactgtgtgcccaggctggctgcagccctgtgtacagacgaggagggttcctgctgctgctcgcgctgctggtgctcacttgcctagtgctcgcactcctggctgtctacctgagcgtgctgcagagtgaatccctgcgcatcctggcacacacgctccgcacgcaggaggagacactactcaaactccgcttggccagcctcagccagcttcggaggctcaactccagtgaggcccaagcacccagctgagatgccatttggatctggggcctgggggtgtgtgttggggggggaataaagtggctatgggcaggtctctccttccctactgctggctgccacatctacactatttccttggtgagatttttgtacaagaacctgttgttaacttaatggctgcctccctctcctgatctcttcaagccaggcctagccaagcctctggtgccaaagcctcgctttgggtggcccaaggtcaggggaaggggcaccagcctcctggctcctcctgtggcctgtcaacactctctggccaccccagatggcaggttctgaagtctagaaatagctgcccccatagcaatcacccaaactctgccagggctcccagtgagggtccagcctcagctcttaaagacaggctgggctctgagtagggggagaggcaccacctggggaagactgccttggagggcaaaggtgacatcgtggaagaccagttgggcccaagcctgggatagtagatggggagggagaacagaaaaatacccaggggttaagaccacagaaggctgaccgttctgtttaattatctgtaataatccttaaaaatcagcacacaaatccattccaggtagctttgccaccccacctgctgtggtggcatttgtccagatgccaccacccccctaagagtgggtcatcctgggggagcaaggcctgagaaaggaaaggaagggaaaggccccctagtgcctgccccacagccctgaggaaggcacatatttagcctggcctgagacaggacaggaaggggccacagggctgagtgcagggacaaaggggtcagggtcccaagtgtccgggcccccagctacccaccccatgtctgtttttggttttgtcattaaaaaaaataaagtgacaaatactggtggaaaaaaaaaaaaaaaaaaaaaaaaaaaaaaaaaaaaaaaaaaaaaaaaaaaaaaaaaaaaaaaaaaaaaaaaaaaaaaaaaaaaaaaaaaaaa

SEQ ID NO: 371 - protein, 164 aa, Homo sapiens
MPSLAPDCPLLAMPEETQEDSVAPMMPSQRSRGPLAPNHVHEVCLHQVESISDLHSGAGTLRPYLTEEARPWDELLGVLPPSLCAQAGCSPVYRRGGFLLLLALLVLTCLVLALLAVYLSVLQSESLRILAHTLRTQEETLLKLRLASLSQLRRLNSSEAQAPS

SEQ ID NO: 372 - DNA, 2045 bp, Homo sapiens
cgtggatgtgggcctgaatcggatggcctggaactcgccttcccggcgacctgtttggcagggcggggcgcctcgcgaagatggtggcgcgcgtggcgtgtggctcccgtcgtctggccaagtctcagcgcagcgcaccggccggcgtctcgttggcctggagcccacacccaccgggtccctgaccccgcgccccccgcgcccggttcccggcatgcctcgcgcccgtaagggcaacacgctccggaagggtggtcagcgccgtggaggaggtgcccggagcagtgcccaagctgactcgggttccagtgacgatgaggcagccagtgaggcccgcagcaccgccagtgaatgccccagccttctcagcaccactgcagaggacagccttgggggggatgtcgtggatgagcagggccagcaggaagaccttgaggaaaagctgaaggagtatgtggactgtctcacagacaagagtgccaagacccggcagggtgctcttgagagcctgcgcctggccctagcgtcccgcctactccccgacttcttgctggagcgccgcctcacgctagccgatgccctggaaaagtgcctcaagaaagggaagggcgaggaacaagccctggctgctgctgtgctaggcctgctctgcgtgcagctgggccctggacctaagggtgaggagctgtttcacagcctgcagcctctgctggtctctgtgctcagtgacagcacagctagccctgctgcccggctccactgtgcttctgcccttggcctgggctgctacgtggctgccgctgacatccaggacctggtctcttgccttgcctgcttagaaagtgttttcagccggttctatggcttggggggcagctccacaagtcctgtggttcctgccagcctgcacggcctgctctctgctgccctgcaggcctgggcattgctgctcaccatctgccctagcacccaaatcagccacatccttgacaggcagctgccccggctgccccagctcttgtccagtgaaagtgtgaacctgcggatcgctgccggtgaaaccattgcactgctctttgagcttgcccgggaccttgaggaggagtttgtttacgaggacatggaggccctctgcagtgtcctgcgcactctggccactgacagtaacaagtaccgtgccaaggctgatcgtcggcgccagcgctctactttccgcgccgtgctgcactccgtggagggcggtgaatgcgaagaagagatagtgcgcttcggctttgaggtgctctacatggacagctgggctcggcaccggatctacgctgccttcaaggaagtgctgggttcgggcatgcaccaccacctccagaacaatgagctactccgtgacatctttggcctgggccctgtgctgttgctggatgccactgccctgaaggcctgcaaggttccacgctttgagaagcacctgtacaatgctgctgccttcaaagcccggaccaaggctcgaagccgtgtgcgggacaagcgggcagacatcctgtgaagcaggacctgctgaagaggagactttctatgcccttggtccgtatttttaacagaagacagtgcaacaactggtctccaccagtatttgtcactttattttttttaatgacaaaaccaaaaacagacatggggtgggtagctgggggcccggacacttgggaccctgacccctttgtccctgcactcagccctgtggccccttcctgtcctgtctcaggccaggctaaatatgtgccttcctcagggctgtggggcaggcactagggggcctttcccttcctttcctttctcaggccttgctcccccaggatgacccactcttaggggggtggtggcatctggacaaatgccaccacagcaggtggggtggcaaagctacctggaatggatttgtgtgctgatttttaaggattattacagataattaaacagaacggtcagccttctgtggtcttaacccctgggtatttttctgttctccctccccatctactatccca

SEQ ID NO: 373 - protein, 442 aa, Homo sapiens
MPRARKGNTLRKGGQRRGGGARSSAQADSGSSDDEAASEARSTASECPSLLSTTAEDSLGGDVVDEQGQQEDLEEKLKEYVDCLTDKSAKTRQGALESLRLALASRLLPDFLLERRLTLADALEKCLKKGKGEEQALAAAVLGLLCVQLGPGPKGEELFHSLQPLLVSVLSDSTASPAARLHCASALGLGCYVAAADIQDLVSCLACLESVFSRFYGLGGSSTSPVVPASLHGLLSAALQAWALLLTICPSTQISHILDRQLPRLPQLLSSESVNLRIAAGETIALLFELARDLEEEFVYEDMEALCSVLRTLATDSNKYRAKADRRRQRSTFRAVLHSVEGGECEEEIVRFGFEVLYMDSWARHRIYAAFKEVLGSGMHHHLQNNELLRDIFGLGPVLLLDATALKACKVPRFEKHLYNAAAFKARTKARSRVRDKRADIL

SEQ ID NO: 374 - DNA, 1942 bp, Homo sapiens
agccagggtagagactgagtcggcgcctggcgggtgttgtgacgcgcaaaccaggggcgggttctaagcggcgacgcgcgggtgctgggaggccttagaacgccgtggcgtgccgcaggacgcgacggctgcagaacatccgccgcaccgctgggggccaacgttgtcggaccgaggagtccgaggtggcgactgagtgagatacccagctgtgcggagctaggacgcggaacatcccagaggccagcatcaacatgtttccatccttggggaatgaccacgcaactgggcccagccctggtgctgggggtggccctgtgcctgggttgtggccagcccctaccacaggtccctgaacgccccttctctgtgctgtggaatgtaccctcagcacactgtgaggcccgctttggtgtgcacctgccactcaatgctctgggcatcatagccaaccgtggccagcattttcacggtcagaacatgaccattttctacaagaaccaactcggcctctatccctactttggacccaggggcacagctcacaatgggggcatcccccaggctttgccccttgaccgccacctggcactggctgcctaccagatccaccacagcctgagacctggctttgctggcccagcagtgctggattgggaggagtggtgtccactctgggctgggaactggggccgccgccgagcttatcaggcagcctcttgggcttgggcacagcaggtattccctgacctggaccctcaggagcagctctacaaggcctatactggctttgagcaggcggcccgtgcactgatggaggatacgctgcgggtggcccaggcactacggccccatggactctggggcttctatcactacccagcctgtggcaatggctggcatagtatggcttccaactataccggccgctgccatgcagccacccttgcccgcaacactcaactgcattggctctgggccgcctccagtgccctcttccccagcatctacctcccacccaggctgccacctgcccaccaccaggcctttgtccgacatcgcctggaggaggccttccgtgtggcccttgttgggcaccgacatcccctgcctgtcctggcctatgtccgcctcacacaccggagatctgggaggttcctgtcccaggatgaccttgtgcagtccattggtgtgagtgcagcactaggggcagccggcgtggtgctctggggggacctgagcctctccagctctgaggaggagtgctggcatctccatgactacctggtggacaccttgggcccctatgtgatcaatgtgaccagggcagcgatggcctgcagtcaccagcggtgccatggccacgggcgctgtgcccggcgagatccaggacagatggaagcctttctacacctgtggccagacggcagccttggagattggaagtccttcagctgccactgttactggggctgggctggccccacctgccaggagcccaggcctgggcctaaagaagcagtataaagccagggcccctgccactgcctcttcttttccctgctgccacttttccagtcctggaactactctgtcccactcttgctctattcagtttacagtcaaccctcccaagcacacaccccgcttcccttggaatccctgaggggtagaaggggccagaaaaaacgcttataaaaccagaggccctctgagatcatgtgagtcctccatggcaaggaagcagttccagggagagtcaggttccagctagttagggctgccagcctagggctttgtgcctacacctcactaagcccatggagaggtcacagatgggccgtgcacgggcagatgggccccaaaaaatcttggcgaaggtcggtaaagtgctaagctgttgtctgcactctttcatcataaagtcacttttttccactgc

SEQ ID NO: 375 - protein, 417 aa, Homo sapiens
MTTQLGPALVLGVALCLGCGQPLPQVPERPFSVLWNVPSAHCEARFGVHLPLNALGIIANRGQHFHGQNMTIFYKNQLGLYPYFGPRGTAHNGGIPQALPLDRHLALAAYQIHHSLRPGFAGPAVLDWEEWCPLWAGNWGRRRAYQAASWAWAQQVFPDLDPQEQLYKAYTGFEQAARALMEDTLRVAQALRPHGLWGFYHYPACGNGWHSMASNYTGRCHAATLARNTQLHWLWAASSALFPSIYLPPRLPPAHHQAFVRHRLEEAFRVALVGHRHPLPVLAYVRLTHRRSGRFLSQDDLVQSIGVSAALGAAGVVLWGDLSLSSSEEECWHLHDYLVDTLGPYVINVTRAAMACSHQRCHGHGRCARRDPGQMEAFLHLWPDGSLGDWKSFSCHCYWGWAGPTCQEPRPGPKEAV

SEQ ID NO: 376 - DNA, 1218 bp, Homo sapiens
ggcgactgagtgagatacccagctgtgcggagctaggacgcggaacatcccagaggccagcatcaacatgcaagagctgactctgagccctggcccagccaagctgacccctacactagaccctacacaccggatggagctgatcctgagtaccagcccagctgagctgactctggatcctgcgtgccagccaaagctgcccctggattccacatgccaaccagagatgaccttcaatcctggtccaactgagcttaccctggatcctgaacaccagccagaggagaccccagctcctagcctggctgagttgaccctggagcctgtgcaccgccgacccgagctcctggatgcttgtgctgacctcatcaatgatcagtggccccgcagccgcacctcccgcctgcactccctgggccagtcctcagatgccttccccctctgcctgatgctgctaagcccccaccccacacttgaagcagcacccgttgtggtgggccatgcccgcctgtcacgggtgctgaaccagccccagagcctcttagtggagacagtggtggtggcccgggccctgaggggccgtggctttggccgccgcctcatggagggcctggaggtctttgctcgggcccggggcttccgcaagctgcatctcaccacccatgaccaggtgcacttctatacccacctgggctaccagctgggtgagcctgtgcagggcctggtcttcaccagcagacggctgcctgccaccctgcttaatgccttccccacagccccctctccccggccacccaggaaggccccaaacctgactgcccaagctgccccaaggggtcccaagggacctccattgccaccaccccctcccctacctgagtgcctgaccatctcacccccagttccatcagggcccccttcaaaaagcctgctggagacacaatatcaaaatgtgagggggcgccccatattctggatggaaaaagacatctgaggccatccagggcaaggaactgtctttctggttcaatagactgccccgacagtctacaagcctcagcccactgaccatacctcagcccctagcccctggggggcagctttaacctgggcatgtttcctgggtaccagtggggccaggaggtggctctggctcagagccgtcagtgtggctgaataaaggctctcttgggtaaaaaaaaaaaaaaaaaaaaaaaa

SEQ ID NO: 377 - protein, 308 aa, Homo sapiens
MQELTLSPGPAKLTPTLDPTHRMELILSTSPAELTLDPACQPKLPLDSTCQPEMTFNPGPTELTLDPEHQPEETPAPSLAELTLEPVHRRPELLDACADLINDQWPRSRTSRLHSLGQSSDAFPLCLMLLSPHPTLEAAPVVVGHARLSRVLNQPQSLLVETVVVARALRGRGFGRRLMEGLEVFARARGFRKLHLTTHDQVHFYTHLGYQLGEPVQGLVFTSRRLPATLLNAFPTAPSPRPPRKAPNLTAQAAPRGPKGPPLPPPPPLPECLTISPPVPSGPPSKSLLETQYQNVRGRPIFWMEKDI

SEQ ID NO: 378 - DNA, 2518 bp, Homo sapiens
cttcctccaggagtctctggtgcagctggggtggaatctggccaggccctgcttaggcccccatcctggggtcaggaaatttggaggataaggcccttcagccccaaggtcagcagggacgagcgggcagactggcgggtgtacaggagggctgggttgacctgtccttggtcactgaggccattggatcttcctccagtggctgccaggatttctggtggaagagacaggaaggcctcccccccttggtcgggtcagcctgggggctgagggcctggctgtcagccactcttcccagaacatatgtcatggcctcagtggctcatggggaagcaggggtgggcgagcttaggctagagcaagtcctgtgggagatggcagaggcctggtctgagaggcaactcggatgtgccctccagtggccatgctcccctccatgcgtctcccctgccctcctggagccctgcaggtcaatgtttaacagaaaccagagcagcggtggattaatgcgcaagggctcagccccccagccctgagcagtgggggaatcggagactttgcaacctgttctcagctctgcctcccctggccaggttgtcctcgaccagtcccgtgccatggcagcccacctgcttcccatctgcgccctcttcctgaccttactcgatatggcccaaggctttaggggccccttgctacccaaccggcccttcaccaccgtctggaatgcaaacacccagtggtgcctggagaggcacggtgtggacgtggatgtcagtgtcttcgatgtggtagccaacccagggcagaccttccgcggccctgacatgacaattttctatagctcccagctgggcacctacccctactacacgcccactggggagcctgtgtttggtggtctgccccagaatgccagcctgattgcccacctggcccgcacattccaggacatcctggctgccatacctgctcctgacttctcagggctggcagtcatcgactgggaggcatggcgcccacgctgggccttcaactgggacaccaaggacatttaccggcagcgctcacgggcactggtacaggcacagcaccctgattggccagctcctcaggtggaggcagtagcccaggaccagttccagggagctgcacgggcctggatggcaggcaccctccagctggggcgggcactgcgtcctcgcggcctctggggcttctatggcttccctgactgctacaactatgactttctaagccccaactacaccggccagtgcccatcaggcatccgtgcccaaaatgaccagctagggtggctgtggggccagagccgtgccctctatcccagcatctacatgcccgcagtgctggagggcacagggaagtcacagatgtatgtgcaacaccgtgtggccgaggcattccgtgtggctgtggctgctggtgaccccaatctgccggtgctgccctatgtccagatcttctatgacacgacaaaccactttctgcccctggatgagctggagcacagcctgggggagagtgcggcccagggggcagctggagtggtgctctgggtgagctgggaaaatacaagaaccaaggaatcatgtcaggccatcaaggagtatatggacactacactggggcccttcatcctgaacgtgaccagtggggcccttctctgcagtcaagccctgtgctccggccatggccgctgtgtccgccgcaccagccaccccaaagccctcctcctccttaaccctgccagtttctccatccagctcacgcctggtggtgggcccctgagcctgcggggtgccctctcacttgaagatcaggcacagatggctgtggagttcaaatgtcgatgctaccctggctggcaggcaccgtggtgtgagcggaagagcatgtggtgattggccacacactgagttgcacatattgagaacctaatgcactctgggtctggccagggcttcctcaaatacatgcacagtcatacaagtcatggtcacagtaaagagtacactcagccactgtcacaggcatattccctgcacacacatgcatacttacagactggaatagtggcataaggagttagaaccacagcagacaccattcattccatgtccatatgcatctacttggcaaggtcatagacaattcctccagagacactgagccagtctttgaactgcagcaatcacaaaggctgacattcactgagtgcctactctttgccaatccccgtgctaagcgttttatgtggacttattcattcctcacaatgaggctatgaggaaactgagtcactcacattgagagtaagcacgttgcccaaggttgcacagcaagaaaagggagaagttgagattcaaacccaggctgtctagctccgggggtacagcccttgcactcctactgagtttgtggtaaccagccctgcacgacccctgaatctgctgagaggcaccagtccagcaaataaagcagtcatgatttactt

SEQ ID NO: 379 - protein, 435 aa, Homo sapiens
MAAHLLPICALFLTLLDMAQGFRGPLLPNRPFTTVWNANTQWCLERHGVDVDVSVFDVVANPGQTFRGPDMTIFYSSQLGTYPYYTPTGEPVFGGLPQNASLIAHLARTFQDILAAIPAPDFSGLAVIDWEAWRPRWAFNWDTKDIYRQRSRALVQAQHPDWPAPQVEAVAQDQFQGAARAWMAGTLQLGRALRPRGLWGFYGFPDCYNYDFLSPNYTGQCPSGIRAQNDQLGWLWGQSRALYPSIYMPAVLEGTGKSQMYVQHRVAEAFRVAVAAGDPNLPVLPYVQIFYDTTNHFLPLDELEHSLGESAAQGAAGVVLWVSWENTRTKESCQAIKEYMDTTLGPFILNVTSGALLCSQALCSGHGRCVRRTSHPKALLLLNPASFSIQLTPGGGPLSLRGALSLEDQAQMAVEFKCRCYPGWQAPWCERKSMW

SEQ ID NO: 380 - DNA, 2075 bp, Homo sapiens
cttcctccaggagtctctggtgcagctggggtggaatctggccaggccctgcttaggcccccatcctggggtcaggaaatttggaggataaggcccttcagccccaaggttgtcctcgaccagtcccgtgccatggcagcccacctgcttcccatctgcgccctcttcctgaccttactcgatatggcccaaggctttaggggccccttgctacccaaccggcccttcaccaccgtctggaatgcaaacacccagtggtgcctggagaggcacggtgtggacgtggatgtcagtgtcttcgatgtggtagccaacccagggcagaccttccgcggccctgacatgacaattttctatagctcccagctgggcacctacccctactacacgcccactggggagcctgtgtttggtggtctgccccagaatgccagcctgattgcccacctggcccgcacattccaggacatcctggctgccatacctgctcctgacttctcagggctggcagtcatcgactgggaggcatggcgcccacgctgggccttcaactgggacaccaaggacatttaccggcagcgctcacgggcactggtacaggcacagcaccctgattggccagctcctcaggtggaggcagtagcccaggaccagttccagggagctgcacgggcctggatggcaggcaccctccagctggggcgggcactgcgtcctcgcggcctctggggcttctatggcttccctgactgctacaactatgactttctaagccccaactacaccggccagtgcccatcaggcatccgtgcccaaaatgaccagctagggtggctgtggggccagagccgtgccctctatcccagcatctacatgcccgcagtgctggagggcacagggaagtcacagatgtatgtgcaacaccgtgtggccgaggcattccgtgtggctgtggctgctggtgaccccaatctgccggtgctgccctatgtccagatcttctatgacacgacaaaccactttctgcccctggatgagctggagcacagcctgggggagagtgcggcccagggggcagctggagtggtgctctgggtgagctgggaaaatacaagaaccaaggaatcatgtcaggccatcaaggagtatatggacactacactggggcccttcatcctgaacgtgaccagtggggcccttctctgcagtcaagccctgtgctccggccatggccgctgtgtccgccgcaccagccaccccaaagccctcctcctccttaaccctgccagtttctccatccagctcacgcctggtggtgggcccctgagcctgcggggtgccctctcacttgaagatcaggcacagatggctgtggagttcaaatgtcgatgctaccctggctggcaggcaccgtggtgtgagcggaagagcatgtggtgattggccacacactgagttgcacatattgagaacctaatgcactctgggtctggccagggcttcctcaaatacatgcacagtcatacaagtcatggtcacagtaaagagtacactcagccactgtcacaggcatattccctgcacacacatgcatacttacagactggaatagtggcataaggagttagaaccacagcagacaccattcattccatgtccatatgcatctacttggcaaggtcatagacaattcctccagagacactgagccagtctttgaactgcagcaatcacaaaggctgacattcactgagtgcctactctttgccaatccccgtgctaagcgttttatgtggacttattcattcctcacaatgaggctatgaggaaactgagtcactcacattgagagtaagcacgttgcccaaggttgcacagcaagaaaagggagaagttgagattcaaacccaggctgtctagctccgggggtacagcccttgcactcctactgagtttgtggtaaccagccctgcacgacccctgaatctgctgagaggcaccagtccagcaaataaagcagtcatgatttacttaaaaaaaaaaaaaaaaaaaaaaaaaaaaaaaaaaaaaaaaaa

SEQ ID NO: 381 - protein, 435 aa, Homo sapiens; identical to SEQ ID NO: 379

SEQ ID NO: 382 - DNA, 2370 bp, Homo sapiens
agatgtggggagcgcctctgccctgtcgccccgtccgggatgtgaggagcgtctctccctggccgccccgtctgagaagtgaggagcccctccgcccagcagccgccctgtctgagaagctagtcttgaattcctgacctcaggtgatcctcccgcgttggcctcccaaagtgctgggattacaggcatgagccaccactcctggccccagaaagtgacattctttacttaccacaggaggaaaagatccacgaaagtaaagtgcctagggcccatcaatgtcagatgcagccacgtggacaaagaacactccctgagcacaagacacgaaagaacccggtctccagtgtcacaaacaggcctgcccagcagggtctgcccctgcccacctcctccagcctaggttgtcctcgaccagtcccgtgccatggcagcccacctgcttcccatctgcgccctcttcctgaccttactcgatatggcccaaggctttaggggccccttgctacccaaccggcccttcaccaccgtctggaatgcaaacacccagtggtgcctggagaggcacggtgtggacgtggatgtcagtgtcttcgatgtggtagccaacccagggcagaccttccgcggccctgacatgacaattttctatagctcccagctgggcacctacccctactacacgcccactggggagcctgtgtttggtggtctgccccagaatgccagcctgattgcccacctggcccgcacattccaggacatcctggctgccatacctgctcctgacttctcagggctggcagtcatcgactgggaggcatggcgcccacgctgggccttcaactgggacaccaaggacatttaccggcagcgctcacgggcactggtacaggcacagcaccctgattggccagctcctcaggtggaggcagtagcccaggaccagttccagggagctgcacgggcctggatggcaggcaccctccagctggggcgggcactgcgtcctcgcggcctctggggcttctatggcttccctgactgctacaactatgactttctaagccccaactacaccggccagtgcccatcaggcatccgtgcccaaaatgaccagctagggtggctgtggggccagagccgtgccctctatcccagcatctacatgcccgcagtgctggagggcacagggaagtcacagatgtatgtgcaacaccgtgtggccgaggcattccgtgtggctgtggctgctggtgaccccaatctgccggtgctgccctatgtccagatcttctatgacacgacaaaccactttctgcccctggatgagctggagcacagcctgggggagagtgcggcccagggggcagctggagtggtgctctgggtgagctgggaaaatacaagaaccaaggaatcatgtcaggccatcaaggagtatatggacactacactggggcccttcatcctgaacgtgaccagtggggcccttctctgcagtcaagccctgtgctccggccatggccgctgtgtccgccgcaccagccaccccaaagccctcctcctccttaaccctgccagtttctccatccagctcacgcctggtggtgggcccctgagcctgcggggtgccctctcacttgaagatcaggcacagatggctgtggagttcaaatgtcgatgctaccctggctggcaggcaccgtggtgtgagcggaagagcatgtggtgattggccacacactgagttgcacatattgagaacctaatgcactctgggtctggccagggcttcctcaaatacatgcacagtcatacaagtcatggtcacagtaaagagtacactcagccactgtcacaggcatattccctgcacacacatgcatacttacagactggaatagtggcataaggagttagaaccacagcagacaccattcattccatgtccatatgcatctacttggcaaggtcatagacaattcctccagagacactgagccagtctttgaactgcagcaatcacaaaggctgacattcactgagtgcctactctttgccaatccccgtgctaagcgttttatgtggacttattcattcctcacaatgaggctatgaggaaactgagtcactcacattgagagtaagcacgttgcccaaggttgcacagcaagaaaagggagaagttgagattcaaacccaggctgtctagctccgggggtacagcccttgcactcctactgagtttgtggtaaccagccctgcacgacccctgaatctgctgagaggcaccagtccagcaaataaagcagtcatgatttacttaaaaaaaaaaaaaaaaaaaaaaaaaaaaaaaaaaaaaaaaaa

SEQ ID NO: 383 - protein, 435 aa, Homo sapiens; identical to SEQ ID NO: 379

SEQ ID NO: 384 - DNA, 1985 bp, Homo sapiens
cttcctccaggagtctctggtgcagctggggtggaatctggccaggccctgcttaggcccccatcctggggtcaggaaatttggaggataaggcccttcagccccaaggttgtcctcgaccagtcccgtgccatggcagcccacctgcttcccatctgcgccctcttcctgaccttactcgatatggcccaaggctttaggggccccttgctacccaaccggcccttcaccaccgtctggaatgcaaacacccagtggtgcctggagaggcacggtgtggacgtggatgtcagtgtcttcgatgtggtagccaacccagggcagaccttccgcggccctgacatgacaattttctatagctcccagctgggcacctacccctactacacgcccactggggagcctgtgtttggtggtctgccccagaatgccagcctgattgcccacctggcccgcacattccaggacatcctggctgccatacctgctcctgacttctcagggctggcagtcatcgactgggaggcatggcgcccacgctgggccttcaactgggacaccaaggacatttaccggcagcgctcacgggcactggtacaggcacagcaccctgattggccagctcctcaggtggaggcagtagcccaggaccagttccagggagctgcacgggcctggatggcaggcaccctccagctggggcgggcactgcgtcctcgcggcctctggggcttctatggcttccctgactgctacaactatgactttctaagccccaactacaccggccagtgcccatcaggcatccgtgcccaaaatgaccagctagggtggctgtggggccagagccgtgccctctatcccagcatctacatgcccgcagtgctggagggcacagggaagtcacagatgtatgtgcaacaccgtgtggccgaggcattccgtgtggctgtggctgctggtgaccccaatctgccggtgctgccctatgtccagatcttctatgacacgacaaaccactttctgcccctggaatcatgtcaggccatcaaggagtatatggacactacactggggcccttcatcctgaacgtgaccagtggggcccttctctgcagtcaagccctgtgctccggccatggccgctgtgtccgccgcaccagccaccccaaagccctcctcctccttaaccctgccagtttctccatccagctcacgcctggtggtgggcccctgagcctgcggggtgccctctcacttgaagatcaggcacagatggctgtggagttcaaatgtcgatgctaccctggctggcaggcaccgtggtgtgagcggaagagcatgtggtgattggccacacactgagttgcacatattgagaacctaatgcactctgggtctggccagggcttcctcaaatacatgcacagtcatacaagtcatggtcacagtaaagagtacactcagccactgtcacaggcatattccctgcacacacatgcatacttacagactggaatagtggcataaggagttagaaccacagcagacaccattcattccatgtccatatgcatctacttggcaaggtcatagacaattcctccagagacactgagccagtctttgaactgcagcaatcacaaaggctgacattcactgagtgcctactctttgccaatccccgtgctaagcgttttatgtggacttattcattcctcacaatgaggctatgaggaaactgagtcactcacattgagagtaagcacgttgcccaaggttgcacagcaagaaaagggagaagttgagattcaaacccaggctgtctagctccgggggtacagcccttgcactcctactgagtttgtggtaaccagccctgcacgacccctgaatctgctgagaggcaccagtccagcaaataaagcagtcatgatttacttaaaaaaaaaaaaaaaaaaaaaaaaaaaaaaaaaaaaaaaaaa

SEQ ID NO: 385 - protein, 405 aa, Homo sapiens
MAAHLLPICALFLTLLDMAQGFRGPLLPNRPFTTVWNANTQWCLERHGVDVDVSVFDVVANPGQTFRGPDMTIFYSSQLGTYPYYTPTGEPVFGGLPQNASLIAHLARTFQDILAAIPAPDFSGLAVIDWEAWRPRWAFNWDTKDIYRQRSRALVQAQHPDWPAPQVEAVAQDQFQGAARAWMAGTLQLGRALRPRGLWGFYGFPDCYNYDFLSPNYTGQCPSGIRAQNDQLGWLWGQSRALYPSIYMPAVLEGTGKSQMYVQHRVAEAFRVAVAAGDPNLPVLPYVQIFYDTTNHFLPLESCQAIKEYMDTTLGPFILNVTSGALLCSQALCSGHGRCVRRTSHPKALLLLNPASFSIQLTPGGGPLSLRGALSLEDQAQMAVEFKCRCYPGWQAPWCERKSMW

SEQ ID NO: 386 - DNA, 1718 bp, Homo sapiens
cttcctccaggagtctctggtgcagctggggtggaatctggccaggccctgcttaggcccccatcctggggtcaggaaatttggaggataaggcccttcagccccaaggacatcctggctgccatacctgctcctgacttctcagggctggcagtcatcgactgggaggcatggcgcccacgctgggccttcaactgggacaccaaggacatttaccggcagcgctcacgggcactggtacaggcacagcaccctgattggccagctcctcaggtggaggcagtagcccaggaccagttccagggagctgcacgggcctggatggcaggcaccctccagctggggcgggcactgcgtcctcgcggcctctggggcttctatggcttccctgactgctacaactatgactttctaagccccaactacaccggccagtgcccatcaggcatccgtgcccaaaatgaccagctagggtggctgtggggccagagccgtgccctctatcccagcatctacatgcccgcagtgctggagggcacagggaagtcacagatgtatgtgcaacaccgtgtggccgaggcattccgtgtggctgtggctgctggtgaccccaatctgccggtgctgccctatgtccagatcttctatgacacgacaaaccactttctgcccctggatgagctggagcacagcctgggggagagtgcggcccagggggcagctggagtggtgctctgggtgagctgggaaaatacaagaaccaaggaatcatgtcaggccatcaaggagtatatggacactacactggggcccttcatcctgaacgtgaccagtggggcccttctctgcagtcaagccctgtgctccggccatggccgctgtgtccgccgcaccagccaccccaaagccctcctcctccttaaccctgccagtttctccatccagctcacgcctggtggtgggcccctgagcctgcggggtgccctctcacttgaagatcaggcacagatggctgtggagttcaaatgtcgatgctaccctggctggcaggcaccgtggtgtgagcggaagagcatgtggtgattggccacacactgagttgcacatattgagaacctaatgcactctgggtctggccagggcttcctcaaatacatgcacagtcatacaagtcatggtcacagtaaagagtacactcagccactgtcacaggcatattccctgcacacacatgcatacttacagactggaatagtggcataaggagttagaaccacagcagacaccattcattccatgtccatatgcatctacttggcaaggtcatagacaattcctccagagacactgagccagtctttgaactgcagcaatcacaaaggctgacattcactgagtgcctactctttgccaatccccgtgctaagcgttttatgtggacttattcattcctcacaatgaggctatgaggaaactgagtcactcacattgagagtaagcacgttgcccaaggttgcacagcaagaaaagggagaagttgagattcaaacccaggctgtctagctccgggggtacagcccttgcactcctactgagtttgtggtaaccagccctgcacgacccctgaatctgctgagaggcaccagtccagcaaataaagcagtcatgatttacttaaaaaaaaaaaaaaaaaaaaaaaaaaaaaaaaaaaaaaaaaa

SEQ ID NO: 387 - protein, 253 aa, Homo sapiens
MAGTLQLGRALRPRGLWGFYGFPDCYNYDFLSPNYTGQCPSGIRAQNDQLGWLWGQSRALYPSIYMPAVLEGTGKSQMYVQHRVAEAFRVAVAAGDPNLPVLPYVQIFYDTTNHFLPLDELEHSLGESAAQGAAGVVLWVSWENTRTKESCQAIKEYMDTTLGPFILNVTSGALLCSQALCSGHGRCVRRTSHPKALLLLNPASFSIQLTPGGGPLSLRGALSLEDQAQMAVEFKCRCYPGWQAPWCERKSMW

SEQ ID NO: 388 - DNA, 1300 bp, Homo sapiens
cttcctccaggagtctctggtgcagctggggtggaatctggccaggccctgcttaggcccccatcctggggtcaggaaatttggaggataaggcccttcagccccaagtgctggagggcacagggaagtcacagatgtatgtgcaacaccgtgtggccgaggcattccgtgtggctgtggctgctggtgaccccaatctgccggtgctgccctatgtccagatcttctatgacacgacaaaccactttctgcccctggatgagctggagcacagcctgggggagagtgcggcccagggggcagctggagtggtgctctgggtgagctgggaaaatacaagaaccaaggaatcatgtcaggccatcaaggagtatatggacactacactggggcccttcatcctgaacgtgaccagtggggcccttctctgcagtcaagccctgtgctccggccatggccgctgtgtccgccgcaccagccaccccaaagccctcctcctccttaaccctgccagtttctccatccagctcacgcctggtggtgggcccctgagcctgcggggtgccctctcacttgaagatcaggcacagatggctgtggagttcaaatgtcgatgctaccctggctggcaggcaccgtggtgtgagcggaagagcatgtggtgattggccacacactgagttgcacatattgagaacctaatgcactctgggtctggccagggcttcctcaaatacatgcacagtcatacaagtcatggtcacagtaaagagtacactcagccactgtcacaggcatattccctgcacacacatgcatacttacagactggaatagtggcataaggagttagaaccacagcagacaccattcattccatgtccatatgcatctacttggcaaggtcatagacaattcctccagagacactgagccagtctttgaactgcagcaatcacaaaggctgacattcactgagtgcctactctttgccaatccccgtgctaagcgttttatgtggacttattcattcctcacaatgaggctatgaggaaactgagtcactcacattgagagtaagcacgttgcccaaggttgcacagcaagaaaagggagaagttgagattcaaacccaggctgtctagctccgggggtacagcccttgcactcctactgagtttgtggtaaccagccctgcacgacccctgaatctgctgagaggcaccagtccagcaaataaagcagtcatgatttacttaaaaaaaaaaaaaaaaaaaaaaaaaaaaaaaaaaaaaaaaaa

SEQ ID NO: 389 - protein, 176 aa, Homo sapiens
MYVQHRVAEAFRVAVAAGDPNLPVLPYVQIFYDTTNHFLPLDELEHSLGESAAQGAAGVVLWVSWENTRTKESCQAIKEYMDTTLGPFILNVTSGALLCSQALCSGHGRCVRRTSHPKALLLLNPASFSIQLTPGGGPLSLRGALSLEDQAQMAVEFKCRCYPGWQAPWCERKSMW

SEQ ID NO: 390 - DNA, 1848 bp, Homo sapiens
ggctcaccccaggtaaggagggaggccaccgacctactgggccgacggactcccacacagttcctgagctggtgccaggcaggtgacacctcctgcagcccccagcatgcgggcaggcccaggccccaccgttacattggccctggtgctggcggtgtcatgggccatggagctcaagcccacagcaccacccatcttcactggccggccctttgtggtagcgtgggacgtgcccacacaggactgtggcccacgcctcaaggtgccactggacctgaatgcctttgatgtgcaggcctcacctaatgagggttttgtgaaccagaatattaccatcttctaccgcgaccgtctaggcctgtatccacgcttcgattctgccggaaggtctgtgcatggtggtgtgccacagaatgtcagcctttgggcacaccggaagatgctgcagaaacgtgtggagcactacattcggacacaggagtctgcggggctggcggtcatcgactgggaggactggcgacctgtgtgggtgcgcaactggcaggacaaagatgtgtatcgccggttatcacgccagctagtggccagtcgtcaccctgactggcctccagaccgcatagtcaaacaggcacaatatgagtttgagttcgcagcacagcagttcatgctggagacactgcgttatgtcaaggcagtgcggccccggcacctctggggcttctacctctttcctgactgctacaatcatgattatgtgcagaactgggagagctacacaggccgctgccctgatgttgaggtggcccgcaatgaccagctggcctggctgtgggctgagagcacggccctcttcccgtctgtctacctggacgagacacttgcttcctcccgccatggccgcaactttgtgagcttccgtgttcaggaggcccttcgtgtggctcgcacccaccatgccaaccatgcactcccagtctacgtcttcacacgacccacctacagccgcaggctcacggggcttagtgagatggacctcatctctaccattggcgagagtgcggccctgggcgcagctggtgtcatcctctggggtgacgcggggtacaccacaagcacggagacctgccagtacctcaaagattacctgacacggctgctggtcccctacgtggtcaatgtgtcctgggccacccaatattgcagccgggcccagtgccatggccatgggcgctgtgtgcgccgcaaccccagtgccagtaccttcctgcatctcagcaccaacagtttccgcctagtgcctggccatgcacctggtgaaccccagctgcgacctgtgggggagctcagttgggccgacattgaccacctgcagacacacttccgctgccagtgctacttgggctggagtggtgagcaatgccagtgggaccataggcaggcagctggaggtgccagcgaggcctgggctgggtcccacctcaccagtctgctggctctggcagccctggcctttacctggaccttgtaggggtctcctgcctagctgcctagcaagctggcctctaccacaagggctctcttaggcatgtaggaccctgcagggggtggacaaactggagtctggagtgggcagagcccccaggaagcccaggagggcatccataccagctcgcacccccctgttctaagggggaggggaagtccctgggaggccccttctctccctgccagaggggaaggagggtacagctgggctggggaggacctgaccctactcccttgccctagatagtttattattattattattttggggtctcttttgtaaattaaacataaaacaattgc

SEQ ID NO: 391 - protein, 473 aa, Homo sapiens
MRAGPGPTVTLALVLAVSWAMELKPTAPPIFTGRPFVVAWDVPTQDCGPRLKVPLDLNAFDVQASPNEGFVNQNITIFYRDRLGLYPRFDSAGRSVHGGVPQNVSLWAHRKMLQKRVEHYIRTQESAGLAVIDWEDWRPVWVRNWQDKDVYRRLSRQLVASRHPDWPPDRIVKQAQYEFEFAAQQFMLETLRYVKAVRPRHLWGFYLFPDCYNHDYVQNWESYTGRCPDVEVARNDQLAWLWAESTALFPSVYLDETLASSRHGRNFVSFRVQEALRVARTHHANHALPVYVFTRPTYSRRLTGLSEMDLISTIGESAALGAAGVILWGDAGYTTSTETCQYLKDYLTRLLVPYVVNVSWATQYCSRAQCHGHGRCVRRNPSASTFLHLSTNSFRLVPGHAPGEPQLRPVGELSWADIDHLQTHFRCQCYLGWSGEQCQWDHRQAAGGASEAWAGSHLTSLLALAALAFTWTL

SEQ ID NO: 392 - DNA, 1909 bp, Homo sapiens
aggcgctgagccgggccgcgcctgggcgaacggccggagcgggctgggctgggcccgggatggcggtggccctggcgccggtcccggtggcgccccgcgcgagttcctgagctggtgccaggcaggtgacacctcctgcagcccccagcatgcgggcaggcccaggccccaccgttacattggccctggtgctggcggtgtcatgggccatggagctcaagcccacagcaccacccatcttcactggccggccctttgtggtagcgtgggacgtgcccacacaggactgtggcccacgcctcaaggtgccactggacctgaatgcctttgatgtgcaggcctcacctaatgagggttttgtgaaccagaatattaccatcttctaccgcgaccgtctaggcctgtatccacgcttcgattctgccggaaggtctgtgcatggtggtgtgccacagaatgtcagcctttgggcacaccggaagatgctgcagaaacgtgtggagcactacattcggacacaggagtctgcggggctggcggtcatcgactgggaggactggcgacctgtgtgggtgcgcaactggcaggacaaagatgtgtatcgccggttatcacgccagctagtggccagtcgtcaccctgactggcctccagaccgcatagtcaaacaggcacaatatgagtttgagttcgcagcacagcagttcatgctggagacactgcgttatgtcaaggcagtgcggccccggcacctctggggcttctacctctttcctgactgctacaatcatgattatgtgcagaactgggagagctacacaggccgctgccctgatgttgaggtggcccgcaatgaccagctggcctggctgtgggctgagagcacggccctcttcccgtctgtctacctggacgagacacttgcttcctcccgccatggccgcaactttgtgagcttccgtgttcaggaggcccttcgtgtggctcgcacccaccatgccaaccatgcactcccagtctacgtcttcacacgacccacctacagccgcaggctcacggggcttagtgagatggacctcatctctaccattggcgagagtgcggccctgggcgcagctggtgtcatcctctggggtgacgcggggtacaccacaagcacggagacctgccagtacctcaaagattacctgacacggctgctggtcccctacgtggtcaatgtgtcctgggccacccaatattgcagccgggcccagtgccatggccatgggcgctgtgtgcgccgcaaccccagtgccagtaccttcctgcatctcagcaccaacagtttccgcctagtgcctggccatgcacctggtgaaccccagctgcgacctgtgggggagctcagttgggccgacattgaccacctgcagacacacttccgctgccagtgctacttgggctggagtggtgagcaatgccagtgggaccataggcaggcagctggaggtgccagcgaggcctgggctgggtcccacctcaccagtctgctggctctggcagccctggcctttacctggaccttgtaggggtctcctgcctagctgcctagcaagctggcctctaccacaagggctctcttaggcatgtaggaccctgcagggggtggacaaactggagtctggagtgggcagagcccccaggaagcccaggagggcatccataccagctcgcacccccctgttctaagggggaggggaagtccctgggaggccccttctctccctgccagaggggaaggagggtacagctgggctggggaggacctgaccctactcccttgccctagatagtttattattattattattttggggtctcttttgtaaattaaacataaaacaattgcaaaaaaaaaaaaaaaaaa

SEQ ID NO: 393 - protein, 473 aa, Homo sapiens; identical to SEQ ID NO: 391

SEQ ID NO: 394 - DNA, 1691 bp, Homo sapiens
tgcggccgcgtttccgtggagacagccgagcctgcggaaggcggcggcggcggcacctgcgatcagcggctggggcaggttatggtagtgcggactgcggtgtgagcagagcggccacggggcccgccatgcgccggcggccctgacatgggcgccagcgggtccaaagctcggggcctgtggcccttcgcctcggcggccggaggcggcggctcagaggcagcaggagctgagcaagctttggtgcggcctcggggccgagctgtgccccccttcgtattcacgcgccgcggctctatgttctatgatgaggatggggatctggctcacgagttctatgaggagacaatcgtcaccaagaacgggcagaagcgggccaagctgaggcgagtgcataagaatctgattcctcagggcatcgtgaagctggatcacccccgcatccacgtggatttccctgtgatcctctatgaggtgtgaccctgggaggtggcagacagaagcaccccctgccccggcaagaaactcccaggctcaatcaaggtgtggcttccattgaggagcccaggctggggccacaaccctgaataaactctgttggcccataaccttcagctgtgagcgggtcggtcccacagtattggttgggtgttggtttgtgtgtggacaagaggtggttggtgggtggtgaaggctaatggcagagttagcaccccactctcccaagccacccctgcaagcagcatagcagggcatataccagtcaggaatgcccgttacctggttccttgcctggtctgctttcttccaagtttgcctggggcctagccctgctagaggctacagcactttacaagcaaggtatgctttcttccagcccctaggctgtgggcactgtatacaagtaggaacttcctttccttcacttcccttttaacccctagtcagagcatttcagccgtttgctacctcgattcctcctgtgttggacagaggctgggggcagtgccagcctgattcttccgacctacctgccatttgttcccgccttcagatggatggacagtttgctggctattgataggagtggggactgggtgggggcttctccctctacccagggctgggctgatccccctactgcaactaactgttgccccccaaccccgaacccccagttgaggagttgagagagtgcaggctggggtcaggacaggctgcggatgcttgtgcctatggggagttactccaacccacctattctgtctaatctccatggctttgcaccaaatcctccacccctccaattgggaggggactgttcaccaccttgtggtaagggacaacaccctaaggctggtgccagtagttatgagtagcctaccaccccctcccttacagtaacccccaccccttcaggatcagtcaagggaaagcactagaacccctgggtagggaaagaaaggagggaaaaaccataaaaggaatacttataatgtgaaggtttgtaaatagtccatgatgatgtcgtggcagagtctgatttctatatagaggtgactttttttttaagtactgtgcaagctctgtgcttctataatgtgggaaatggcttggggaggatggcccctagcttaggaagactgttgtgttatttgttcaatttcaataaaatgatttgtagatcctgc

SEQ ID NO: 395 - protein, 110 aa, Homo sapiens
MGASGSKARGLWPFASAAGGGGSEAAGAEQALVRPRGRAVPPFVFTRRGSMFYDEDGDLAHEFYEETIVTKNGQKRAKLRRVHKNLIPQGIVKLDHPRIHVDFPVILYEV

SEQ ID NO: 396 - DNA, 1968 bp, Homo sapiens
tctcctcagctccttcccgccgcccagtctggatcctgggggaggcgctgaagtcggggcccgccctgtggccccgcccggcccgcgcttgctagcgcccaaagccagcgaagcacgggcccaaccgggccatgtcgggggagcctgagctcattgagctgcgggagctggcacccgctgggcgcgctgggaagggccgcacccggctggagcgtgccaacgcgctgcgcatcgcgcggggcaccgcgtgcaaccccacacggcagctggtccctggccgtggccaccgcttccagcccgcggggcccgccacgcacacgtggtgcgacctctgtggcgacttcatctggggcgtcgtgcgcaaaggcctgcagtgcgcgcattgcaagttcacctgccactaccgctgccgcgcgctcgtctgcctggactgttgcgggccccgggacctgggctgggaacccgcggtggagcgggacacgaacgtggacgagcctgtggagtgggagacacctgacctttctcaagctgagattgagcagaagatcaaggagtacaatgcccagatcaacagcaacctcttcatgagcttgaacaaggacggttcttacacaggcttcatcaaggttcagctgaagctggtgcgccctgtctctgtgccctccagcaagaagccaccctccttgcaggatgcccggcggggcccaggacggggcacaagtgtcaggcgccgcacttccttttacctgcccaaggatgctgtcaagcacctgcatgtgctgtcacgcacaagggcacgtgaagtcattgaggccctgctgcgaaagttcttggtggtggatgacccccgcaagtttgcactctttgagcgcgctgagcgtcacggccaagtgtacttgcggaagctgttggatgatgagcagcccctgcggctgcggctcctggcagggcccagtgacaaggccctgagctttgtcctgaaggaaaatgactctggggaggtgaactgggacgccttcagcatgcctgaactacataacttcctacgtatcctgcagcgggaggaggaggagcacctccgccagatcctgcagaagtactcctattgccgccagaagatccaagaggccctgcacgcctgcccccttgggtgacctcttgtacccccaggtggaaggcagacagcaggcagcgccaagtgcgtgccgtgtgagtgtgacagggccagtggggcctgtggaatgagtgtgcatggaggccctcctgtgctgggggaatgagcccagagaacagcgaagtagcttgctccctgtgtccacctgtgggtgtagccaggtatggctctgcacccctctgccctcattactgggccttagtgggccagggctgccctgagaagctgctccaggcctgcagcaggagtggtgcagacagaagtctcctcaatttttgtctcagaagtgaaaatcttggagaccctgcaaacagaacagggtcatgtttgcaggggtgacggccctcatctatgaggaaaggttttggatcttgaatgtggtctcaggatatccttatcagagctaagggtgggtgctcagaataaggcaggcattgaggaagagtcttggtttctctctacagtgccaactcctcacacaccctgaggtcagggagtgctggctcacagtacagcatgtgccttaatgcttcatatgaggaggatgtccctgggccagggtctgtgtgaatgtgggcactggcccaggttcataccttatttgctaatcaaagccagggtctctccctcaggtgttttttatgaagtgcgtgaatgtatgtaatgtgtggtggcctcagctgaatgcctcctgtggggaaaggggttggggtgacagtcatcatcagggcctggggcctgagagaattggctcaataaagatttcaagatcctcaaaaaaaaaaaaaaaaaaa

SEQ ID NO: 397 - protein, 340 aa, Homo sapiens
MSGEPELIELRELAPAGRAGKGRTRLERANALRIARGTACNPTRQLVPGRGHRFQPAGPATHTWCDLCGDFIWGVVRKGLQCAHCKFTCHYRCRALVCLDCCGPRDLGWEPAVERDTNVDEPVEWETPDLSQAEIEQKIKEYNAQINSNLFMSLNKDGSYTGFIKVQLKLVRPVSVPSSKKPPSLQDARRGPGRGTSVRRRTSFYLPKDAVKHLHVLSRTRAREVIEALLRKFLVVDDPRKFALFERAERHGQVYLRKLLDDEQPLRLRLLAGPSDKALSFVLKENDSGEVNWDAFSMPELHNFLRILQREEEEHLRQILQKYSYCRQKIQEALHACPLG

SEQ ID NO: 398 - DNA, 1674 bp, Homo sapiens
actgttgagcaggcctctctgcctgtggccttccggccggtttccagacgcccaggtggccaacattagagtccgcgtagcagtgtgagattgcaagttcacctgccactaccgctgccgcgcgctcgtctgcctggactgttgcgggccccgggacctgggctgggaacccgcggtggagcgggacacgaacgtggacgagcctgtggagtgggagacacctgacctttctcaagctgagattgagcagaagatcaaggagtacaatgcccagatcaacagcaacctcttcatgagcttgaacaaggacggttcttacacaggcttcatcaaggttcagctgaagctggtgcgccctgtctctgtgccctccagcaagaagccaccctccttgcaggatgcccggcggggcccaggacggggcacaagtgtcaggcgccgcacttccttttacctgcccaaggatgctgtcaagcacctgcatgtgctgtcacgcacaagggcacgtgaagtcattgaggccctgctgcgaaagttcttggtggtggatgacccccgcaagtttgcactctttgagcgcgctgagcgtcacggccaagtgtacttgcggaagctgttggatgatgagcagcccctgcggctgcggctcctggcagggcccagtgacaaggccctgagctttgtcctgaaggaaaatgactctggggaggtgaactgggacgccttcagcatgcctgaactacataacttcctacgtatcctgcagcgggaggaggaggagcacctccgccagatcctgcagaagtactcctattgccgccagaagatccaagaggccctgcacgcctgcccccttgggtgacctcttgtacccccaggtggaaggcagacagcaggcagcgccaagtgcgtgccgtgtgagtgtgacagggccagtggggcctgtggaatgagtgtgcatggaggccctcctgtgctgggggaatgagcccagagaacagcgaagtagcttgctccctgtgtccacctgtgggtgtagccaggtatggctctgcacccctctgccctcattactgggccttagtgggccagggctgccctgagaagctgctccaggcctgcagcaggagtggtgcagacagaagtctcctcaatttttgtctcagaagtgaaaatcttggagaccctgcaaacagaacagggtcatgtttgcaggggtgacggccctcatctatgaggaaaggttttggatcttgaatgtggtctcaggatatccttatcagagctaagggtgggtgctcagaataaggcaggcattgaggaagagtcttggtttctctctacagtgccaactcctcacacaccctgaggtcagggagtgctggctcacagtacagcatgtgccttaatgcttcatatgaggaggatgtccctgggccagggtctgtgtgaatgtgggcactggcccaggttcataccttatttgctaatcaaagccagggtctctccctcaggtgttttttatgaagtgcgtgaatgtatgtaatgtgtggtggcctcagctgaatgcctcctgtggggaaaggggttggggtgacagtcatcatcagggcctggggcctgagagaattggctcaataaagatttcaagatcctcaaaaaaaaaaaaaaaaa

SEQ ID NO: 399 - protein, 189 aa, Homo sapiens
MSLNKDGSYTGFIKVQLKLVRPVSVPSSKKPPSLQDARRGPGRGTSVRRRTSFYLPKDAVKHLHVLSRTRAREVIEALLRKFLVVDDPRKFALFERAERHGQVYLRKLLDDEQPLRLRLLAGPSDKALSFVLKENDSGEVNWDAFSMPELHNFLRILQREEEEHLRQILQKYSYCRQKIQEALHACPLG

SEQ ID NO: 400 - DNA, 1770 bp, Homo sapiens
gcgatctacgtttcagtcttaacggttgcggcgcggctctggcccgggcgcacgcgcacactgacacgcgtacacgcacgcacgcgaccggggcggtggttggcggctacggacgcgcaggactgggggacgggcgggtacggctatgggcgaggcggaggcgccttctttcgaaatgacctggagcagcacgacgagcagtggctactgcagccaagaggactcggactcggagctcgagcagtacttcaccgcgcgaacctcgctagctcgcaggccgcgccgggaccaggacgagcctgtggagtgggagacacctgacctttctcaagctgagattgagcagaagatcaaggagtacaatgcccagatcaacagcaacctcttcatgagcttgaacaaggacggttcttacacaggcttcatcaaggttcagctgaagctggtgcgccctgtctctgtgccctccagcaagaagccaccctccttgcaggatgcccggcggggcccaggacggggcacaagtgtcaggcgccgcacttccttttacctgcccaaggatgctgtcaagcacctgcatgtgctgtcacgcacaagggcacgtgaagtcattgaggccctgctgcgaaagttcttggtggtggatgacccccgcaagtttgcactctttgagcgcgctgagcgtcacggccaagtgtacttgcggaagctgttggatgatgagcagcccctgcggctgcggctcctggcagggcccagtgacaaggccctgagctttgtcctgaaggaaaatgactctggggaggtgaactgggacgccttcagcatgcctgaactacataacttcctacgtatcctgcagcgggaggaggaggagcacctccgccagatcctgcagaagtactcctattgccgccagaagatccaagaggccctgcacgcctgcccccttgggtgacctcttgtacccccaggtggaaggcagacagcaggcagcgccaagtgcgtgccgtgtgagtgtgacagggccagtggggcctgtggaatgagtgtgcatggaggccctcctgtgctgggggaatgagcccagagaacagcgaagtagcttgctccctgtgtccacctgtgggtgtagccaggtatggctctgcacccctctgccctcattactgggccttagtgggccagggctgccctgagaagctgctccaggcctgcagcaggagtggtgcagacagaagtctcctcaatttttgtctcagaagtgaaaatcttggagaccctgcaaacagaacagggtcatgtttgcaggggtgacggccctcatctatgaggaaaggttttggatcttgaatgtggtctcaggatatccttatcagagctaagggtgggtgctcagaataaggcaggcattgaggaagagtcttggtttctctctacagtgccaactcctcacacaccctgaggtcagggagtgctggctcacagtacagcatgtgccttaatgcttcatatgaggaggatgtccctgggccagggtctgtgtgaatgtgggcactggcccaggttcataccttatttgctaatcaaagccagggtctctccctcaggtgttttttatgaagtgcgtgaatgtatgtaatgtgtggtggcctcagctgaatgcctcctgtggggaaaggggttggggtgacagtcatcatcagggcctggggcctgagagaattggctcaataaagatttcaagatcctcaaaaaaaaaaaaaaaaa

SEQ ID NO: 401 - protein, 270 aa, Homo sapiens
MGEAEAPSFEMTWSSTTSSGYCSQEDSDSELEQYFTARTSLARRPRRDQDEPVEWETPDLSQAEIEQKIKEYNAQINSNLFMSLNKDGSYTGFIKVQLKLVRPVSVPSSKKPPSLQDARRGPGRGTSVRRRTSFYLPKDAVKHLHVLSRTRAREVIEALLRKFLVVDDPRKFALFERAERHGQVYLRKLLDDEQPLRLRLLAGPSDKALSFVLKENDSGEVNWDAFSMPELHNFLRILQREEEEHLRQILQKYSYCRQKIQEALHACPLG

SEQ ID NO: 402 - DNA, 1979 bp, Homo sapiens
tctcctcagctccttcccgccgcccagtctggatcctgggggaggcgctgaagtcggggcccgccctgtggccccgcccggcccgcgcttgctagcgcccaaagccagcgaagcacgggcccaaccgggccatgtcgggggagcctgagctcattgagctgcgggagctggcacccgctgggcgcgctgggaagggccgcacccggctggagcgtgccaacgcgctgcgcatcgcgcggggcaccgcgtgcaaccccacacggcagctggtccctggccgtggccaccgcttccagcccgcggggcccgccacgcacacgtggtgcgacctctgtggcgacttcatctggggcgtcgtgcgcaaaggcctgcagtgcgcgcgcctctctgcagattgcaagttcacctgccactaccgctgccgcgcgctcgtctgcctggactgttgcgggccccgggacctgggctgggaacccgcggtggagcgggacacgaacgtggacgagcctgtggagtgggagacacctgacctttctcaagctgagattgagcagaagatcaaggagtacaatgcccagatcaacagcaacctcttcatgagcttgaacaaggacggttcttacacaggcttcatcaaggttcagctgaagctggtgcgccctgtctctgtgccctccagcaagaagccaccctccttgcaggatgcccggcggggcccaggacggggcacaagtgtcaggcgccgcacttccttttacctgcccaaggatgctgtcaagcacctgcatgtgctgtcacgcacaagggcacgtgaagtcattgaggccctgctgcgaaagttcttggtggtggatgacccccgcaagtttgcactctttgagcgcgctgagcgtcacggccaagtgtacttgcggaagctgttggatgatgagcagcccctgcggctgcggctcctggcagggcccagtgacaaggccctgagctttgtcctgaaggaaaatgactctggggaggtgaactgggacgccttcagcatgcctgaactacataacttcctacgtatcctgcagcgggaggaggaggagcacctccgccagatcctgcagaagtactcctattgccgccagaagatccaagaggccctgcacgcctgcccccttgggtgacctcttgtacccccaggtggaaggcagacagcaggcagcgccaagtgcgtgccgtgtgagtgtgacagggccagtggggcctgtggaatgagtgtgcatggaggccctcctgtgctgggggaatgagcccagagaacagcgaagtagcttgctccctgtgtccacctgtgggtgtagccaggtatggctctgcacccctctgccctcattactgggccttagtgggccagggctgccctgagaagctgctccaggcctgcagcaggagtggtgcagacagaagtctcctcaatttttgtctcagaagtgaaaatcttggagaccctgcaaacagaacagggtcatgtttgcaggggtgacggccctcatctatgaggaaaggttttggatcttgaatgtggtctcaggatatccttatcagagctaagggtgggtgctcagaataaggcaggcattgaggaagagtcttggtttctctctacagtgccaactcctcacacaccctgaggtcagggagtgctggctcacagtacagcatgtgccttaatgcttcatatgaggaggatgtccctgggccagggtctgtgtgaatgtgggcactggcccaggttcataccttatttgctaatcaaagccagggtctctccctcaggtgttttttatgaagtgcgtgaatgtatgtaatgtgtggtggcctcagctgaatgcctcctgtggggaaaggggttggggtgacagtcatcatcagggcctggggcctgagagaattggctcaataaagatttcaagatcctcaaaaaaaaaaaaaaaaaa

SEQ ID NO: 403 - protein, 344 aa, Homo sapiens
MSGEPELIELRELAPAGRAGKGRTRLERANALRIARGTACNPTRQLVPGRGHRFQPAGPATHTWCDLCGDFIWGVVRKGLQCARLSADCKFTCHYRCRALVCLDCCGPRDLGWEPAVERDTNVDEPVEWETPDLSQAEIEQKIKEYNAQINSNLFMSLNKDGSYTGFIKVQLKLVRPVSVPSSKKPPSLQDARRGPGRGTSVRRRTSFYLPKDAVKHLHVLSRTRAREVIEALLRKFLVVDDPRKFALFERAERHGQVYLRKLLDDEQPLRLRLLAGPSDKALSFVLKENDSGEVNWDAFSMPELHNFLRILQREEEEHLRQILQKYSYCRQKIQEALHACPLG

SEQ ID NO: 404 - DNA, 1780 bp, Homo sapiens
ttccatggctgcgagaactgacgctccccaaccgtcccgcaactgtcctgtcccagactttggcaccgtcggggtccgtcgtccccgaatgtgacagcatccccaccccggctgctgcccaggatccgccggaccccggcctcgatatgggagacctggaactgctgctgcccggggaagctgaagtgctggtgcggggtctgcgcagcttcccgctacgcgagatgggctccgaagggtggaaccagcagcatgagaacctggagaagctgaacatgcaagccatcctcgatgccacagtcagccagggcgagcccattcaggagctgctggtcacccatgggaaggtcccaacactggtggaggagctgatcgcagtggagatgtggaagcagaaggtgttccctgtgttctgcagggtggaggacttcaagccccagaacaccttccccatctacatggtggtgcaccacgaggcctccatcatcaacctcttggagacagtgttcttccacaaggaggtgtgtgagtcagcagaagacactgtcttggacttggtagactattgccaccgcaaactgaccctgctggtggcccagagtggctgtggtggcccccctgagggggagggatcccaggacagcaaccccatgcaggagctgcagaagcaggcagagctgatggaatttgagattgcactgaaggccctctcagtactacgctacatcacagactgtgtggacagcctctctctcagcaccttgagccgtatgcttagcacacacaacctgccctgcctcctggtggaactgctggagcatagtccctggagccggcgggaaggaggcaagctgcagcagttcgagggcagccgttggcatactgtggccccctcagagcagcaaaagctgagcaagttggacgggcaagtgtggatcgccctgtacaacctgctgctaagccctgaggctcaggcgcgctactgcctcacaagttttgccaagggacggctactcaagcttcgggccttcctcacagacacactgctggaccagctgcccaacctggcccacttgcagagtttcctggcccatctgaccctaactgaaacccagcctcctaagaaggacctggtgttggaacagatcccagaaatctgggagcggctggagcgagaaaacagaggcaagtggcaggcaattgccaagcaccagctccagcatgtgttcagcccctcagagcaggacctgcggctgcaggcgcgaaggtgggctgagacctacaggctggatgtgctagaggcagtggctccagagcggccccgctgtgcttactgcagtgcagaggcttctaagcgctgctcacgatgccagaatgagtggtattgctgcagggagtgccaagtcaagcactgggaaaagcatggaaagacttgtgtcctggcagcccagggtgacagagccaaatgagggctgcagttgctgagggccgaccacccatgccaagggaatccacccagaatgcacccctgaacctcaagatcacggtccagcctctgccggagccccagtctccgcagtggagagcagagcgggcggtaaagctgctgaccgatctccctcctcctcaccccaagtgaaggctcgagacttcctgccccacccagtgggtaggccaagtgtgttgcttcagcaaaccggaccaggagggccagggccggatgtggggaccctcttcctctagcacagtaaagctggcctccagaaacacgggaaaaaaa

SEQ ID NO: 405 - protein, 440 aa, Homo sapiens
MGDLELLLPGEAEVLVRGLRSFPLREMGSEGWNQQHENLEKLNMQAILDATVSQGEPIQELLVTHGKVPTLVEELIAVEMWKQKVFPVFCRVEDFKPQNTFPIYMVVHHEASIINLLETVFFHKEVCESAEDTVLDLVDYCHRKLTLLVAQSGCGGPPEGEGSQDSNPMQELQKQAELMEFEIALKALSVLRYITDCVDSLSLSTLSRMLSTHNLPCLLVELLEHSPWSRREGGKLQQFEGSRWHTVAPSEQQKLSKLDGQVWIALYNLLLSPEAQARYCLTSFAKGRLLKLRAFLTDTLLDQLPNLAHLQSFLAHLTLTETQPPKKDLVLEQIPEIWERLERENRGKWQAIAKHQLQHVFSPSEQDLRLQARRWAETYRLDVLEAVAPERPRCAYCSAEASKRCSRCQNEWYCCRECQVKHWEKHGKTCVLAAQGDRAK

SEQ ID NO: 406 - DNA, 1672 bp, Homo sapiens
agcgtgaatcccttagcgcaccgcctccccaagtgctgccagcatgctgcccctccacgctagggacttgcctgcctctgccgcagcgcagatctgatgcggtggtttcctccaaagaaagcgggatactccgggccctgccgcgcgcaccgccgctccgtcacggagccgctttacttccgggtgcgacgtctacccacccaggacttcctgggacgagccgtcccccgccccagccacgcctctgagtcgcgctgcgcaggcgccattgggcagagggattggcaagcttgcgtgccccagcgacacaggcctcgaggctgtctctgacaagtgttcacaggaggtggggacgcctctgcgcgaggaacgaggagctacgggcctgggcccggttattgccatgggcagcggctgccgcatcgaatgcatattcttcagcgagttccaccccacgctgggacccaagatcacctatcaggtccctgaagacttcatctcccgagagctgtttgacacagtccaagtgtacatcatcaccaagccagagctgcagaacaagcttatcactgtcacagctatggaaaagaagctgatcggctgtcctgtgtgcatcgaacacaagaagtacagccgcaatgctctcctcttcaacctgggcttcgtgtgtgatgcccaggccaagacctgcgccctcgagcccattgttaaaaagctggctggctatctgaccacactagagctagagagcagcttcgtgtccatggaggagagcaagcagaagttggtgcccatcatgaccatcttgctggaggagctaaatgcctcaggccggtgcactctgcccattgatgagtccaacaccatccacttgaaggtgattgagcagcggccagaccctccggtggcccaggagtatgatgtacctgtctttaccaaagacaaggaggatttcttcaactcacagtgggacctcactacacaacaaatcctgccctacattgatgggttccgccacatccagaagatttcagcagaggcagatgtggagctcaacctggtgcgcattgctatccagaacctgctgtactacggcgttgtgacactggtgtccatcctccagtactccaatgtatactgcccaacgcccaaggtccaggacctggtagatgacaagtccctgcaagaggcatgtctatcctacgtgaccaagcaagggcacaagagggccagtctccgggatgtgttccagctatactgcagcctgagccctggcactaccgtgcgagacctcattggccgccacccccagcagctgcagcatgttgatgaacggaagctgatccagttcgggcttatgaagaacctcatcaggcgactacagaagtatcctgtgcgggtgactcgggaagagcagagccaccctgcccggctttatacaggctgccacagctatgacgagatctgctgcaagacaggcatgagctaccatgagctggatgagcggcttgaaaatgaccccaacatcatcatctgctggaagtgaggctggtagtgactggatggacacattgctgtgggtagtccctcctactaggaggcttgtcatactgtctagaggttgactcttagttctgtaaataaagacatccatttcaaacagcaaaaaaaa

SEQ ID NO: 407 - protein, 380 aa, Homo sapiens
MGSGCRIECIFFSEFHPTLGPKITYQVPEDFISRELFDTVQVYIITKPELQNKLITVTAMEKKLIGCPVCIEHKKYSRNALLFNLGFVCDAQAKTCALEPIVKKLAGYLTTLELESSFVSMEESKQKLVPIMTILLEELNASGRCTLPIDESNTIHLKVIEQRPDPPVAQEYDVPVFTKDKEDFFNSQWDLTTQQILPYIDGFRHIQKISAEADVELNLVRIAIQNLLYYGVVTLVSILQYSNVYCPTPKVQDLVDDKSLQEACLSYVTKQGHKRASLRDVFQLYCSLSPGTTVRDLIGRHPQQLQHVDERKLIQFGLMKNLIRRLQKYPVRVTREEQSHPARLYTGCHSYDEICCKTGMSYHELDERLENDPNIIICWK

SEQ ID NO: 408 - DNA, 1243 bp, Homo sapiens
gtcgcacccggaagtaaagcggctccgtgacggagcggcggtgcgcgcggcagggcccggagtatcccgctttctttggaggaaaccaccgcatcagatctgcgctgcggcagaggcagccttttctccagtgaggagtgaacagtgggcacctgagatcctggcccacgctactatgctttcaggctacaaccactagcacggctgacgatggccctttctgcggagaccgagtcacacatctaccgagctctgcgtactgcttctggcgctgccgcccaccttgtggccctgggctttaccatctttgtggctgtgcttgccaggcctggctccagcctgttctcctggcacccggtgcttatgtctttggctttctccttcctgatgaccgaggcactactggtgttttctcctgagagttcgctgctgcactccctctcacggaaaggccgagcacgctgccactgggtgctgcagctgctggccctgctgtgtgcactgctgggcctcggccttgtcatcctccacaaagagcagcttggcaaagcccacctggttacgcggcatgggcaggcagggctgctggctgtgctgtgggcagggctgcagtgctcaggtggggtggggctgctctaccccaagctgctgccccgatggcccctggcgaagctcaagctataccatgctacttctgggctggtgggctacctgctgggtagtgccagcctcttgctgggcatgtgctcactctggttcactgcctctgtcactggtgcagcctggtacctggctgtattatgccctgtcctcaccagcttggtcattatgaaccaggtgagcaatgcctacctataccgcaagaggatccaaccatgagctcttcccagcctaggggaagcctggatttgcccctccatgtaggagctgggcctagggacctgttgaactctctcagctgagtcaggggacacctcaggcactgggacagttgggcatttggaggcccgtgtgtgaattcctgctcctcatgctggagtgcctcccatttccttcccctttctctgtcatcccagaggaacataggcatcatgtgtctggatgaagctggggctgcaagactgcctctcctgcaaggcagctcatacttgtactgtatgttcagaaattttaggagagaaaaaagtaaaaaatttgtaaaaaaaaaaaaaaaaaaaaaaaaaaaaaaaaaaaaaaaaaaaaa

SEQ ID NO: 409 - protein, 222 aa, Homo sapiens
MALSAETESHIYRALRTASGAAAHLVALGFTIFVAVLARPGSSLFSWHPVLMSLAFSFLMTEALLVFSPESSLLHSLSRKGRARCHWVLQLLALLCALLGLGLVILHKEQLGKAHLVTRHGQAGLLAVLWAGLQCSGGVGLLYPKLLPRWPLAKLKLYHATSGLVGYLLGSASLLLGMCSLWFTASVTGAAWYLAVLCPVLTSLVIMNQVSNAYLYRKRIQP

SEQ ID NO: 410 - DNA, 2178 bp, Homo sapiens
ggccccccgagagaagaggtacggtcgaagccaggagccaggccgagcgggagctgaccaggcttgactcgggtacagaacgaggcaccagtccccttgcgaaccgaagggcctcgcagtggatggaggaggcccagccctgaggtcaacgccaaccaggctagcctggcacggggcctacagggtgggtaggcgggcgtgccgcagccgtccagggccttccctcaggtcccgggcgaggggcctacgctgcggcccggcaacaaggcccgactcggcccctcgggaccagagccccacccgatcggaagcggatcctttaccagggccataggccagtgactaggccgggcctgggcctcccatcggggccggactaggacgaggccccggggaggcccctggcctaccagacccttttctcaggccgacagccgccaggaagatgcaacgtgccctgccaggcgcccgccagcacttgggggccattctggccagcgccagcgtggtggtgaaggctctgtgtgcggcggtactattcctctacctgctctccttcgccgtggacacaggctgcctggcggtcaccccgggctacctctttcctcccaacttctggatctggaccctggccacccatgggctgatggagcagcatgtgtgggacgtggccatcagcctgacaacggtggtggtggccgggcgtttgctggagcccctctggggggccttggagctgctcatcttcttctcagtggtgaatgtgtctgtagggctgctgggggccttcgcctacctcctcacctacatggcttccttcaacctggtctacctgttcactgtccgtatccacggcgccttgggcttcctaggtggcgtcctggtggcactcaagcaaaccatgggggactgtgtggtcctgcgagtgccccaggtgcgcgtcagtgtgatgcccatgctgctgctggcgctgctgctcctgctgcggctcgccacgctgctccagagcccggcgctggcttcctatggcttcgggctgctctccagttgggtatatcttcgcttctaccagcgccatagccggggccgaggggacatggctgaccactttgctttcgccactttcttccctgagatcctgcagcctgtggtgggtttgctggcgaacttggtgcacagcctcctggtgaaggtaaagatatgccagaagacggtgaagcgctacgatgtgggtgccccatcctccatcaccatcagcctgccaggcacagaccctcaagacgccgagcggagaaggcaactggccctgaaggcactcaatgagcggctgaagagagtggaagaccagtccatctggcccagcatggatgatgatgaagaggagtctggggccaaggtggacagccccctgccctcagacaaagctcccacacccccagggaagggggctgccccagaatccagtctaatcaccttcgaggcagctcccccgacgctgtaactccagaccaccttgagtgtggcacctcccctcccaagccccccttgacatcctctcagctactccagggcacctgactgctctgaggagagggaagaaggcctgctggggctttccatggccttctgctgtttctcgccaacactacccaggactcttgctacctggttccaactccagacaaccactatgccaggcccggagcctctgaggcatcggccagtccaggccctcatctgaggtaagaatgtacatcagctggcagccccaagcaagtggctgcagggacactgatgccacagctcctgggccggccctcacatctgaaactggttgccgagagccctgagccaaggcaaggatttgccaaaaatgttctgggggcccagcaaatgcaggagccgacctggggctgcacatccctgcccatccccagaaagactgttcctgtcaggatttgtttccctctgctgtggcggtgactgcttctggaccagaacagctccagctcccaggtattttctacaggaccacttgagtgggcagccaagcccaggctcgcagtatcaataaagcagttctctgaggaatgacaaaaaaaaaaaaaaaaaaaaaaaaaaaaaaaaaaaaaaaaaaaaaaaaaaaaaaaaaaaaaaaaaaaaaaaaaaaaaaaaaaa

SEQ ID NO: 411 - protein, 351 aa, Homo sapiens
MQRALPGARQHLGAILASASVVVKALCAAVLFLYLLSFAVDTGCLAVTPGYLFPPNFWIWTLATHGLMEQHVWDVAISLTTVVVAGRLLEPLWGALELLIFFSVVNVSVGLLGAFAYLLTYMASFNLVYLFTVRIHGALGFLGGVLVALKQTMGDCVVLRVPQVRVSVMPMLLLALLLLLRLATLLQSPALASYGFGLLSSWVYLRFYQRHSRGRGDMADHFAFATFFPEILQPVVGLLANLVHSLLVKVKICQKTVKRYDVGAPSSITISLPGTDPQDAERRRQLALKALNERLKRVEDQSIWPSMDDDEEESGAKVDSPLPSDKAPTPPGKGAAPESSLITFEAAPPTL

SEQ ID NO: 412 - DNA, 5343 bp, Homo sapiens
gccccccctccccgcggcgccgcatcttgaatggaaacatggcggtgccggctcggacctgcggcgcctctcggcccggcccagcgcggactgcgcgcccctggcccggctgcggcccccaccctggccccggcacccggcgcccgacgtccgggcccccgcgcccgctgtggctgctgctgccgcttctaccgctgctcgccgcccccggcgcctctgcctacagcttcccccagcagcacacgatgcagcactgggcccggcgtctggagcaggaggtcgacggcgtgatgcggatttttggaggcgtccagcagctccgtgagatttacaaggacaaccggaacctgttcgaggtacaggagaatgagcctcagaagttggtggagaaggtggcaggggacattgagagccttctggacaggaaggtgcaggccctgaagagactggctgatgctgcagagaacttccagaaagcacaccgctggcaggacaacatcaaggaggaagacatcgtgtactatgacgccaaggctgacgctgagctggacgaccctgagagtgaggatgtggaaagggggtctaaggccagcaccctaaggctggacttcatcgaggacccaaacttcaagaacaaggtcaactattcatacgcggctgtacagatccctacggacatctacaaaggctccactgtcatcctcaatgagctcaactggacagaggccctggagaatgtgttcatggaaaaccgcagacaagaccccacactgctgtggcaggtcttcggcagcgccacaggagtcactcgctactacccggccaccccgtggcgagcccccaagaagatcgacctgtacgatgtccgaaggagaccctggtatatccagggggcctcgtcacccaaagacatggtcatcatcgtggatgtgagtggcagtgtgagcggcctgaccctgaagctgatgaagacatctgtctgcgagatgctggacacgctgtctgatgatgactatgtgaatgtggcctcgttcaacgagaaggcacagcctgtgtcatgcttcacacacctggtgcaggccaatgtgcgcaacaagaaggtgttcaaggaagctgtgcagggcatggtggccaagggcaccacaggctacaaggccggctttgagtatgcctttgaccagctgcagaactccaacatcactcgggccaactgcaacaagatgatcatgatgttcacggatggtggtgaggaccgcgtgcaggacgtctttgagaagtacaattggccaaaccggacggtgcgcgtgtttactttctccgtggggcagcataactatgacgtcacaccgctgcagtggatggcctgtgccaacaaaggctactattttgagatcccttccatcggagccatccgcatcaacacacaggaatatctagatgtgttgggcaggcccatggtgctggcaggcaaggaggccaagcaggtgcagtggaccaacgtgtatgaggatgcactgggactggggttggtggtaacagggaccctccctgttttcaacctgacacaggatggccctggggaaaagaagaaccagctgatcctgggcgtgatgggcattgacgtggctctgaatgacatcaagaggctgacccccaactacacgcttggagccaacggctatgtgtttgccattgacctgaacggctacgtgttgctgcaccccaatctcaagccccagaccaccaacttccgggagcctgtgactctggacttcctggatgcggagctagaggatgagaacaaggaagagatccgtcggagcatgattgatggcaacaagggccacaagcagatcagaacgttggtcaagtccctggatgagaggtacatagatgaggtgacacggaactacacctgggtgcctataaggagcactaactacagcctggggctggtgctcccaccctacagcaccttctacctccaagccaatctcagtgaccagatcctgcaggtcaagtattttgagttcctgctccccagcagctttgagtctgaaggacacgttttcattgctcccagagagtactgcaaggacctgaatgcctcagacaacaacaccgagttcctgaaaaactttattgagctcatggagaaagtgactccagactccaagcagtgcaacaacttccttctgcacaacctgatcttggacacgggcatcacgcagcagctggtagagcgtgtgtggagggaccaggatctcaacacgtacagcctactggccgtgttcgctgccacagacggtggcatcacccgagtcttccccaacaaggcagctgaggactggacagagaaccctgagcccttcaatgccagcttctaccgccgcagcctggataaccacggttatgtcttcaagcccccacaccaggatgccctgttaaggccgctggagctggagaatgacactgtgggcatcctcgtcagcacagctgtggagctcagcctaggcaggcgcacactgaggccagcagtggtgggcgtcaagctggacctagaggcttgggctgagaagttcaaggtgctagccagcaaccgtacccaccaagaccagcctcagaagtgcggccccaacagccactgtgagatggactgcgaggttaacaatgaggacttactctgtgtcctcattgatgatggaggattcctggtgctgtcaaaccagaaccatcagtgggaccaggtgggcaggttcttcagtgaggtggatgccaacctgatgctggcactctacaataactccttctacacccgcaaggagtcctatgactatcaggcagcctgtgcccctcagccccctggcaacctgggtgctgcaccccggggtgtctttgtgcccaccgttgcagatttccttaacctggcctggtggacctctgctgccgcctggtccctgttccagcagcttctctacggcctcatctaccacagctggttccaagcagaccccgcggaggccgaggggagccccgagacgcgcgagagcagctgcgtcatgaaacagacccagtactacttcggctcggtaaacgcctcctacaacgccatcatcgactgcggaaactgctccaggctgttccacgcgcagagactgaccaacaccaatcttctctttgtggtggccgagaagccgctgtgcagccagtgcgaggctggccggctgctgcagaaggagacgcactgcccagcggacggcccggagcagtgtgagctagtgcagagaccgcgataccggagaggcccgcacatctgcttcgactacaacgcgacagaagatacctcagactgtggccgcggggcctccttcccgccgtcgctgggcgtcctggtctccctgcaactgctgctcctcctgggcctgccgccccggccgcagcctcaagtcctcgtccacgcctctcgccgcctctgagcaccctgccccaccccacctccactcccacctcacccggcctcttcgcctttcccaccctcctgccccacactccccgccttagagcctcgtccctccctcactgaaggacctgagctggccaggccctgagagtctggtctgcgccttgggatggggagtcccaaagcgggacgccgcaggtgtttggcacccaaatcacatctcacctccgaactgttcaagtgtccccagacccttcttgcctgctgggctccccccagtgggatgggacagggaggccacacgcactggtgccaaaaccaggcctctgctgccgcccttcctggaggctgcctatgttgggggggaccctgcctcagctgacccggcctctctgccccacccaagcccaaacttggtttctgtgagaatagtggaggaaggtgagatggccagtttgaagcctgtgcctcccagcttaaatcctagcaggagagaggctctggggcagcccccatgggctcctgcccctttcaggcctacagccacatccccaagcccaccaggtgtcaggatagtcacagtgataccagttcagacactaccccatatacacctggaacattgaggatggaaactggactcacattcgacataccccactgggcacacgcacaaacacacacactatggggtggggtgggtgtaggggcttacaaagccttacacagggcgaggggttggtgggagggttggcacctgcacactccatctcctgctcaccacctgcctctaatctgagctgcagcctggctggtcctcccatttctaaagctgaatgtcaaacagtgccaaatgctggggcagggggtgaagaaccctctgtcccacccctagccaccagtgtcctccaagtgccccctcacctctccaggtgctcattgtaaccatttctcactagtgtcaggcccccagtgggaccacatgccactgcctgcacctttcggcagaggaacccccaccagacatcaccctttgccttagcaggggtgactttgtctctcctggctgggccatccttccgccaatctggcccttacacactcaggcctgtgcccactccctatctccttcccacccctacacacacactccctgcttgcaggaggccaaactgtccctcccttgctgaacacacacacacacacacacacacaggtggggactgggcacagctcttcacaccattcattctggtcatttcccccaaaggcatcccagcctgggggccagtggggaactgagggcaaggggatatagtgatggggctcagatggactgggaggagggggagggtgatgcattaattaatggcttcgttaattaatgtcatgttgcttgtcgctttctcagtgtgtgtgtgtggtccatgcccactgctggtgccagggtgggtgtccatgtgcacccggcctggatgccagctgtgtccttcgggggcgtgcgtgtaactgtagtgtagtcaggtgctcaatggagaatataaacatatacagaaaaatatatattttaagtttaaaaaacagaaaaacagacaaaacaatccccatcaggtagctgtctaacccccagctgggtctaatccttctcattacccacccgacctggctgcccctcaccttgggctgggggactggggggccatttccttttctctgccctttttttgttgttctattttgtacagacaagttggaaaaacaacagcgacaaaaaagtcaagaaactttgtaaaatatcgtgtgtgtgattccttgtaaaatattttcaaatggtttattacagaagatcagttattaaataatgttcatattttcacttcaaa

SEQ ID NO: 413 - protein, 1145 aa, Homo sapiens
MAVPARTCGASRPGPARTARPWPGCGPHPGPGTRRPTSGPPRPLWLLLPLLPLLAAPGASAYSFPQQHTMQHWARRLEQEVDGVMRIFGGVQQLREIYKDNRNLFEVQENEPQKLVEKVAGDIESLLDRKVQALKRLADAAENFQKAHRWQDNIKEEDIVYYDAKADAELDDPESEDVERGSKASTLRLDFIEDPNFKNKVNYSYAAVQIPTDIYKGSTVILNELNWTEALENVFMENRRQDPTLLWQVFGSATGVTRYYPATPWRAPKKIDLYDVRRRPWYIQGASSPKDMVIIVDVSGSVSGLTLKLMKTSVCEMLDTLSDDDYVNVASFNEKAQPVSCFTHLVQANVRNKKVFKEAVQGMVAKGTTGYKAGFEYAFDQLQNSNITRANCNKMIMMFTDGGEDRVQDVFEKYNWPNRTVRVFTFSVGQHNYDVTPLQWMACANKGYYFEIPSIGAIRINTQEYLDVLGRPMVLAGKEAKQVQWTNVYEDALGLGLVVTGTLPVFNLTQDGPGEKKNQLILGVMGIDVALNDIKRLTPNYTLGANGYVFAIDLNGYVLLHPNLKPQTTNFREPVTLDFLDAELEDENKEEIRRSMIDGNKGHKQIRTLVKSLDERYIDEVTRNYTWVPIRSTNYSLGLVLPPYSTFYLQANLSDQILQVKYFEFLLPSSFESEGHVFIAPREYCKDLNASDNNTEFLKNFIELMEKVTPDSKQCNNFLLHNLILDTGITQQLVERVWRDQDLNTYSLLAVFAATDGGITRVFPNKAAEDWTENPEPFNASFYRRSLDNHGYVFKPPHQDALLRPLELENDTVGILVSTAVELSLGRRTLRPAVVGVKLDLEAWAEKFKVLASNRTHQDQPQKCGPNSHCEMDCEVNNEDLLCVLIDDGGFLVLSNQNHQWDQVGRFFSEVDANLMLALYNNSFYTRKESYDYQAACAPQPPGNLGAAPRGVFVPTVADFLNLAWWTSAAAWSLFQQLLYGLIYHSWFQADPAEAEGSPETRESSCVMKQTQYYFGSVNASYNAIIDCGNCSRLFHAQRLTNTNLLFVVAEKPLCSQCEAGRLLQKETHCPADGPEQCELVQRPRYRRGPHICFDYNATEDTSDCGRGASFPPSLGVLVSLQLLLLLGLPPRPQPQVLVHASRRL

SEQ ID NO: 414 - DNA, 5337 bp, Homo sapiens
gccccccctccccgcggcgccgcatcttgaatggaaacatggcggtgccggctcggacctgcggcgcctctcggcccggcccagcgcggactgcgcgcccctggcccggctgcggcccccaccctggccccggcacccggcgcccgacgtccgggcccccgcgcccgctgtggctgctgctgccgcttctaccgctgctcgccgcccccggcgcctctgcctacagcttcccccagcagcacacgatgcagcactgggcccggcgtctggagcaggaggtcgacggcgtgatgcggatttttggaggcgtccagcagctccgtgagatttacaaggacaaccggaacctgttcgaggtacaggagaatgagcctcagaagttggtggagaaggtggcaggggacattgagagccttctggacaggaaggtgcaggccctgaagagactggctgatgctgcagagaacttccagaaagcacaccgctggcaggacaacatcaaggaggaagacatcgtgtactatgacgccaaggctgacgctgagctggacgaccctgagagtgaggatgtggaaagggggtctaaggccagcaccctaaggctggacttcatcgaggacccaaacttcaagaacaaggtcaactattcatacgcggctgtacagatccctacggacatctacaaaggctccactgtcatcctcaatgagctcaactggacagaggccctggagaatgtgttcatggaaaaccgcagacaagaccccacactgctgtggcaggtcttcggcagcgccacaggagtcactcgctactacccggccaccccgtggcgagcccccaagaagatcgacctgtacgatgtccgaaggagaccctggtatatccagggggcctcgtcacccaaagacatggtcatcatcgtggatgtgagtggcagtgtgagcggcctgaccctgaagctgatgaagacatctgtctgcgagatgctggacacgctgtctgatgatgactatgtgaatgtggcctcgttcaacgagaaggcacagcctgtgtcatgcttcacacacctggtgcaggccaatgtgcgcaacaagaaggtgttcaaggaagctgtgcagggcatggtggccaagggcaccacaggctacaaggccggctttgagtatgcctttgaccagctgcagaactccaacatcactcgggccaactgcaacaagatgatcatgatgttcacggatggtggtgaggaccgcgtgcaggacgtctttgagaagtacaattggccaaaccggacggtgcgcgtgtttactttctccgtggggcagcataactatgacgtcacaccgctgcagtggatggcctgtgccaacaaaggctactattttgagatcccttccatcggagccatccgcatcaacacacaggaatatctagatgtgttgggcaggcccatggtgctggcaggcaaggaggccaagcaggtgcagtggaccaacgtgtatgaggatgcactgggactggggttggtggtaacagggaccctccctgttttcaacctgacacaggatggccctggggaaaagaagaaccagctgatcctgggcgtgatgggcattgacgtggctctgaatgacatcaagaggctgacccccaactacacgcttggagccaacggctatgtgtttgccattgacctgaacggctacgtgttgctgcaccccaatctcaagccccagaccaccaacttccgggagcctgtgactctggacttcctggatgcggagctagaggatgagaacaaggaagagatccgtcggagcatgattgatggcaacaagggccacaagcagatcagaacgttggtcaagtccctggatgagaggtacatagatgaggtgacacggaactacacctgggtgcctataaggagcactaactacagcctggggctggtgctcccaccctacagcaccttctacctccaagccaatctcagtgaccagatcctgcaggtcaagtattttgagttcctgctccccagcagctttgagtctgaaggacacgttttcattgctcccagagagtactgcaaggacctgaatgcctcagacaacaacaccgagttcctgaaaaactttattgagctcatggagaaagtgactccagactccaagcagtgcaacaacttccttctgcacaacctgatcttggacacgggcatcacgcagcagctggtagagcgtgtgtggagggaccaggatctcaacacgtacagcctactggccgtgttcgctgccacagacggtggcatcacccgagtcttccccaacaaggcagctgaggactggacagagaaccctgagcccttcaatgccagcttctaccgccgcagcctggataaccacggttatgtcttcaagcccccacaccaggatgccctgttaaggccgctggagctggagaatgacactgtgggcatcctcgtcagcacagctgtggagctcagcctaggcaggcgcacactgaggccagcagtggtgggcgtcaagctggacctagaggcttgggctgagaagttcaaggtgctagccagcaaccgtacccaccaagaccagcctcagaagtgcggccccaacagccactgtgagatggactgcgaggttaacaatgaggacttactctgtgtcctcattgatgatggaggattcctggtgctgtcaaaccagaaccatcagtgggaccaggtgggcaggttcttcagtgaggtggatgccaacctgatgctggcactctacaataactccttctacacccgcaaggagtcctatgactatcaggcagcctgtgcccctcagccccctggcaacctgggtgctgcaccccggggtgtctttgtgcccaccgttgcagatttccttaacctggcctggtggacctctgctgccgcctggtccctgttccagcagcttctctacggcctcatctaccacagctggttccaagcagaccccgcggaggccgaggggagccccgagacgcgcgagagcagctgcgtcatgaaacagacccagtactacttcggctcggtaaacgcctcctacaacgccatcatcgactgcggaaactgctccaggctgttccacgcgcagagactgaccaacaccaatcttctctttgtggtggccgagaagccgctgtgcagccagtgcgaggctggccggctgctgcagaaggagacgcactcggacggcccggagcagtgtgagctagtgcagagaccgcgataccggagaggcccgcacatctgcttcgactacaacgcgacagaagatacctcagactgtggccgcggggcctccttcccgccgtcgctgggcgtcctggtctccctgcaactgctgctcctcctgggcctgccgccccggccgcagcctcaagtcctcgtccacgcctctcgccgcctctgagcaccctgccccaccccacctccactcccacctcacccggcctcttcgcctttcccaccctcctgccccacactccccgccttagagcctcgtccctccctcactgaaggacctgagctggccaggccctgagagtctggtctgcgccttgggatggggagtcccaaagcgggacgccgcaggtgtttggcacccaaatcacatctcacctccgaactgttcaagtgtccccagacccttcttgcctgctgggctccccccagtgggatgggacagggaggccacacgcactggtgccaaaaccaggcctctgctgccgcccttcctggaggctgcctatgttgggggggaccctgcctcagctgacccggcctctctgccccacccaagcccaaacttggtttctgtgagaatagtggaggaaggtgagatggccagtttgaagcctgtgcctcccagcttaaatcctagcaggagagaggctctggggcagcccccatgggctcctgcccctttcaggcctacagccacatccccaagcccaccaggtgtcaggatagtcacagtgataccagttcagacactaccccatatacacctggaacattgaggatggaaactggactcacattcgacataccccactgggcacacgcacaaacacacacactatggggtggggtgggtgtaggggcttacaaagccttacacagggcgaggggttggtgggagggttggcacctgcacactccatctcctgctcaccacctgcctctaatctgagctgcagcctggctggtcctcccatttctaaagctgaatgtcaaacagtgccaaatgctggggcagggggtgaagaaccctctgtcccacccctagccaccagtgtcctccaagtgccccctcacctctccaggtgctcattgtaaccatttctcactagtgtcaggcccccagtgggaccacatgccactgcctgcacctttcggcagaggaacccccaccagacatcaccctttgccttagcaggggtgactttgtctctcctggctgggccatccttccgccaatctggcccttacacactcaggcctgtgcccactccctatctccttcccacccctacacacacactccctgcttgcaggaggccaaactgtccctcccttgctgaacacacacacacacacacacacacaggtggggactgggcacagctcttcacaccattcattctggtcatttcccccaaaggcatcccagcctgggggccagtggggaactgagggcaaggggatatagtgatggggctcagatggactgggaggagggggagggtgatgcattaattaatggcttcgttaattaatgtcatgttgcttgtcgctttctcagtgtgtgtgtgtggtccatgcccactgctggtgccagggtgggtgtccatgtgcacccggcctggatgccagctgtgtccttcgggggcgtgcgtgtaactgtagtgtagtcaggtgctcaatggagaatataaacatatacagaaaaatatatattttaagtttaaaaaacagaaaaacagacaaaacaatccccatcaggtagctgtctaacccccagctgggtctaatccttctcattacccacccgacctggctgcccctcaccttgggctgggggactggggggccatttccttttctctgccctttttttgttgttctattttgtacagacaagttggaaaaacaacagcgacaaaaaagtcaagaaactttgtaaaatatcgtgtgtgtgattccttgtaaaatattttcaaatggtttattacagaagatcagttattaaataatgttcatattttcacttcaaa

SEQ ID NO: 415 - protein, 1143 aa, Homo sapiens
MAVPARTCGASRPGPARTARPWPGCGPHPGPGTRRPTSGPPRPLWLLLPLLPLLAAPGASAYSFPQQHTMQHWARRLEQEVDGVMRIFGGVQQLREIYKDNRNLFEVQENEPQKLVEKVAGDIESLLDRKVQALKRLADAAENFQKAHRWQDNIKEEDIVYYDAKADAELDDPESEDVERGSKASTLRLDFIEDPNFKNKVNYSYAAVQIPTDIYKGSTVILNELNWTEALENVFMENRRQDPTLLWQVFGSATGVTRYYPATPWRAPKKIDLYDVRRRPWYIQGASSPKDMVIIVDVSGSVSGLTLKLMKTSVCEMLDTLSDDDYVNVASFNEKAQPVSCFTHLVQANVRNKKVFKEAVQGMVAKGTTGYKAGFEYAFDQLQNSNITRANCNKMIMMFTDGGEDRVQDVFEKYNWPNRTVRVFTFSVGQHNYDVTPLQWMACANKGYYFEIPSIGAIRINTQEYLDVLGRPMVLAGKEAKQVQWTNVYEDALGLGLVVTGTLPVFNLTQDGPGEKKNQLILGVMGIDVALNDIKRLTPNYTLGANGYVFAIDLNGYVLLHPNLKPQTTNFREPVTLDFLDAELEDENKEEIRRSMIDGNKGHKQIRTLVKSLDERYIDEVTRNYTWVPIRSTNYSLGLVLPPYSTFYLQANLSDQILQVKYFEFLLPSSFESEGHVFIAPREYCKDLNASDNNTEFLKNFIELMEKVTPDSKQCNNFLLHNLILDTGITQQLVERVWRDQDLNTYSLLAVFAATDGGITRVFPNKAAEDWTENPEPFNASFYRRSLDNHGYVFKPPHQDALLRPLELENDTVGILVSTAVELSLGRRTLRPAVVGVKLDLEAWAEKFKVLASNRTHQDQPQKCGPNSHCEMDCEVNNEDLLCVLIDDGGFLVLSNQNHQWDQVGRFFSEVDANLMLALYNNSFYTRKESYDYQAACAPQPPGNLGAAPRGVFVPTVADFLNLAWWTSAAAWSLFQQLLYGLIYHSWFQADPAEAEGSPETRESSCVMKQTQYYFGSVNASYNAIIDCGNCSRLFHAQRLTNTNLLFVVAEKPLCSQCEAGRLLQKETHSDGPEQCELVQRPRYRRGPHICFDYNATEDTSDCGRGASFPPSLGVLVSLQLLLLLGLPPRPQPQVLVHASRRL

SEQ ID NO: 416 - DNA, 3689 bp, Homo sapiens
cggccgctctcgtcgccgccgcagcgggcgcgtcggagggagcccagcatggccgggccgggctcgccgcgccgcgcgtcccggggggcctcggcgcttctcgctgccgcgcttctctacgccgcgctgggggacgtggtgcgctcggagcagcagataccgctctccgtggtgaagctctgggcctcggcttttggtggggagataaaatccattgctgctaagtactccggttcccagcttctgcaaaagaaatacaaagagtatgagaaagacgttgccatagaagaaatcgatggcctccaactggtaaagaagctggcaaagaacatggaagagatgtttcacaagaagtctgaggccgtcaggcgtctggtggaggctgcagaagaagcacacctgaaacatgaatttgatgcagacttacagtatgaatacttcaatgctgtgctgataaatgaaagggacaaagacgggaattttttggagctgggaaaggaattcatcttagccccaaatgaccattttaataatttgcctgtgaacatcagtctaagtgacgtccaagtaccaacgaacatgtacaacaaagaccctgcaattgtcaatggggtttattggtctgaatctctaaacaaagtttttgtagataactttgaccgtgacccatctctcatatggcagtactttggaagtgcaaagggcttttttaggcagtatccggggattaaatgggaaccagatgagaatggagtcattgccttcgactgcaggaaccgaaaatggtacatccaggcagcaacttctccgaaagacgtggtcattttagttgacgtcagtggcagcatgaaaggactccgtctgactatcgcgaagcaaacagtctcatccattttggatacacttggggatgatgacttcttcaacataattgcttataatgaggagcttcactatgtggaaccttgcctgaatggaactttggtgcaagccgacaggacaaacaaagagcacttcagggagcatctggacaaacttttcgccaaaggaattggaatgttggatatagctctgaatgaggccttcaacattctgagtgatttcaaccacacgggacaaggaagtatctgcagtcaggccatcatgctcataactgatggggcggtggacacctatgatacaatctttgcaaaatacaattggccagatcgaaaggttcgcatcttcacatacctcattggacgagaggctgcgtttgcagacaatctaaagtggatggcctgtgccaacaaaggattttttacccagatctccaccttggctgatgtgcaggagaatgtcatggaataccttcacgtgcttagccggcccaaagtcatcgaccaggagcatgatgtggtgtggaccgaagcttacattgacagcactctccctcaggcacaaaagctgactgatgatcagggccccgtcctgatgaccactgtagccatgcctgtgtttagtaagcagaacgaaaccagatcgaagggcattcttctgggagtggttggcacagatgtcccagtgaaagaacttctgaagaccatccccaaatacaagttagggattcacggttatgcctttgcaatcacaaataatggatatatcctgacgcatccggaactcaggctgctgtacgaagaaggaaaaaagcgaaggaaacctaactatagtagcgttgacctctctgaggtggagtgggaagaccgagatgacgtgttgagaaatgctatggtgaatcgaaagacggggaagttttccatggaggtgaagaagacagtggacaaagggaaacgggttttggtgatgacaaatgactactattatacagacatcaagggtactcctttcagtttaggtgtggcgctttccagaggtcatgggaaatatttcttccgagggaatgtaaccatcgaagaaggcctgcatgacttagaacatcccgatgtgtccttggcagatgaatggtcctactgcaacactgacctacaccctgagcaccgccatctgtctcagttagaagcgattaagctctacctaaaaggcaaagaacctctgctccagtgtgataaagaattgatccaagaagtcctttttgacgcggtggtgagtgcccccattgaagcgtattggaccagcctggccctcaacaaatctgaaaattctgacaagggcgtggaggttgccttcctcggcactcgcacgggcctctccagaatcaacctgtttgtcggggctgagcagctcaccaatcaggacttcctgaaagctggcgacaaggagaacatttttaacgcagaccatttccctctctggtaccgaagagccgctgagcagattccagggagcttcgtctactcgatcccattcagcactggaccagtcaataaaagcaatgtggtgacagcaagtacatccatccagctcctggatgaacggaaatctcctgtggtggcagctgtaggcattcagatgaaacttgaatttttccaaaggaagttctggactgccagcagacagtgtgcttccctggatggcaaatgctccatcagctgtgatgatgagactgtgaattgttacctcatagacaataatggatttattttggtgtctgaagactacacacagactggagacttttttggtgagatcgagggagctgtgatgaacaaattgctaacaatgggctcctttaaaagaattaccctttatgactaccaagccatgtgtagagccaacaaggaaagcagcgatggcgcccatggcctcctggatccttataatgccttcctctctgcagtaaaatggatcatgacagaacttgtcttgttcctggtggaatttaacctctgcagttggtggcactccgatatgacagctaaagcccagaaattgaaacagaccctggagccttgtgatactgaatatccagcattcgtctctgagcgcaccatcaaggagactacagggaatattgcttgtgaagactgctccaagtcctttgtcatccagcaaatcccaagcagcaacctgttcatggtggtggtggacagcagctgcctctgtgaatctgtggcccccatcaccatggcacccattgaaatcaggtataatgaatcccttaagtgtgaacgtctaaaggcccagaagatcagaaggcgcccagaatcttgtcatggcttccatcctgaggagaatgcaagggagtgtgggggtgcgccgagtctccaagcccagacagtcctccttctgctccctctgcttttgatgctcttctcaaggtgacactgactgagatgttctcttactgactgagatgttctcttggcatgctaaatcatggataaactgtgaaccaaaatatggtgcaacatacgagacatgaatatagtccaaccatcagcatctcatcatgattttaaactgtgcgtgatataaactcttaaagatatgttgacaaaaagttatctatcatctttttactttgccagtcatgcaaatgtgagtttgccacatgataatcacccttcatcagaaatgggaccgcaagtggtaggcagtgtcccttctgcttgaaacctattgaaaccaatttaaaactgtgtactttttaaataaagtatattaaaatcataaaaaaaaaaaaaaaa

SEQ ID NO: 417 - protein, 1091 aa, Homo sapiens
MAGPGSPRRASRGASALLAAALLYAALGDVVRSEQQIPLSVVKLWASAFGGEIKSIAAKYSGSQLLQKKYKEYEKDVAIEEIDGLQLVKKLAKNMEEMFHKKSEAVRRLVEAAEEAHLKHEFDADLQYEYFNAVLINERDKDGNFLELGKEFILAPNDHFNNLPVNISLSDVQVPTNMYNKDPAIVNGVYWSESLNKVFVDNFDRDPSLIWQYFGSAKGFFRQYPGIKWEPDENGVIAFDCRNRKWYIQAATSPKDVVILVDVSGSMKGLRLTIAKQTVSSILDTLGDDDFFNIIAYNEELHYVEPCLNGTLVQADRTNKEHFREHLDKLFAKGIGMLDIALNEAFNILSDFNHTGQGSICSQAIMLITDGAVDTYDTIFAKYNWPDRKVRIFTYLIGREAAFADNLKWMACANKGFFTQISTLADVQENVMEYLHVLSRPKVIDQEHDVVWTEAYIDSTLPQAQKLTDDQGPVLMTTVAMPVFSKQNETRSKGILLGVVGTDVPVKELLKTIPKYKLGIHGYAFAITNNGYILTHPELRLLYEEGKKRRKPNYSSVDLSEVEWEDRDDVLRNAMVNRKTGKFSMEVKKTVDKGKRVLVMTNDYYYTDIKGTPFSLGVALSRGHGKYFFRGNVTIEEGLHDLEHPDVSLADEWSYCNTDLHPEHRHLSQLEAIKLYLKGKEPLLQCDKELIQEVLFDAVVSAPIEAYWTSLALNKSENSDKGVEVAFLGTRTGLSRINLFVGAEQLTNQDFLKAGDKENIFNADHFPLWYRRAAEQIPGSFVYSIPFSTGPVNKSNVVTASTSIQLLDERKSPVVAAVGIQMKLEFFQRKFWTASRQCASLDGKCSISCDDETVNCYLIDNNGFILVSEDYTQTGDFFGEIEGAVMNKLLTMGSFKRITLYDYQAMCRANKESSDGAHGLLDPYNAFLSAVKWIMTELVLFLVEFNLCSWWHSDMTAKAQKLKQTLEPCDTEYPAFVSERTIKETTGNIACEDCSKSFVIQQIPSSNLFMVVVDSSCLCESVAPITMAPIEIRYNESLKCERLKAQKIRRRPESCHGFHPEENARECGGAPSLQAQTVLLLLPLLLMLFSR

SEQ ID NO: 418 - DNA, 525 bp, Homo sapiens
atggaatttggaatacagcccttggcaacacagggaaaagtggcatttggtcataaggcatcattaaaacggaaagcagaggaaaaattagaaagctacggaaaaaagattcacatgatgaataaccaagctgaagaaaaagctgcagaccagtttcgaatgcgacttaaaaataagcaagatgaaatgaagctagaaggagatcacagaagaagccagcaagtctgtcaacaattggacacccagaaaaatattcaggttcccagggaagcatggtactggttgaggcttgaaaaggagactgaagatgaagaagaaaaagaacaggatgaagatgaatataagagtgaagatttaagtgtactggaaaaattacaaatattgactagttatttaagagaagaacttctgtatagtatttggtgtggaacagcctatgaagataaagaagacctatcttcaaattgtccaggaccaacttcgcagatcatgactaagattattcccaataaactggaaacttga

SEQ ID NO: 419 - protein, 174 aa, Homo sapiens
MEFGIQPLATQGKVAFGHKASLKRKAEEKLESYGKKIHMMNNQAEEKAADQFRMRLKNKQDEMKLEGDHRRSQQVCQQLDTQKNIQVPREAWYWLRLEKETEDEEEKEQDEDEYKSEDLSVLEKLQILTSYLREELLYSIWCGTAYEDKEDLSSNCPGPTSQIMTKIIPNKLET

SEQ ID NO: 420 - DNA, 6629 bp, Homo sapiens
atgaaatggaaacatgttccttttttggtcatgatatcactcctcagcttatccccaaatcacctgtttctggcccagcttattccagaccctgaagatgtagagagggggaacgaccacgggacgccaatccccacctctgataacgatgacaattcgctgggctatacaggctcccgtcttcgtcaggaagattttccacctcgcattgttgaacacccttcagacctgattgtctcaaaaggagaacctgcaactttgaactgcaaagctgaaggccgccccacacccactattgaatggtacaaagggggagagagagtggagacagacaaagatgaccctcgctcacaccgaatgttgctgccgagtggatctttatttttcttacgtatagtacatggacggaaaagtagacctgatgaaggagtctatgtctgtgtagcaaggaattaccttggagaggctgtgagccacaatgcatcgctggaagtagccatacttcgggatgacttcagacaaaacccttcggatgtcatggttgcagtaggagagcctgcagtaatggaatgccaacctccacgaggccatcctgagcccaccatttcatggaagaaagatggctctccactggatgataaagatgaaagaataactatacgaggaggaaagctcatgatcacttacacccgtaaaagtgacgctggcaaatatgtttgtgttggtaccaatatggttggggaacgtgagagtgaagtagccgagctgactgtcttagagagaccatcatttgtgaagagacccagtaacttggcagtaactgtggatgacagtgcagaatttaaatgtgaggcccgaggtgaccctgtacctacagtacgatggaggaaagatgatggagagctgcccaaatccagatatgaaatccgagatgatcataccttgaaaattaggaaggtgacagctggtgacatgggttcatacacttgtgttgcagaaaatatggtgggcaaagctgaagcatctgctactctgactgttcaagaacctccacattttgttgtgaaaccccgtgaccaggttgttgctttgggacggactgtaacttttcagtgtgaagcaaccggaaatcctcaaccagctattttctggaggagagaagggagtcagaatctacttttctcatatcaaccaccacagtcatccagccgattttcagtctcccagactggcgacctcacaattactaatgtccagcgatctgatgttggttattacatctgccagactttaaatgttgctggaagcatcatcacaaaggcatatttggaagttacagatgtgattgcagatcggcctcccccagttattcgacaaggtcctgtgaatcagactgtagccgtggatggcactttcgtcctcagctgtgtggccacaggcagtccagtgcccaccattctgtggagaaaggatggagtcctcgtttcaacccaagactctcgaatcaaacagttggagaatggagtactgcagatccgatatgctaagctgggtgatactggtcggtacacctgcattgcatcaacccccagtggtgaagcaacatggagtgcttacattgaagttcaagaatttggagttccagttcagcctccaagacctactgacccaaatttaatccctagtgccccatcaaaacctgaagtgacagatgtcagcagaaatacagtcacattatcgtggcaaccaaatttgaattcaggagcaactccaacatcttatattatagaagccttcagccatgcatctggtagcagctggcagaccgtagcagagaatgtgaaaacagaaacatctgccattaaaggactcaaacctaatgcaatttaccttttccttgtgagggcagctaatgcatatggaattagtgatccaagccaaatatcagatccagtgaaaacacaagatgtcctaccaacaagtcagggggtggaccacaagcaggtccagagagagctgggaaatgctgttctgcacctccacaaccccaccgtcctttcttcctcttccatcgaagtgcactggacagtagatcaacagtctcagtatatacaaggatataaaattctctatcggccatctggagccaaccacggagaatcagactggttagtttttgaagtgaggacgccagccaaaaacagtgtggtaatccctgatctcagaaagggagtcaactatgaaattaaggctcgccctttttttaatgaatttcaaggagcagatagtgaaatcaagtttgccaaaaccctggaagaagcacccagtgccccaccccaaggtgtaactgtatccaagaatgatggaaacggaactgcaattctagttagttggcagccacctccagaagacactcaaaatggaatggtccaagagtataaggtttggtgtctgggcaatgaaactcgataccacatcaacaaaacagtggatggttccaccttttccgtggtcattccctttcttgttcctggaatccgatacagtgtggaagtggcagccagcactggggctgggtctggggtaaagagtgagcctcagttcatccagctggatgcccatggaaaccctgtgtcacctgaggaccaagtcagcctcgctcagcagatttcagatgtggtgaagcagccggccttcatagcaggtattggagcagcctgttggatcatcctcatggtcttcagcatctggctttatcgacaccgcaagaagagaaacggacttactagtacctacgcgggtatcagaaaagtcccgtcttttaccttcacaccaacagtaacttaccagagaggaggcgaagctgtcagcagtggagggaggcctggacttctcaacatcagtgaacctgccgcgcagccatggctggcagacacgtggcctaatactggcaacaaccacaatgactgctccatcagctgctgcacggcaggcaatggaaacagcgacagcaacctcactacctacagtcgcccagctgattgtatagcaaattataacaaccaactggataacaaacaaacaaatctgatgctccctgagtcaactgtttatggtgatgtggaccttagtaacaaaatcaatgagatgaaaaccttcaatagcccaaatctgaaggatgggcgttttgtcaatccatcagggcagcctactccttacgccaccactcagctcatccagtcaaacctcagcaacaacatgaacaatggcagcggggactctggcgagaagcactggaaaccactgggacagcagaaacaagaagtggcaccagttcagtacaacatcgtggagcaaaacaagctgaacaaagattatcgagcaaatgacacagttcctccaactatcccatacaaccaatcatacgaccagaacacaggaggatcctacaacagctcagaccggggcagtagtacatctgggagtcaggggcacaagaaaggggcaagaacacccaaggtaccaaaacagggtggcatgaactgggcagacctgcttcctcctcccccagcacatcctcctccacacagcaatagcgaagagtacaacatttctgtagatgaaagctatgaccaagaaatgccatgtcccgtgccaccagcaaggatgtatttgcaacaagatgaattagaagaggaggaagatgaacgaggccccactccccctgttcggggagcagcttcttctccagctgccgtgtcctatagccatcagtccactgccactctgactccctccccacaggaagaactccagcccatgttacaggattgtccagaggagactggccacatgcagcaccagcccgacaggagacggcagcctgtgagtcctcctccaccaccacggccgatctcccctccacatacctatggctacatttcaggacccctggtctcagatatggatacggatgcgccagaagaggaagaagacgaagccgacatggaggtagccaagatgcaaaccagaaggcttttgttacgtgggcttgagcagacacctgcctccagtgttggggacctggagagctctgtcacggggtccatgatcaacggctggggctcagcctcagaggaggacaacatttccagcggacgctccagtgttagttcttcggacggctcctttttcactgatgctgactttgcccaggcagtcgcagcagcggcagagtatgctggtctgaaagtagcacgacggcaaatgcaggatgctgctggccgtcgacattttcatgcgtctcagtgccctaggcccacaagtcccgtgtctacagacagcaacatgagtgccgccgtaatgcagaaaaccagaccagccaagaaactgaaacaccagccaggacatctgcgcagagaaacctacacagatgatcttccaccacctcctgtgccgccacctgctataaagtcacctactgcccaatccaagacacagctggaagtacgacctgtagtggtgccaaaactcccttctatggatgcaagaacagacagatcatcagacagaaaaggaagcagttacaaggggagagaagtgttggatggaagacaggttgttgacatgcgaacaaatccaggtgatcccagagaagcacaggaacagcaaaatgacgggaaaggacgtggaaacaaggcagcaaaacgagaccttccaccagcaaagactcatctcatccaagaggatattctaccttattgtagacctacttttccaacatcaaataatcccagagatcccagttcctcaagctcaatgtcatcaagaggatcaggaagcagacaaagagaacaagcaaatgtaggtcgaagaaatattgcagaaatgcaggtacttggaggatatgaaagaggagaagataataatgaagaattagaggaaactgaaagctgaagacaaccaagaggcttatgagatctaatgtgaaaatcatcactcaagatgcctcctgtcagatgacacatgacgccagataaaatgttcagtgcaatcagagtgtacaaattgtcgtttttattcctcttattgggatatcattttaaaaactttattgggtttttattgttgttgtttgatccctaaccctacaaagagccttcctattcccctcgctgttggagcaaaccattataccttacttccagcaagcaaagtgctttgacttcttgcttcagtcatcagccagcaagagggaacaaaactgttcttttgcattttgccgctgagatatggcattgcactgcttatatgccaagctaatttatagcaagatattgatcaaatatagaaagttgatattcaacctcacaagggctctcaaagtataatctttctatagccaactgctaatgcaaattaaaacatatttcattttaacatgatttcaaaatcagtttttcatactaccctttgctggaagaaactaaaaatatagcaaatgcagaaccacaaacaattcgaatggggtagaaacattgtaaatatttactctttgcaaaccctggtggtattttattttggcttcatttcaatcattgaagtatattcttattggaaatgtacttttggataagtagggctaagccagttggatctctggttgtctagtcattgtcataagtaaacctagtaaaaccttgttctatttttcaatcatcaaaaagtaattataaatacgtattacaaacaagtggatgtttttaatgaccaattgagtaagaacatccctgtcttaactggcctaaatttcttctggtagtgtcagttcaactttcagaagtgccacttaaggaagtttgatttttgtttttgtaatgcactgtttttaatctctctctctttttttttttttttttggttttaaaagcacaatcactaaactttatttgtaaaccattgtaactattaaccttttttgtcttattgaaaaaaaaaatgttgagaagcgtttttaacctgttttgttaatgctctatgtttgtatttggaatatttgaataatgacagatggtgaagtaacatgcatactttattgtgggccatgaaccaaatggttcttacttttcctggacttaaagaaaaaaagaggtttaagtttgttgtggccaatgtcgaaacctacaagatttccttaaaatctctaatagaggcattacttgctttcaattgacaaatgatgccctctgactagtagatttctatgatccttttttgtcattttatgaatatcattgattttataattggtgctatttgaagaaaaaaatgtacatttattcatagatagataagtatcaggtctgaccccagtggaaaacaaagccaaacaaaactgaaccacaaaaaaaaaggctggtgttcaccaaaaccaaacttgttcatttagataatttgaaaaagttccatagaaaaggcgtgcagtactaagggaacaatccatgtgattaatgttttcattatgttcatgtaagaagccccttatttttagccataattttgcatactgaaaatccaataatcagaaaagtaattttgtcacattatttattaaaaatgttctcaaatac

SEQ ID NO: 421 - protein, 1651 aa, Homo sapiens
MKWKHVPFLVMISLLSLSPNHLFLAQLIPDPEDVERGNDHGTPIPTSDNDDNSLGYTGSRLRQEDFPPRIVEHPSDLIVSKGEPATLNCKAEGRPTPTIEWYKGGERVETDKDDPRSHRMLLPSGSLFFLRIVHGRKSRPDEGVYVCVARNYLGEAVSHNASLEVAILRDDFRQNPSDVMVAVGEPAVMECQPPRGHPEPTISWKKDGSPLDDKDERITIRGGKLMITYTRKSDAGKYVCVGTNMVGERESEVAELTVLERPSFVKRPSNLAVTVDDSAEFKCEARGDPVPTVRWRKDDGELPKSRYEIRDDHTLKIRKVTAGDMGSYTCVAENMVGKAEASATLTVQEPPHFVVKPRDQVVALGRTVTFQCEATGNPQPAIFWRREGSQNLLFSYQPPQSSSRFSVSQTGDLTITNVQRSDVGYYICQTLNVAGSIITKAYLEVTDVIADRPPPVIRQGPVNQTVAVDGTFVLSCVATGSPVPTILWRKDGVLVSTQDSRIKQLENGVLQIRYAKLGDTGRYTCIASTPSGEATWSAYIEVQEFGVPVQPPRPTDPNLIPSAPSKPEVTDVSRNTVTLSWQPNLNSGATPTSYIIEAFSHASGSSWQTVAENVKTETSAIKGLKPNAIYLFLVRAANAYGISDPSQISDPVKTQDVLPTSQGVDHKQVQRELGNAVLHLHNPTVLSSSSIEVHWTVDQQSQYIQGYKILYRPSGANHGESDWLVFEVRTPAKNSVVIPDLRKGVNYEIKARPFFNEFQGADSEIKFAKTLEEAPSAPPQGVTVSKNDGNGTAILVSWQPPPEDTQNGMVQEYKVWCLGNETRYHINKTVDGSTFSVVIPFLVPGIRYSVEVAASTGAGSGVKSEPQFIQLDAHGNPVSPEDQVSLAQQISDVVKQPAFIAGIGAACWIILMVFSIWLYRHRKKRNGLTSTYAGIRKVPSFTFTPTVTYQRGGEAVSSGGRPGLLNISEPAAQPWLADTWPNTGNNHNDCSISCCTAGNGNSDSNLTTYSRPADCIANYNNQLDNKQTNLMLPESTVYGDVDLSNKINEMKTFNSPNLKDGRFVNPSGQPTPYATTQLIQSNLSNNMNNGSGDSGEKHWKPLGQQKQEVAPVQYNIVEQNKLNKDYRANDTVPPTIPYNQSYDQNTGGSYNSSDRGSSTSGSQGHKKGARTPKVPKQGGMNWADLLPPPPAHPPPHSNSEEYNISVDESYDQEMPCPVPPARMYLQQDELEEEEDERGPTPPVRGAASSPAAVSYSHQSTATLTPSPQEELQPMLQDCPEETGHMQHQPDRRRQPVSPPPPPRPISPPHTYGYISGPLVSDMDTDAPEEEEDEADMEVAKMQTRRLLLRGLEQTPASSVGDLESSVTGSMINGWGSASEEDNISSGRSSVSSSDGSFFTDADFAQAVAAAAEYAGLKVARRQMQDAAGRRHFHASQCPRPTSPVSTDSNMSAAVMQKTRPAKKLKHQPGHLRRETYTDDLPPPPVPPPAIKSPTAQSKTQLEVRPVVVPKLPSMDARTDRSSDRKGSSYKGREVLDGRQVVDMRTNPGDPREAQEQQNDGKGRGNKAAKRDLPPAKTHLIQEDILPYCRPTFPTSNNPRDPSSSSSMSSRGSGSRQREQANVGRRNIAEMQVLGGYERGEDNNEELEETES

SEQ ID NO: 422 - DNA, 7475 bp, Homo sapiens
acttcagacgccgctgatccgggaggagctggggtgagccgcggcggccgtctctcccacccgcagcagcatcctctctgcccttctctgccaccccggggagagccgggagctgcctctttacagcttccacgagccaggggtgcaggcagctgcccccaggaagtttgggcttctgcgtagtttaggggtgcctgcgagcgccccagagggcgaggggccgagggcgatgttgggcgccgcgcggggctgggggcgcccagaagacgtgcgagtgtccgcggtcctgctgctgtctccagtaccctccgcatcccccaagtgatgggaacaagggcccgcccaggcagccgctgtcgccgcaccgccccctcgctcgctctctgcgcgcggagtcacccagtcacactcccggcaccccgagcccttcctccggagctgctgcttctactttggctgctatcgccgccgccgcgggtggcccgctgctgactgggctcgccgggagacggagaagcactttttggccctccctcagcagctctcacaccccaactttgccgccgccgccgcgcctgccctcgcagcggcgctcggccgcacattgtgggggcgcacgccgggaggctccgcaagaccgtggaggcaggaaacggcactactgcgcttctgcctcggctctttgttgttcgctttggatggttcttgaaagtgtctgagcctcctcggaaatcctggggccggagaagacaaaccttggaattcttcctctgcaaaagtctctgagatactgacaagcgtccggaaaggtcgacgagtaattgccctgaaaactcttggctaattgacccacgttgcttatattaagcctttgtgtgtggtgtgtggcttcatacatttggggaccctatttccactccctcctcttggcatgagactgtatacaggatccacccgaggacaatgattgcggagcccgctcacttttacctgtttggattaatatgtctctgttcaggctcccgtcttcgtcaggaagattttccacctcgcattgttgaacacccttcagacctgattgtctcaaaaggagaacctgcaactttgaactgcaaagctgaaggccgccccacacccactattgaatggtacaaagggggagagagagtggagacagacaaagatgaccctcgctcacaccgaatgttgctgccgagtggatctttatttttcttacgtatagtacatggacggaaaagtagacctgatgaaggagtctatgtctgtgtagcaaggaattaccttggagaggctgtgagccacaatgcatcgctggaagtagccatacttcgggatgacttcagacaaaacccttcggatgtcatggttgcagtaggagagcctgcagtaatggaatgccaacctccacgaggccatcctgagcccaccatttcatggaagaaagatggctctccactggatgataaagatgaaagaataactatacgaggaggaaagctcatgatcacttacacccgtaaaagtgacgctggcaaatatgtttgtgttggtaccaatatggttggggaacgtgagagtgaagtagccgagctgactgtcttagagagaccatcatttgtgaagagacccagtaacttggcagtaactgtggatgacagtgcagaatttaaatgtgaggcccgaggtgaccctgtacctacagtacgatggaggaaagatgatggagagctgcccaaatccagatatgaaatccgagatgatcataccttgaaaattaggaaggtgacagctggtgacatgggttcatacacttgtgttgcagaaaatatggtgggcaaagctgaagcatctgctactctgactgttcaagaacctccacattttgttgtgaaaccccgtgaccaggttgttgctttgggacggactgtaacttttcagtgtgaagcaaccggaaatcctcaaccagctattttctggaggagagaagggagtcagaatctacttttctcatatcaaccaccacagtcatccagccgattttcagtctcccagactggcgacctcacaattactaatgtccagcgatctgatgttggttattacatctgccagactttaaatgttgctggaagcatcatcacaaaggcatatttggaagttacagatgtgattgcagatcggcctcccccagttattcgacaaggtcctgtgaatcagactgtagccgtggatggcactttcgtcctcagctgtgtggccacaggcagtccagtgcccaccattctgtggagaaaggatggagtcctcgtttcaacccaagactctcgaatcaaacagttggagaatggagtactgcagatccgatatgctaagctgggtgatactggtcggtacacctgcattgcatcaacccccagtggtgaagcaacatggagtgcttacattgaagttcaagaatttggagttccagttcagcctccaagacctactgacccaaatttaatccctagtgccccatcaaaacctgaagtgacagatgtcagcagaaatacagtcacattatcgtggcaaccaaatttgaattcaggagcaactccaacatcttatattatagaagccttcagccatgcatctggtagcagctggcagaccgtagcagagaatgtgaaaacagaaacatctgccattaaaggactcaaacctaatgcaatttaccttttccttgtgagggcagctaatgcatatggaattagtgatccaagccaaatatcagatccagtgaaaacacaagatgtcctaccaacaagtcagggggtggaccacaagcaggtccagagagagctgggaaatgctgttctgcacctccacaaccccaccgtcctttcttcctcttccatcgaagtgcactggacagtagatcaacagtctcagtatatacaaggatataaaattctctatcggccatctggagccaaccacggagaatcagactggttagtttttgaagtgaggacgccagccaaaaacagtgtggtaatccctgatctcagaaagggagtcaactatgaaattaaggctcgccctttttttaatgaatttcaaggagcagatagtgaaatcaagtttgccaaaaccctggaagaagcacccagtgccccaccccaaggtgtaactgtatccaagaatgatggaaacggaactgcaattctagttagttggcagccacctccagaagacactcaaaatggaatggtccaagagtataaggtttggtgtctgggcaatgaaactcgataccacatcaacaaaacagtggatggttccaccttttccgtggtcattccctttcttgttcctggaatccgatacagtgtggaagtggcagccagcactggggctgggtctggggtaaagagtgagcctcagttcatccagctggatgcccatggaaaccctgtgtcacctgaggaccaagtcagcctcgctcagcagatttcagatgtggtgaagcagccggccttcatagcaggtattggagcagcctgttggatcatcctcatggtcttcagcatctggctttatcgacaccgcaagaagagaaacggacttactagtacctacgcgggtatcagaaaagtcccgtcttttaccttcacaccaacagtaacttaccagagaggaggcgaagctgtcagcagtggagggaggcctggacttctcaacatcagtgaacctgccgcgcagccatggctggcagacacgtggcctaatactggcaacaaccacaatgactgctccatcagctgctgcacggcaggcaatggaaacagcgacagcaacctcactacctacagtcgcccagctgattgtatagcaaattataacaaccaactggataacaaacaaacaaatctgatgctccctgagtcaactgtttatggtgatgtggaccttagtaacaaaatcaatgagatgaaaaccttcaatagcccaaatctgaaggatgggcgttttgtcaatccatcagggcagcctactccttacgccaccactcagctcatccagtcaaacctcagcaacaacatgaacaatggcagcggggactctggcgagaagcactggaaaccactgggacagcagaaacaagaagtggcaccagttcagtacaacatcgtggagcaaaacaagctgaacaaagattatcgagcaaatgacacagttcctccaactatcccatacaaccaatcatacgaccagaacacaggaggatcctacaacagctcagaccggggcagtagtacatctgggagtcaggggcacaagaaaggggcaagaacacccaaggtaccaaaacagggtggcatgaactgggcagacctgcttcctcctcccccagcacatcctcctccacacagcaatagcgaagagtacaacatttctgtagatgaaagctatgaccaagaaatgccatgtcccgtgccaccagcaaggatgtatttgcaacaagatgaattagaagaggaggaagatgaacgaggccccactccccctgttcggggagcagcttcttctccagctgccgtgtcctatagccatcagtccactgccactctgactccctccccacaggaagaactccagcccatgttacaggattgtccagaggagactggccacatgcagcaccagcccgacaggagacggcagcctgtgagtcctcctccaccaccacggccgatctcccctccacatacctatggctacatttcaggacccctggtctcagatatggatacggatgcgccagaagaggaagaagacgaagccgacatggaggtagccaagatgcaaaccagaaggcttttgttacgtgggcttgagcagacacctgcctccagtgttggggacctggagagctctgtcacggggtccatgatcaacggctggggctcagcctcagaggaggacaacatttccagcggacgctccagtgttagttcttcggacggctcctttttcactgatgctgactttgcccaggcagtcgcagcagcggcagagtatgctggtctgaaagtagcacgacggcaaatgcaggatgctgctggccgtcgacattttcatgcgtctcagtgccctaggcccacaagtcccgtgtctacagacagcaacatgagtgccgccgtaatgcagaaaaccagaccagccaagaaactgaaacaccagccaggacatctgcgcagagaaacctacacagatgatcttccaccacctcctgtgccgccacctgctataaagtcacctactgcccaatccaagacacagctggaagtacgacctgtagtggtgccaaaactcccttctatggatgcaagaacagacagatcatcagacagaaaaggaagcagttacaaggggagagaagtgttggatggaagacaggttgttgacatgcgaacaaatccaggtgatcccagagaagcacaggaacagcaaaatgacgggaaaggacgtggaaacaaggcagcaaaacgagaccttccaccagcaaagactcatctcatccaagaggatattctaccttattgtagacctacttttccaacatcaaataatcccagagatcccagttcctcaagctcaatgtcatcaagaggatcaggaagcagacaaagagaacaagcaaatgtaggtcgaagaaatattgcagaaatgcaggtacttggaggatatgaaagaggagaagataataatgaagaattagaggaaactgaaagctgaagacaaccaagaggcttatgagatctaatgtgaaaatcatcactcaagatgcctcctgtcagatgacacatgacgccagataaaatgttcagtgcaatcagagtgtacaaattgtcgtttttattcctcttattgggatatcattttaaaaactttattgggtttttattgttgttgtttgatccctaaccctacaaagagccttcctattcccctcgctgttggagcaaaccattataccttacttccagcaagcaaagtgctttgacttcttgcttcagtcatcagccagcaagagggaacaaaactgttcttttgcattttgccgctgagatatggcattgcactgcttatatgccaagctaatttatagcaagatattgatcaaatatagaaagttgatattcaacctcacaagggctctcaaagtataatctttctatagccaactgctaatgcaaattaaaacatatttcattttaacatgatttcaaaatcagtttttcatactaccctttgctggaagaaactaaaaatatagcaaatgcagaaccacaaacaattcgaatggggtagaaacattgtaaatatttactctttgcaaaccctggtggtattttattttggcttcatttcaatcattgaagtatattcttattggaaatgtacttttggataagtagggctaagccagttggatctctggttgtctagtcattgtcataagtaaacctagtaaaaccttgttctatttttcaatcatcaaaaagtaattataaatacgtattacaaacaagtggatgtttttaatgaccaattgagtaagaacatccctgtcttaactggcctaaatttcttctggtagtgtcagttcaactttcagaagtgccacttaaggaagtttgatttttgtttttgtaatgcactgtttttaatctctctctctttttttttttttttttggttttaaaagcacaatcactaaactttatttgtaaaccattgtaactattaaccttttttgtcttattgaaaaaaaaaatgttgagaagcgtttttaacctgttttgttaatgctctatgtttgtatttggaatatttgaataatgacagatggtgaagtaacatgcatactttattgtgggccatgaaccaaatggttcttacttttcctggacttaaagaaaaaaagaggtttaagtttgttgtggccaatgtcgaaacctacaagatttccttaaaatctctaatagaggcattacttgctttcaattgacaaatgatgccctctgactagtagatttctatgatccttttttgtcattttatgaatatcattgattttataattggtgctatttgaagaaaaaaatgtacatttattcatagatagataagtatcaggtctgaccccagtggaaaacaaagccaaacaaaactgaaccacaaaaaaaaaggctggtgttcaccaaaaccaaacttgttcatttagataatttgaaaaagttccatagaaaaggcgtgcagtactaagggaacaatccatgtgattaatgttttcattatgttcatgtaagaagccccttatttttagccataattttgcatactgaaaatccaataatcagaaaagtaattttgtcacattatttattaaaaatgttctcaaatac

SEQ ID NO: 423 - protein, 1612 aa, Homo sapiens
MIAEPAHFYLFGLICLCSGSRLRQEDFPPRIVEHPSDLIVSKGEPATLNCKAEGRPTPTIEWYKGGERVETDKDDPRSHRMLLPSGSLFFLRIVHGRKSRPDEGVYVCVARNYLGEAVSHNASLEVAILRDDFRQNPSDVMVAVGEPAVMECQPPRGHPEPTISWKKDGSPLDDKDERITIRGGKLMITYTRKSDAGKYVCVGTNMVGERESEVAELTVLERPSFVKRPSNLAVTVDDSAEFKCEARGDPVPTVRWRKDDGELPKSRYEIRDDHTLKIRKVTAGDMGSYTCVAENMVGKAEASATLTVQEPPHFVVKPRDQVVALGRTVTFQCEATGNPQPAIFWRREGSQNLLFSYQPPQSSSRFSVSQTGDLTITNVQRSDVGYYICQTLNVAGSIITKAYLEVTDVIADRPPPVIRQGPVNQTVAVDGTFVLSCVATGSPVPTILWRKDGVLVSTQDSRIKQLENGVLQIRYAKLGDTGRYTCIASTPSGEATWSAYIEVQEFGVPVQPPRPTDPNLIPSAPSKPEVTDVSRNTVTLSWQPNLNSGATPTSYIIEAFSHASGSSWQTVAENVKTETSAIKGLKPNAIYLFLVRAANAYGISDPSQISDPVKTQDVLPTSQGVDHKQVQRELGNAVLHLHNPTVLSSSSIEVHWTVDQQSQYIQGYKILYRPSGANHGESDWLVFEVRTPAKNSVVIPDLRKGVNYEIKARPFFNEFQGADSEIKFAKTLEEAPSAPPQGVTVSKNDGNGTAILVSWQPPPEDTQNGMVQEYKVWCLGNETRYHINKTVDGSTFSVVIPFLVPGIRYSVEVAASTGAGSGVKSEPQFIQLDAHGNPVSPEDQVSLAQQISDVVKQPAFIAGIGAACWIILMVFSIWLYRHRKKRNGLTSTYAGIRKVPSFTFTPTVTYQRGGEAVSSGGRPGLLNISEPAAQPWLADTWPNTGNNHNDCSISCCTAGNGNSDSNLTTYSRPADCIANYNNQLDNKQTNLMLPESTVYGDVDLSNKINEMKTFNSPNLKDGRFVNPSGQPTPYATTQLIQSNLSNNMNNGSGDSGEKHWKPLGQQKQEVAPVQYNIVEQNKLNKDYRANDTVPPTIPYNQSYDQNTGGSYNSSDRGSSTSGSQGHKKGARTPKVPKQGGMNWADLLPPPPAHPPPHSNSEEYNISVDESYDQEMPCPVPPARMYLQQDELEEEEDERGPTPPVRGAASSPAAVSYSHQSTATLTPSPQEELQPMLQDCPEETGHMQHQPDRRRQPVSPPPPPRPISPPHTYGYISGPLVSDMDTDAPEEEEDEADMEVAKMQTRRLLLRGLEQTPASSVGDLESSVTGSMINGWGSASEEDNISSGRSSVSSSDGSFFTDADFAQAVAAAAEYAGLKVARRQMQDAAGRRHFHASQCPRPTSPVSTDSNMSAAVMQKTRPAKKLKHQPGHLRRETYTDDLPPPPVPPPAIKSPTAQSKTQLEVRPVVVPKLPSMDARTDRSSDRKGSSYKGREVLDGRQVVDMRTNPGDPREAQEQQNDGKGRGNKAAKRDLPPAKTHLIQEDILPYCRPTFPTSNNPRDPSSSSSMSSRGSGSRQREQANVGRRNIAEMQVLGGYERGEDNNEELEETES

SEQ ID NO: 424 - DNA, 3347 bp, Homo sapiens
atgtttgttctcttcttgtgcaacctttccttggtaccagcggccgcttcaaagaataaagttaaaggcagccaagggcagtttccactaacacagaatgtaaccgttgttgaaggtggaactgcaattttgacctgcagggttgatcaaaatgataacacctccctccagtggtcaaatccagctcaacagactctgtactttgacgacaagaaagctttaagggacaataggatcgagctggttcgcgcttcctggcatgaattgagtattagtgtcagtgatgtgtctctctctgatgaaggacagtacacctgttctttatttacaatgcctgtcaaaacttccaaggcatatctcaccgttctgggtgttcctgaaaagcctcagattagtggattctcatcaccagttatggagggtgacttgatgcagctgacttgcaaaacatctggtagtaaacctgcagctgatataagatggttcaaaaatgacaaagagattaaagatgtaaaatatttaaaagaagaggatgcaaatcgcaagacattcactgtcagcagcacactggacttccgagtggaccggagtgatgatggagtggcggtcatctgcagagtagatcacgaatccctcaatgccacccctcaggtagccatgcaggtgctagaaatacactatacaccatcagttaagattataccatcgactccttttccacaagaaggacagcctttaattttgacttgtgaatccaaaggaaaaccactgccagaacctgttttgtggacaaaggatggcggagaattaccagatcctgaccgaatggttgtgagtggtagggagctaaacattcttttcctgaacaaaacggataatggtacatatcgatgtgaagccacaaacaccattggccaaagcagtgcggaatatgttctcattgtgcatgatgttcccaacactttgcttcccactactatcatcccctcccttaccactgcaacagtcacaaccactgtagccataacaaccagcccaaccacatctgcaacaaccagcagcatcagagatcctaatgctttggctggccagaatggccctgaccatgctctcataggaggaatagtggctgtagttgtatttgtcacgctgtgttctatctttctgcttggtcgatatctggcaaggcataaaggaacgtatttaacaaatgaagctaaaggagctgaagatgcaccagatgctgatacagccattatcaatgctgaaggcagccaagtcaatgctgaagagaaaaaagagtatttcatttaagatgcaggccaagattctgagttttactaccaggctgaatgctggagaaaactggctatcatctttcagaagtcatttctaccatcgtctgctacccttattaactcccatactgtactgctatcagtagccagtgtataccaacaatcagctgttgaaagcatcattctttaattactgtaccatccataatgcaggacatttcttactgcctaaatttcacaccattgctcttttaacatacagtgcttgaatatacagccttaacaatgttaatcatctccttggatcattatattgagtggtttttatacattaaaaaatgtatgcagagtttttttcccccattttttcccctttaagtcatagaccttatcagtttgccattggacagctttcacaagtaacaggattagggaaggacataatgtatttaagaataagtgaaggttagaggtttacaattaatgttttctacatgtctgtcttcaaagacaacatgctttggaaacatatgtcctagaaaacataaaattaaaaaaaaacactatagtgtagtttttggaatgttggagattatactggtaaagctgtatcgatttgctattgaaatatagtatttgatacaggagccatgtgtacgaattgcaatcatgacatggtattttctataattatagagatcttactattaggatattgtagcttcatttaccaataaattattccaaatgatttactgcttttggaatcacaaatatttaattcatttctctaatttgattctataatttatttgcttcataaagattcacctgcctaaacaatattgaagtatccatagggcacaattttcagacattttagtatctgtatatagtgcatataataaatccaattaaacattatttgatacatatttaacttttttggctgtatgtaattcagtcataagtaagcattttctaacgtccattatatccctttaggtattacttaaaccaatattataagtagataacatgtattagtatttttgtctgtatgtcctagcactgttcaacaacaaatttttctagttcttgttaatttttatttgttatacaatggaagcacaatgttataaggaaaggtaattttaagctaacaaccagtgcacagcctcaggttttaaattacaaccacagttgaataataacctaaaaataaattttagtttgctaaaaatttacaaattttcattttgcagttccagagctgcttacctatgttggtttgccaaaaagaagtgtttaagatatgttttctgtataaatgaactaattctttatattaaattcctgtctatgcattttgtgaggtacaaactgatgaaacagtgagtgatagagaatttctgccatgcttttaactccaaagtgaaagtctctttctctggattattttaaaattttggcgtgtttaaccattaagaaatgctgtattcttaaatatgaaacagttaatctaaagtcttattatttcttctagtaaaataaaatattgttagattagttctcattaaatttattatatgctaaagaataaaactccagttagatttaaaaaaatcccatttacaagcattgcacctttaagaagaaaacaaatatgacagtatggtagctatacttgtgatgtctgacgcatgatggcctatggttttaaaaatagtattgtggaatatatttttgggtaataagaatggttgagtgcaacatcatgtattaatatcaaatgaaagacaagggtgctgtatctttgattatttatcaaaaaagtataaatcttttaaggaaaatgttagaattttaaagtttttttttgattgttgaagcatttatcttgttgatttcttacaaaagaaaaaggacgatgtcagtcaagcagcactttttcagaatatacagaacataaataatatgatgtggttgagtgttaacataataaatcatatacagtatgacattttaaggaaaaaaaaaaaaaaaaaa

SEQ ID NO: 425 - protein, 437 aa, Homo sapiens
MFVLFLCNLSLVPAAASKNKVKGSQGQFPLTQNVTVVEGGTAILTCRVDQNDNTSLQWSNPAQQTLYFDDKKALRDNRIELVRASWHELSISVSDVSLSDEGQYTCSLFTMPVKTSKAYLTVLGVPEKPQISGFSSPVMEGDLMQLTCKTSGSKPAADIRWFKNDKEIKDVKYLKEEDANRKTFTVSSTLDFRVDRSDDGVAVICRVDHESLNATPQVAMQVLEIHYTPSVKIIPSTPFPQEGQPLILTCESKGKPLPEPVLWTKDGGELPDPDRMVVSGRELNILFLNKTDNGTYRCEATNTIGQSSAEYVLIVHDVPNTLLPTTIIPSLTTATVTTTVAITTSPTTSATTSSIRDPNALAGQNGPDHALIGGIVAVVVFVTLCSIFLLGRYLARHKGTYLTNEAKGAEDAPDADTAIINAEGSQVNAEEKKEYFI

SEQ ID NO: 426 - DNA, 2273 bp, Homo sapiens
atgccgaacttctgcgctgcccccaactgcacgcgaagcgcacgcagtccgacctggccttcttcaggttcccgcgggacccggccagatgccaggagtgggtggagaattgtaggagagctgacttagaagataaaacacctgatcagctaaataaacattatcgattatgtgccaaacatgagacctctatgatctgtagaactagtccttataggacagttcttcgagataatgcaataccaacaatatttgatcttacagtcatttgaacaaaccacgtaagtagacacagaaaacgaataaaagaactgagtgaagacgaaatcaggactgaaacagaaaaacattgatgaaacttctgagcaggaacaaaaacataaaccaacaatagcaatgctcagaaccccagtgaagaagagggtgaagggcaagatgaggacattttacctctatcccttgaagagaaggaaaacaaagaatacctaaaatctctatttgaattattgattctgatgggaaagcaaaatatacctctggatggacaggaggccgaagaaatcccagaaggtctctttaccctagataactttcaagcactgctggagtgccagataaattctggtgaagaggttctgagaaagcgctttgagacaacagcagttaacacgttgttttcttcaaaaacacagcagaggcagatggtagagatctgtgagagctgtattcgagaagaaactctcagggaagagagagaatcacacttcttttccattatcactgacgatgtagtggacatagcaggggaagagcacctaactgtgttggtggggtttgttgatgaatctcatagcctaagagaggaatttataggttttctgccttatgaagctgatgcagaaattttggctgtgaaatttcacactatgataactgagaagtggggattaaatatgaagcattgtcgtggtcaggcttacattgtgtctagtggattttcttccaaaatgaaagttgttgcttctagacttttagaaaaatatccccaagctatctacacactctgaacttcctgtgccttaaatatgtggttggcaaaatcagtacctgttatgggagtatctgttgcattaggaacaattgaagaagtttgttcttttttcccttgatcacaactgcttttagaacttgacgatgtaatttctgttctttttcacaacggttaagaaaggggtaaagaactgaaggaaatctgccattttcagtggacacgcaggcatgatgcttttgaaattttggtggaactcctgcaagcacttgttttaggttcagatggtataaatagtgacacaaatattagatggagtaactgtgtagctggcagagcatttatactctgcagtgcagtaacagattttgatttcattgttactattgttgttcttaaaaatgtcctatcttttacaagagcctttggggaaaatctccaggggcaaacctctgatgtcttatttgcagctggtagcttgactgtagtactgcatttactcaacgaagtgatggaaaatattgaagtttatcatgaattttggtttgaggaagccacaaatttggtaaccaaacttgatattcaaatgaaactccctggaaaataccacagtgttcaccaaggtaacttggaatctcagctagcctctgagagttactataaagaaacactaagtgtcccaacagtggagcacattattcaggaacttaaagatatattcttagaacagcacctcaaagctcttaaatgcttatctctggtaccctcagtcatgggacaactcaaattcaatacaccggaggaacaccatgctgacatgtgtagaagtgacttacccaatactgacacgctctcagccaagcttcactgttggagaatcaaatagaaacacaggaggaaagatatagagcttccatccaccatctatgaagccctccacctgcctgacatcaagttttttcctaatgtgtatgcattgatgaaggtcctgtgtattcttcctgtgatgacggttgagaatgagtggtatgaaaatggacgaaagcgtcttaaagcatatttaaggaacactttgacagaccaaagttcgagtaacttggctttgcttaacataaattgtgacataaaacacaacctggatttaatggcggacacacacgttaaaccctatacaagtaagtcagagcttcccacagataattccaaaaccatcgaaaatacctag

SEQ ID NO: 427 - DNA, 766 bp, Homo sapiens
atgggcaatggccgcagtagtggcaagaggatgaacaacaaatttgatgctttgaaagatgacaacaatagggaccatgatcagaatgaagaaagcagcacacagaaagatactgagaaagaaaaaacacaatgggacaagaataagagcagtaacaagaggaaggctgttgtccctggacaggcagagcatcccctgcagtacaactacactttctggtactccaggagaacccctgtctgtcccaccagctcacagagttatgaacagaatatcaaacagattggcacctttgcctctgtggagcagttctggaggttttatagccacatggtatgtccaaaggatctgacaggccacagtgacttcgatctcttcaaaaaggaattaaacccatgtgggaggataatgcaaataaaaatggtgacaagaggattatttggctgcggaagggcttgatctcccattgctgggagaatctcattttggccatgttgggggaaaagttcatggttggggaggagatctgtggggctgtggtctctcttcactgtcaagaggacattatttcaatatggaaaagactgccagtgaccaagcaaccacaacgtgaatctgggatacactttggcgagtgcttaacctatctcccaacaccattatgaaatacaaaactcacaccgacagcatcaaaacgccaggcagcctgggctcccaaaggctcctttatcaaaacctctggaagctgcggttgaatgtgccatga

SEQ ID NO: 428 - DNA, 1640 bp, Homo sapiens
ggggagagaggctctgggttgctgctgcttctgctgctgctgctgctgtgtggctgtttctgtacactcactggcaggcttggtgccggctccctcgcccgcccgcccgccagcctgggaaagtgggttacagagcgaaggagctcagctcagacactggcagaggagcatccagtcacagagagaccaaacaagaaccctttcctttggcttcctcttcagctcttccagagggcttgctatttgcactctctcttttgaaattgtgttgcttttacttttcacccttctgcttgggttttatgagggctttgttaagtcttagagggaaaagagactgagcgagggaaagagagaggcaaagtggaaaggaccataaactggcaaagcccgctctgcgctcgctgtggatgaaagccccgtgttggtgaagcctctcctcgcgagcagcgcgcacccctccagagcaccccgcggacccgcacctcggcgtggccaccatggtcaggagagttcagccggatcggaaacagttgccactggtcctactgagattgctctgccttcttcccacaggactgcctgttcgcagcgtggattttaaccgaggcacggacaacatcaccgtgaggcagggggacacagccatcctcaggtgcgttgtagaagacaagaactcaaaggtggcctggttgaaccgttctggcatcatttttgctggacatgacaagtggtctctggacccacgggttgagctggagaaacgccattctctggaatacagcctccgaatccagaaggtggatgtctatgatgagggttcctacacttgctcagttcagacacagcatgagcccaagacctcccaagtttacttgatcgtacaagtcccaccaaagatctccaatatctcctcggatgtcactgtgaatgagggcagcaacgtgactctggtctgcatggccaatggccgtcctgaacctgttatcacctggagacaccttacaccaactggaagggaatttgaaggagaagaagaatatctggagatccttggcatcaccagggagcagtcaggcaaatatgagtgcaaagctgccaacgaggtctcctcggcggatgtcaaacaagtcaaggtcactgtgaactatcctcccactatcacagaatccaagagcaatgaagccaccacaggacgacaagcttcactcaaatgtgaggcctcggcagtgcctgcacctgactttgagtggtaccgggatgacactaggataaatagtgccaatggccttgagattaagagcacggagggccagtcttccctgacggtgaccaacgtcactgaggagcactacggcaactacacctgtgtggctgccaacaagctgggggtcaccaatgccagcctagtccttttcagacctgggtcggtgagaggaataaatggatccatcagtctggccgtaccactgtggctgctggcagcatctctgctctgccttctcagcaaatgttaatagaataaaaatttaaaaataaaaaaaaaaaaaaaaaaaaaaaaaaaaaaaaaaaaaaaaaaaaaaaaaaaaaaaaaaaaaaaaaaaaaaaaaaaaaaaaaaaaaaaaaaaaaaaaaaaaaaa

SEQ ID NO: 429 - protein, 338 aa, Homo sapiens
MVRRVQPDRKQLPLVLLRLLCLLPTGLPVRSVDFNRGTDNITVRQGDTAILRCVVEDKNSKVAWLNRSGIIFAGHDKWSLDPRVELEKRHSLEYSLRIQKVDVYDEGSYTCSVQTQHEPKTSQVYLIVQVPPKISNISSDVTVNEGSNVTLVCMANGRPEPVITWRHLTPTGREFEGEEEYLEILGITREQSGKYECKAANEVSSADVKQVKVTVNYPPTITESKSNEATTGRQASLKCEASAVPAPDFEWYRDDTRINSANGLEIKSTEGQSSLTVTNVTEEHYGNYTCVAANKLGVTNASLVLFRPGSVRGINGSISLAVPLWLLAASLLCLLSKC

SEQ ID NO: 430 - DNA, 4984 bp, Homo sapiens
ggttatttgtggttcgctttgatcccgagggggaacctgaaactctcacattcctggcatagcagccgcctccggcgcgggccgaccctggggctgcgcgctggggcgcgaacagccagagcgtcggcgccacggccgagaacacatcttcgccgccgagctgagctgggccgagccggaggttgtggtgtctgactgcgctgggcaccctcgggccgcagcggtgctctggggccaggtgccaccggccattgtccaggcagctgtgtgcaagccaaagaagcatgaggacactggaagactcctcggggacagtcctgcaccgcctcatccaggagcagctgcgctacggcaacctgactgagacgcgcacgctgctagccatccagcagcaggccctgaggggtggggctggaactgggggtacagggagcccccaggcctccctggagatcctggccccagaggacagtcaggtgctgcagcaggccaccaggcaggagccccagggccaggagcaccagggcggtgagaaccacctggcagagaacaccctctaccggctatgcccacagcccagcaagggagaggagctgcccacctatgaggaggccaaagcccactcgcagtactatgcggcccagcaggcagggacccggccacatgcgggggaccgagatccccgtggggccccgggaggcagtcggaggcaggacgaggccctgcgggagctgaggcatgggcacgtgcgctcgttgagtgaacggctccttcagttgtccctggagaggaacggcgcccgggcccccagccacatgagctcctcccacagcttcccacagctggcccgcaaccagcagggccccccactgaggggcccccctgctgagggcccagagtcccgaggacccccacctcagtaccctcatgttgtactagctcatgagaccaccactgctgtcactgacccacggtaccgtgcccgcggcagcccgcacttccagcatgctgaagtcaggatcctgcaggcccaggtgcctcctgtgttcctccaacagcagcagcagtaccagtacctgcagcaatctcaggagcacccccctcccccacatccagctgctctcggccatggccccctgagctccctcagtccacctgctgtggaggggccagtgagtgcccaggcctcctcagccacctcgggcagtgcccacctggcccagatggaggccgtgctgagggagaatgccaggctgcagagagacaatgagcggctgcagagggagctggagagctctgcggagaaggctggccgcattgagaagctggaaagcgaaatccagcggctctctgaggcccatgagagcctgaccagagcctcctccaagcgtgaggccctggagaagaccatgcggaacaagatggacagtgaaatgaggaggctgcaagacttcaaccgggatcttagagagagattggaatctgcaaatcgccgcctggcaagcaagacacaggaggcccaggccggcagtcaggacatggtggccaagctgcttgctcagagctacgaacagcagcaggagcaagagaagctggagcgagagatggcactgctgcgcggcgccatcgaggaccagcggcggcgtgccgagctgctggagcaggctctgggcaatgcgcagggccgggcagctcgagccgaagaggagctgcgcaagaagcaggcctatgtggagaaagtggagcggctgcagcaggcgctcgggcagctgcaggcagcctgtgagaagcgggagcagctggagctgcgtctgcggactcgcctggagcaggaactcaaggccctgcgtgcacagcagagacaggcaggtgccccaggtggtagcagtggcagtggtgggtctccagagctcagcgccctgcgactgtcagaacaactgcgagagaaggaggagcagatcctggcgctggaggccgacatgaccaagtgggagcagaagtatttggaggaacgtgccatgaggcagtttgccatggatgcggctgccacggctgctgctcagcgtgacaccactctcatccgacattccccccagccctcacccagcagcagcttcaatgagggtctgctcactggtggccacaggcatcaggagatggaaagcaggttaaaggtgctccatgcccagatcctggagaaggatgcagtgatcaaggtccttcagcagcgctccaggagagaccctggcaaggccatccagggctccctgcggcctgccaagtcggtgccatctgttttcgcggctgcggcagcaggaacccagggctggcaagggctctcttctagtgagcgacaaacagcagacgcccctgctcggctgactacagcagacagagcacccacagaggagccagtggtcacagctccccctgctgcccatgccaaacacgggagcagagatgggagcacccagactgagggccccccagacagcacctccacctgcctgccaccggagcctgacagccttctggggtgcagcagtagccagagagcagcctctctggactctgtagctacatccagagtccaggacttgtcagacatggtggagatactgatctgaaggaggtggtgcttcaggactctgagccattctctcccctcctctgccctgtgccactctcagccatttcagcagccccgtcaaccgctgctccgtccctttccccagccagacactcattcccattgaccatctggtcccaggagctcaggaggaggaccccaggggagaggagagctgtgagagcaccggcacccccagaagactctgcttcttagcccacattcctccgggccttatggagaatgaggattcagccttgacttcttgcccaaggcctgctactggggtagcaactgacagctcagaaaggagctgagctccctctgccctgccagttgtcagtcaggcagggagggagtggctgtgttggtttggggaactaatttccacggacggctgcccgtggacaccaggtggactggttcactaatcaagtcagccatattgttctctggctaagtttggttccagccaacgtcatctgctcttcagttcctcactgccttcttgggatactaagacttgaattttttggggactattaagggtgttagtcttggagaagacacagcctcaccttctcacttgctgtgggtgaggggccatttaagtggactgggagacagtgcgcagtttgtatataattccctttcttgtggaacagaagactgaggcctgcaggttccgatgtgtctccatgggctgtgctcccctcttcctactgtcagtttctgaaacttctgactggcctcccagttatgcctcctcctcaagttcctggcccgtggatgttaaagctgctcgattcccaggatctcggctgccttttcctctatcttgagccctataaatgcccacgggacccccaccaccagcctcttgaagtggctccacagctcctgtccctggaacatcctgtcagtttggtcataaaccctgagccagatgaaatgagccaccgtgaacagacatctgccatgcccccaggtgggcttcggtggccctacccggtaccagttctttctgagaaactggagatgtcttgttagcataagtgtcttcattcccacctggagggtttgggagaggagcaaagcagttgaaaactagttaatgagctacaagagtcaaatagtcctctgaatggagcccccatcacaaaacagtgcccaggaggctggctcctcaagctacccatgcccagcgccctaaagcagcaccagatgctttggaattggggtgaaacacccacatggcagcctgctagcagcagtgactttgacttctggtcttaaagagtccctcacttcagccccaggagctattggtgggttttagcagttttgtctttaccgtttttagttctccttgattctttgttttcttcctttatcgtttttaggtttggtatgtgttgttttatttccatggttcctcaagtttcctttttaaacatttgcatttgctggacaattgcaattttttttaaaaaattcccctacccctgtttaaagctgaaaaatacatttggttcatgtgcattgtttacaaagcaaaaagaaaaaagaggaaaaaaaggcaaaaaatattgtgaaagaaaaaaaacaacttaatatattttggattaatatttggtatttcttttaaagtattttttgtgctgtgaacattttctgccaaagaccatgatgtgtgtctgtatgtttaagttatcgtaaatatttaaaatgtaaacatggctgttttgttatgccaccctgtaccaggattgctgccgcattccactgggtataacagtattttaattaaaaaaaaataattaaaagtgatgtctttgcacaggtgagactttgcactgagggaagggaaagggtgaggattttggggggccacccaagtcatagtccaatctcttcaaggacccaagatagaatttaggaattttgtgaagctgcattaaggatagagttggaatgaggatgtggctggcatttttcccctttcatagataacatttcttgaaggctgggaggggaaggagggcctggcagatggcagcctcccgaggtagggctgtgttctaatcagctttgttcggccacacgctgtggttatccacagtgggagtgggtgtccaaagatggctttatccttcccccactccttttcccactcccacctagcacataaagttttgtccgaaaccatccagaaggccaggcaccatgcagaggacattcaagaatgtgcatgttcttagccaccgcctccctcctttgctgtgacatcaccactctttcctgatgctcaggaaagcatattgctccaattcaaaattaaagaaagccattctc

SEQ ID NO: 431 - protein, 780 aa, Homo sapiens
MRTLEDSSGTVLHRLIQEQLRYGNLTETRTLLAIQQQALRGGAGTGGTGSPQASLEILAPEDSQVLQQATRQEPQGQEHQGGENHLAENTLYRLCPQPSKGEELPTYEEAKAHSQYYAAQQAGTRPHAGDRDPRGAPGGSRRQDEALRELRHGHVRSLSERLLQLSLERNGARAPSHMSSSHSFPQLARNQQGPPLRGPPAEGPESRGPPPQYPHVVLAHETTTAVTDPRYRARGSPHFQHAEVRILQAQVPPVFLQQQQQYQYLQQSQEHPPPPHPAALGHGPLSSLSPPAVEGPVSAQASSATSGSAHLAQMEAVLRENARLQRDNERLQRELESSAEKAGRIEKLESEIQRLSEAHESLTRASSKREALEKTMRNKMDSEMRRLQDFNRDLRERLESANRRLASKTQEAQAGSQDMVAKLLAQSYEQQQEQEKLEREMALLRGAIEDQRRRAELLEQALGNAQGRAARAEEELRKKQAYVEKVERLQQALGQLQAACEKREQLELRLRTRLEQELKALRAQQRQAGAPGGSSGSGGSPELSALRLSEQLREKEEQILALEADMTKWEQKYLEERAMRQFAMDAAATAAAQRDTTLIRHSPQPSPSSSFNEGLLTGGHRHQEMESRLKVLHAQILEKDAVIKVLQQRSRRDPGKAIQGSLRPAKSVPSVFAAAAAGTQGWQGLSSSERQTADAPARLTTADRAPTEEPVVTAPPAAHAKHGSRDGSTQTEGPPDSTSTCLPPEPDSLLGCSSSQRAASLDSVATSRVQDLSDMVEILI

SEQ ID NO: 432 - DNA, 1181 bp, Homo sapiens
attgtctattgttctccaaacagtaaaccagtatttcacactgagattgtcggctgcgggtatattccaattccccgtctcctcatgaatatgaagtgaagggctctgaccctggaagtggttctaagcagggcaaaatggggtctcggaagtgtggaggctgcctaagttgtttgctgattccgcttgcactttggagtataatcgtgaacatattattgtatttcccgaatgggcaaacttcctatgcatccagcaataaactcaccaactacgtgtggtattttgaaggaatctgtttctcaggcatcatgatgcttatagtaacaacagttcttctggtactggagaataataacaactataaatgttgccagagtgaaaactgcagcaaaaaatatgtgacactgctgtcaattatcttttcttccctcggaattgctttttctggatactgcctggtcatctctgccttgggtcttgtccaagggccatattgccgcacccttgatggctgggagtatgcttttgaaggcactgctggacgtttccttacagattctagcatatggattcagtgcctggaacctgcacatgttgtggagtggaacatcattttattttccattctcataaccctcagtgggcttcaagtgatcatctgcctcatcagagtagtcatgcaactatccaagatactgtgtggaagctattcagtgatcttccagcctggaatcatttgaataaggacaaaatgttttccattatcaagacatggccatctatctaaatattatatcaactgtgtagacttgagggcaatattgaaatgatggtgctttctgcatttggtgtttatttgtaaaaaatttgcagtcctcactgcacatgcaagtataccacccttccatttagtatgttttttaagtaatatgcatcagaaacttcagaaatacttctgccctttgatcaaacaaatccatttccaagaatctgtactagggaagtaaataagaatatgagagaaacctttatgcaaatatgtatattgcaacattatttaatattctggaaaattggaaacaccccaaaattctaaactcagaggaaggattaagtaaagagtggtacatactgtaaatgttttctgataaaaaaaaaaaaaaaaaaaaaaaaaaaaa

SEQ ID NO: 433 - protein, 201 aa, Homo sapiens
MGSRKCGGCLSCLLIPLALWSIIVNILLYFPNGQTSYASSNKLTNYVWYFEGICFSGIMMLIVTTVLLVLENNNNYKCCQSENCSKKYVTLLSIIFSSLGIAFSGYCLVISALGLVQGPYCRTLDGWEYAFEGTAGRFLTDSSIWIQCLEPAHVVEWNIILFSILITLSGLQVIICLIRVVMQLSKILCGSYSVIFQPGII

SEQ ID NO: 434 - DNA, 3857 bp, Homo sapiens
ccgcggtcggcggcagcgctctcctaagctctcgcggctgcgcttcggtcccggacccgggccacccacggggtagtgggtgctcctcggccccggacattgcaagccccagaaggcaagactaactcggtgttgctcctcccggcgctgacttcgaggcccggctatggacggcgagagcgaggtggatttttctagcaacagcataacccctttgtggcggaggcggtcgattcctcagccccaccagcttctgggccggagcaagccgaggccccagtcctaccagagccccaacgggttactaattacggatttcccggtggaggacggagggacgctctccgcagcgcagattcccgcccaggtgcccaccgcctcggacagcaggacggtacataggagccccctgcttctgggcgcccagcggagagcggtggccaatggtgggacggcatccccggagtacagggctgcctctcctcgacttcgacggcccaagtcacccaagctccccaaagcggtgcctggcggctccccgaaatccccagcaaatggcgcggtgaccttgcctgcgccgccgccgccgccggttctgcgccccccgcggactcctaacgcgcccgccccctgcacccccgaggaggaccttactgggttgactgccagcccggtgccttcgcccactgcaaatggccttgccgctaataacgactctcctgggtcaggttcgcagtccggccggaaggcaaaggaccccgaacgggggctctttcctgggccccagaaaagttcttcggaacaaaaactccccctccaaaggctgccctcccaggagaacgagctcctcgagaatccttccgtggttttgagtacaaacagccccgccgccctcaaagtggggaagcagcagatcattccgaagagtctggcctcggaaattaaaataagtaaatccaacaatcaaaatgtggagccccacaagagactcctcaaggtgcgcagcatggtggagggcctaggaggacccctgggtcacgcaggggaggagagtgaggtcgataacgacgtggatagcccagggtctctgcggagaggcttgcggtccacgtcttatcgcagggcagtggtcagtggctttgattttgacagtcctaccagctcgaagaagaagaacagaatgtcccagcctgttctgaaagtggtgatggaagacaaggagaagttttccagtctgggaaggataaagaaaaaaatgctgaaaggacaaggaacatttgatggggaagaaaatgctgtcctgtatcaaaactacaaggaaaaggcccttgacattgattctgatgaagagtcagagcccaaagaacagaagtcagatgaaaaaattgtgattcaccataagccattgagatccacatggagccaactctctgcggtgaaaagaaagggattatctcagacagtaagccaggaggaaagaaagagacaagaggctatctttgaagtcatatcctctgaacattcatatttactcagcttggagatcttgatacgaatgtttaaaaattctaaagaactgagtgatacaatgactaaaaccgagaggcaccatcttttctccaatattacagatgtctgtgaggcaagcaaaaagttctttatagagttggaagcaagacatcagaataatatcttcatagatgacataagtgacattgtggaaaaacacacagcatccacatttgacccatatgtgaaatactgcacaaatgaagtctaccaacaacgaacactacaaaaattgttagctaccaatccttcctttaaggaagtattgtcaaggattgagtcccatgaagactgtaggaacttacccatgatctcttttctcattctccccatgcagagggtgacccgccttcccctgctgatggatactatctgtcaaaaaacacctaaggactctccgaagtatgaagtctgcaaaagagccttgaaggaagttagcaagttggttcgactatgcaatgagggcgcccggaagatggaaaggactgagatgatgtacacaattaactcccagctggaatttaaaattaagccttttcctttagtctcctcttcccggtggttggtaaaaagaggtgaattgacagcctatgttgaagacactgtgcttttctcaagaaggacatccaaacagcaagtctacttctttctctttaacgatgtgctcattatcaccaagaagaagagtgaagaaagttacaacgtcaatgattattccttaagagatcagctattggtggaatcttgtgacaatgaagagcttaattcttctccagggaagaacagctccacaatgctctattcaagacagagctctgccagtcacctctttactctgacagtccttagtaaccacgcgaatgagaaagtggagatgctactaggagctgagacgcagagcgagcgagcccgctggataactgccctgggacacagcagagggaagccgcctgcagaccgaacctcactgacccaggtggaaatcgttaggtcatttactgctaagcagccagatgaactctccctgcaggtggctgacgtcgtcctcatctatcaacgtgtcagcgatggctggtatgagggggaacgactacgagatggagaaagaggctggtttcctatggaatgtgccaaggagataacatgtcaagctacaattgataagaatgtggagagaatgggacgcttgctaggactggagaccaacgtgtagtctctcagatggtcttttgttactgcaagatttgcacgacacttaccgggctggttggttctgggctagttttattgttaattttgtcacagcctatttaattaaaagaacgaaaacacttgcctttaagcttgccaggttgttccgctctctcatgagaagagcttggatacagtgagtttgcacagctcagtttttacctaaccacacacttgcagacctcctgaggtacacagagtagctgagcagttcacttcagggatcaggtcatctctgctcctcctagtttcaccatgttctggcaataaaaaacacatattatatcctggttttctctatccttgcattactaaggtgactgtctctctttatacatccttgtatggttctcccagtattagcaagattgtatatctgtaaagaatgtccagttttgtaaatatttccctgcctttttttttctttttttacatctgattttaatgcttcgttaacttcaaaaggaactggtagagttcagaaggtgagctgttgtttttctaaacctcttcccaggaaggggacattgacacttgaatttttgtcacctttttcctcattagaaggaaagtagaaagccttactgtaggatttttaaaaaaaaatccatctcaccccatattggtcttaaataagtatagactaattaacctaagctacctttaacaacgtagaatttagatgggttcatatatgtgagaaaaacctgaatataggacaggggtcctacttttttccccacctctgtcgcccaggctagagtatagtggtgtgatcttggcccactgcaacctctgcttcctaggttcaagtgattctcctgcctcagcctcccaagtagctgggattgtaagagtatgccaccacgcccagctactttttgtatttttagtagagacagggtttcatcatgttggccaggatggtctcttaactcctgccctcaagtgatccaccagagaggagatcctcggcctccccaagtgctgggattataggcatgagccaccgtgcccagcctactttctaattaatt

SEQ ID NO: 435 - protein, 871 aa, Homo sapiens
MDGESEVDFSSNSITPLWRRRSIPQPHQLLGRSKPRPQSYQSPNGLLITDFPVEDGGTLSAAQIPAQVPTASDSRTVHRSPLLLGAQRRAVANGGTASPEYRAASPRLRRPKSPKLPKAVPGGSPKSPANGAVTLPAPPPPPVLRPPRTPNAPAPCTPEEDLTGLTASPVPSPTANGLAANNDSPGSGSQSGRKAKDPERGLFPGPQKSSSEQKLPLQRLPSQENELLENPSVVLSTNSPAALKVGKQQIIPKSLASEIKISKSNNQNVEPHKRLLKVRSMVEGLGGPLGHAGEESEVDNDVDSPGSLRRGLRSTSYRRAVVSGFDFDSPTSSKKKNRMSQPVLKVVMEDKEKFSSLGRIKKKMLKGQGTFDGEENAVLYQNYKEKALDIDSDEESEPKEQKSDEKIVIHHKPLRSTWSQLSAVKRKGLSQTVSQEERKRQEAIFEVISSEHSYLLSLEILIRMFKNSKELSDTMTKTERHHLFSNITDVCEASKKFFIELEARHQNNIFIDDISDIVEKHTASTFDPYVKYCTNEVYQQRTLQKLLATNPSFKEVLSRIESHEDCRNLPMISFLILPMQRVTRLPLLMDTICQKTPKDSPKYEVCKRALKEVSKLVRLCNEGARKMERTEMMYTINSQLEFKIKPFPLVSSSRWLVKRGELTAYVEDTVLFSRRTSKQQVYFFLFNDVLIITKKKSEESYNVNDYSLRDQLLVESCDNEELNSSPGKNSSTMLYSRQSSASHLFTLTVLSNHANEKVEMLLGAETQSERARWITALGHSRGKPPADRTSLTQVEIVRSFTAKQPDELSLQVADVVLIYQRVSDGWYEGERLRDGERGWFPMECAKEITCQATIDKNVERMGRLLGLETNV

SEQ ID NO: 436 - DNA, 6065 bp, Homo sapiens
ttgaaagatgcatgagtgtgatgcagtccgggacacagatgatcaagctgaaacgtggaaccaaagggcttgtccgcctcttttacctggatgagcaccggacacgcctccgatggcgaccctctaggaagagtgagaaggcaaaaatacttattgattccatttacaaagtgactgagggccggcagtctgaaatattccacagacaagctgaggggaacttcgaccccagctgctgcttcaccatctaccatggcaaccacatggagtccctggacctcatcacctccaaccccgaggaggcccgcacctggatcacaggcctcaagtacctgatggctggcatcagtgatgaagactcccttgccaaaaggcagaggacccatgaccaatgggtgaagcagacctttgaggaagctgataagaatggtgacggcttgctgaatattgaagagatacatcagctgatgcataaactgaatgttaatctgccccgaagaaaagtcagacaaatgtttcaggaagccgacacagatgagaatcagggaactttgacatttgaagagttctgtgttttttacaaaatgatgtctttgagacgagacctttatttgttacttttgagctacagtgacaagaaagatcacctaactgtggaagaactggctcagtttttgaaggtggagcaaaagatgaataatgtgacaacggactattgtcttgacatcataaagaagtttgaagtttcagaagaaaataaggtgaaaaatgttcttggcatagaaggcttcacgaacttcatgcgtagtcctgcctgtgacatatttaacccattgcaccatgaagtgtaccaagacatggatcagcccctctgcaactactacattgcttcctctcacaatacatacctgactggagaccagctcctttctcagtccaaagtggatatgtatgcacgggtgctgcaagagggctgtcgctgtgtggaagttgactgttgggatggcccagatggagagccagtagtacatcatggttacactctcacttcaaaaattctcttcagagatgttgtggagaccatcaacaagcatgcctttgtgaagaatgagtttcctgttatattgtctatcgagaatcactgcagtatccagcagcaaaggaagattgctcagtacctgaaaggaatattcggagacaaactggacctgtcatctgttgatacaggggagtgcaagcagcttccaagccctcaaagtttgaaaggcaaaattctagtgaagggtaagaagttgccttatcaccttggggatgatgcagaggaaggggaagtttccgatgaggacagtgcagatgaaattgaagacgagtgcaaattcaagctccattatagtaatgggaccactgagcatcaggtggaatctttcataaggaaaaaactggagtcactgttaaaagaatctcaaattcgagataaagaagatcctgatagtttcacagtgcgggcactactgaaggccacgcatgaaggcttaaatgcacacctgaagcagagtccagatgtaaaggaaagtggaaagaaatcacatggacgatccctcatgaccaactttggaaaacataagaaaactacaaaatcacggtctaaatcttacagtactgatgatgaggaagacacacagcagagtactggcaaggagggtggccagctgtacagattgggtcgccgaaggaaaaccatgaagctctgccgagaactctctgatttggttgtgtacacaaactccgtggccgctcaggacattgtggatgacggaaccacaggaaatgtgttatcattcagtgaaacaagagcacatcaggttgttcagcaaaaatcagagcagttcatgatttataatcaaaagcaactcacgaggatttacccctctgcctaccgcattgattccagtaacttcaaccctctcccctactggaacgcaggctgccagctagtggcactgaattatcaatctgaaggacgaatgatgcagttaaaccgagccaaattcaaggcaaatggcaattgtggctatgtcctcaaaccccagcaaatgtgcaaaggtactttcaaccctttctctggtgaccctcttcctgccaaccccaaaaagcagctcatcctgaaagttatcagtggacagcaactccccaaacctccagactccatgtttggagatcgaggcgagatcattgacccttttgttgaagttgaaattattggattgccagtagattgttgtaaagatcaaacccgtgtggtagatgacaatggatttaaccctgtgtgggaagaaacactgacatttacagtacacatgccagaaatagctttggttcggttccttgtgtgggatcacgatcccattggacgagactttgttggacaaagaactgtgaccttcagcagcttagtgcctggctaccggcatgtctatttggaaggactgacagaagcatccatatttgtacacataaccatcaatgaaatctatggaaagaacagacaactccagggtctgaagggactgttcaataagaatcctaggcacagttcttcagaaaacaattcccattatgtacggaagcgatccattggagatagaattctgcgacgcacagctagcgccccagccaaaggcaggaaaaagagcaaaatgggcttccaagaaatggtggagataaaggattctgtgtccgaggccacaagagatcaagatggcgtgctgaggaggaccacacgcagtttgcaagcacgccctgtctctatgcctgttgacagaaaccttctgggagctttgtcgctgcctgtatctgaaacagcaaaagacattgaaggaaaagaaaactctctagcagaagataaagatggcagaagaaaagggaaagcaagtataaaagatccacattttctaaatttcaacaaaaagttatcatcctcctccagtgctctgctccacaaagataccagccaaggggacaccattgtatctactgcccacatgtcagtcacaggagaacagctgggcatgtcaagtcctaggggtgggagaaccacatcaaatgccacaagcaattgccaggaaaacccctgtcccagcaagtctctctccccaaagcagcatttggctcccgatcctgtagttaaccccacacaagatctgcatggtgtgaaaatcaaggaaaagggtaatcctgaggactttgtggaagggaaaagcatcttgtcaggaagcgtcctttctcatagcaacctagaaattaagaacctggaaggtaataggggtaagggccgagctgcaacatccttttctttgtcagacgtctccatgctctgttctgacatacctgacctacattcaactgcaattctgcaggagagtgtaatttcccatcttattgacaatgtcactttaacaaatgagaatgagccgggcagttccatctcagccctgattggccagtttgatgagaccaacaatcaggctctcacagttgtttctcatcttcataataccagtgtgatgtcaggccattgtcccttgcctagcctgggcctaaaaatgcccatcaagcatggtttttgcaagggaaaatccaagtcttccttcctgtgctcatctccggagctgatagcactctcgagttctgagaccaccaaacatgcaacgaacacagtttatgaaactacctgcactcccatctctaaaaccaaaccagatgatgacctttctagtaaggccaagacagcggccttagaaagcaacctgcctggatcccctaatacttctcgtggctggttaccaaaaagtcctaccaagggagaagactgggaaacactgaagagctgcagccctgcctcttcccctgatttgaccctggaggatgtaatagctgatcccactctctgtttcaattctggggagagcagccttgtggaaattgatggagaatcagaaaatctttctctaacaacctgtgaatataggagagagggcacaagtcaacttgcttctcctttaaaactcaagtacaatcagggtgtggtagaacactttcaaagaggtttgagaaacggctactgtaaagagaccctccgcccttctgtccctgaaatattcaacaatattcaagatgtcaaaactcaaagtatttcttatctagcctatcagggtgctggctttgtgcataatcatttctcagattcagatgcaaaaatgttccagacctgtgtgccccagcaatctagtgctcaagatatgcatgtccctgtacccaagcagttggcacatcttcctttgcctgctctgaaactgcctagtccttgcaaatccaaaagtctgggggacttaacatcagaggacattgcctgcaattttgagagcaagtaccagtgtattagtaagagttttgttacaactggcattagagacaagaagggcgtgactgtgaagacaaagtcgttagagcctatagatgccctgaccgagcagcttcggaagcttgtgtcctttgaccaggaagacaactgccaagtgctatattcaaagcaggatgccaatcagctcccccgggcactggtcaggaagttgtcatccagaagtcagagcagagtgcgcaatattgctagtcgtgccaaggagaaacaggaagccaacaagcagaaagttccaaaccccagcaatggggcaggagtggttcttagaaacaaaccctcagcacccacccctgcagtgaatcgccactccaccggctcctacatcgcaggctacctgaagaacacgaaagggggtggccttgaaggccggggcatcccagagggggcatgcacggctcttcactatggccacgttgaccagttttgttcagataattctgttttgcagactgagccaagcagtgatgataaaccagaaatttattttcttttgagactgtgaattatttaaaactgcattcttaaggttttcaaggtattctgtagaatgtcagagttttcagtaaataagttccttggctttggaatgattttcaaatgtatttttaaacttgtatttgggtctccctttgacttcatgtgttctccctgttaatgcgtttgtatatagatttggtgacatttcccatgtacctattatgatctttctcccttgagttgttgtaaactgtatcagtatgaaatatgtgcatgccctagatgtgaaactcctcagcagctcgggttataatgtgtgtgtgtttcaccaagatgtcctttactgtgtcctcagattgcagtcacaaatgtagtcatttttactctctaactgttgagttgattaagagactttgcaaacgacaaagggatgaattccttactttaatctgttatcatttttcctatgtttccctctttgttcagaagcccagatgcatttttataactcagttttaaaaactttaaaatagttaccttgccttttaggatgttcttatcccacccataatgagagttgaaaggggatggatagctgctccccatgcccttcccactttttggaataggccgtgagggtgtgaggaagaaggctgtcttttgtacataaggacaaaattgtttgttttacataaattttgttacatatttttgctaatggctttgtatgtaacaagaagcgagttgccaaactacctgttgtacttttgaattttctgattgaattacagactgcgaacaacggctttcagaatgagggacttccatcagactctaatgataatagtagcacaaattgaaaacttccccaaagctttcacagaatattttctcataataaaatccaagtgaacagataattagaagaaacccttttccttcagggaaccaagcaactctattttagtactgacatgcattattttcactgtgaattcacttttttattgcatgttcagatgtccctctttgttttttttttttgtaacattaactgcaatgatgttcttcctggaattcatgaaaatataattaaaacacatttttaaac

SEQ ID NO: 437 - protein, 1655 aa, Homo sapiens
MSVMQSGTQMIKLKRGTKGLVRLFYLDEHRTRLRWRPSRKSEKAKILIDSIYKVTEGRQSEIFHRQAEGNFDPSCCFTIYHGNHMESLDLITSNPEEARTWITGLKYLMAGISDEDSLAKRQRTHDQWVKQTFEEADKNGDGLLNIEEIHQLMHKLNVNLPRRKVRQMFQEADTDENQGTLTFEEFCVFYKMMSLRRDLYLLLLSYSDKKDHLTVEELAQFLKVEQKMNNVTTDYCLDIIKKFEVSEENKVKNVLGIEGFTNFMRSPACDIFNPLHHEVYQDMDQPLCNYYIASSHNTYLTGDQLLSQSKVDMYARVLQEGCRCVEVDCWDGPDGEPVVHHGYTLTSKILFRDVVETINKHAFVKNEFPVILSIENHCSIQQQRKIAQYLKGIFGDKLDLSSVDTGECKQLPSPQSLKGKILVKGKKLPYHLGDDAEEGEVSDEDSADEIEDECKFKLHYSNGTTEHQVESFIRKKLESLLKESQIRDKEDPDSFTVRALLKATHEGLNAHLKQSPDVKESGKKSHGRSLMTNFGKHKKTTKSRSKSYSTDDEEDTQQSTGKEGGQLYRLGRRRKTMKLCRELSDLVVYTNSVAAQDIVDDGTTGNVLSFSETRAHQVVQQKSEQFMIYNQKQLTRIYPSAYRIDSSNFNPLPYWNAGCQLVALNYQSEGRMMQLNRAKFKANGNCGYVLKPQQMCKGTFNPFSGDPLPANPKKQLILKVISGQQLPKPPDSMFGDRGEIIDPFVEVEIIGLPVDCCKDQTRVVDDNGFNPVWEETLTFTVHMPEIALVRFLVWDHDPIGRDFVGQRTVTFSSLVPGYRHVYLEGLTEASIFVHITINEIYGKNRQLQGLKGLFNKNPRHSSSENNSHYVRKRSIGDRILRRTASAPAKGRKKSKMGFQEMVEIKDSVSEATRDQDGVLRRTTRSLQARPVSMPVDRNLLGALSLPVSETAKDIEGKENSLAEDKDGRRKGKASIKDPHFLNFNKKLSSSSSALLHKDTSQGDTIVSTAHMSVTGEQLGMSSPRGGRTTSNATSNCQENPCPSKSLSPKQHLAPDPVVNPTQDLHGVKIKEKGNPEDFVEGKSILSGSVLSHSNLEIKNLEGNRGKGRAATSFSLSDVSMLCSDIPDLHSTAILQESVISHLIDNVTLTNENEPGSSISALIGQFDETNNQALTVVSHLHNTSVMSGHCPLPSLGLKMPIKHGFCKGKSKSSFLCSSPELIALSSSETTKHATNTVYETTCTPISKTKPDDDLSSKAKTAALESNLPGSPNTSRGWLPKSPTKGEDWETLKSCSPASSPDLTLEDVIADPTLCFNSGESSLVEIDGESENLSLTTCEYRREGTSQLASPLKLKYNQGVVEHFQRGLRNGYCKETLRPSVPEIFNNIQDVKTQSISYLAYQGAGFVHNHFSDSDAKMFQTCVPQQSSAQDMHVPVPKQLAHLPLPALKLPSPCKSKSLGDLTSEDIACNFESKYQCISKSFVTTGIRDKKGVTVKTKSLEPIDALTEQLRKLVSFDQEDNCQVLYSKQDANQLPRALVRKLSSRSQSRVRNIASRAKEKQEANKQKVPNPSNGAGVVLRNKPSAPTPAVNRHSTGSYIAGYLKNTKGGGLEGRGIPEGACTALHYGHVDQFCSDNSVLQTEPSSDDKPEIYFLLRL

SEQ ID NO: 438 - DNA, 1931 bp, Homo sapiens
aggaggccgggaacatggcggggcagcccgcggccaccggctcgccgtctgccgacaaggacggaatggagcccaacgtcgtggctcggatctcgcagtgggcagacgaccacctgcgcctagtccggggacacggtattcctctctggcccaagctggagtgcagtggcacgatcatagctcactgctgctgctccacccacttcggccgaaaagatcctcccacttcagcctcccgagtagctggaaccacagaacatcagcactggaatggccatagctggaataatgttacttttgagaagcattcgactgacatcaaaatttacaagctcttcggatattccagtagaatttataagaagaaatgttaaactacgtggacgattacgccgaataactgagaatggtttagaaattgaacatatacctattactttacctattatagcttcattgagaaaagagccacgtggtgctttgctggttaagttggctggagtagaactcgctgaaactgggaaggcatggttacaaaaagagctaaaaccttcccaattactatggttccaacttcttggaaaggagaattcagcactcttttgctatcttctggtgagtaagggtggatatttcagcgtgaatctgaatgaagaaattttgagaagaggccttggcaaaactgttcttgttaaagggcttaaatatgattctaaaatctactggacagttcacagaaacttacttaaagctgaattaacagccttaaaaaaaggagaaggaatatggaaggaagactctgaaaaagaaagttacttagaaaaattcaaagattcctggagagaaatatggaaaaaggacagttttttaaaaacaacaggatcagatttcagcttgaaaaaagaaagttattatgaaaaacttaaaaggacttatgaaatatggaaagacaacatgaacaactgctccttaatactgaagttcagagaacttataagtcgcataaactttcgtagaaaagggtgaaacggtcaagaaatctagaggtaaccttctccaaagagtgaaatatgtaaatatatggacgtttttcattgaatcaaaatggaagttttgccaaatgatcaaagtgttagtccaatggtatttaaatattaaaaagagatgattattataagcataatgtcagaattaatttgaacaaattataattaatgtaatatgattttaggaaggatgaaacactttatgagaagttaccaggctgaatgatttacatatatagtgctaatgtgtgaagagaaagtttaactcttcacccactatgttgtttttagttattttgggctgccatattgaattttttgtttgtttgttttgagaaggcgtttcgctcttgttgcccaggctggagtgcaatggcgtgatcttggctcactgcaacctcctgcttcctgggttcaagcgattctcctgcctcagcctcctgagtagctgggattacaggcatgcaccaccatgcccggctaattttgcatttttagtagagacggggtttctccatgttggtcaggctggtctcaaactcttgacttcagatgatctacccaccttggcatcctaaagtgctgggattacaggcgtgagctaccaagcccggctttttttgttttgacatggagtttcgctcttgtcacccaggcaggagtgcagtggcgttatcttggttcactgcaacctccgcctcctggattcaagtgattctcctgcctgagcctcccaagtacctgggattacaggagctcccaccaagcctggctaagttttgtattgccatattgaatttttgtttagaaaagatatgtgtttatgtttccagttttattacctttcactatttataataaaggaattctttatgctttatgtcc

SEQ ID NO: 439 - protein, 251 aa, Homo sapiens
MAIAGIMLLLRSIRLTSKFTSSSDIPVEFIRRNVKLRGRLRRITENGLEIEHIPITLPIIASLRKEPRGALLVKLAGVELAETGKAWLQKELKPSQLLWFQLLGKENSALFCYLLVSKGGYFSVNLNEEILRRGLGKTVLVKGLKYDSKIYWTVHRNLLKAELTALKKGEGIWKEDSEKESYLEKFKDSWREIWKKDSFLKTTGSDFSLKKESYYEKLKRTYEIWKDNMNNCSLILKFRELISRINFRRKG

SEQ ID NO: 440 - DNA, 1124 bp, Homo sapiens
atgcctgaggaagccagcagctgcgaaagctggggtcgagatcaaggggatacgaagtgcacaaatggggccctggaggcccacagatacgttagctgtcttgctgaaactccttttttcacccttgaaaaccactgcaagaatggccaagaacccagctatcctgaggctgtgaccatctatgacaagccggcatctttctttcaagagacacctctggacctgcagcaccgactcttcatgaagctgggcagcacgcactctccgttcagggcccgctcagaacctgaggacccagccaggagcggtcggccttcatgaagcgggatgctgggagcgggctggtgatgcgtctccatgagcggccagccctgctggtcagcagcacaggctggacaggtctgcacgacccatggaacacttgagaggacgaagacttctccatcctgctggcagctttagaaaagtttgagcaactgactcttgacgaacacaaccttccttctctcgtctgtgtgataacaggcaaatggcctctgagggagtattacagccacctcatccaccagaagcatttccagcacatccaggtctgcaccccctggctggaggccgaggactaccccctgcttctagggtcggtggacctgggtgtctgtctgcacacgtcctccagtggcctggacctgcccatgaaggtggtggacatgttcgggtgctgtttgcctgtgtgtgctgtgaacttcaagtgtttacatgagctggtgaaacatgaagaaaacagcttggtctttgaggactcagaggaactggcagctcagctgcagatgcttttctcaaactttcctgatcctgagggcaagctaaaccagttccggaagaacctgcgggagtcgcagcagctccgatgggatgagagctgggtgcagactgtgcttcctttggttatggacacataaatcctgggccagagactaaaaccccaggacccctgctgtccttcccgcagcttcttctcggagtctcagggcaaaccctttcgagcagcgcctcccagtggccagaagctgaaatgacagcagtggtgccgccgggtgaatgaattggttctgtgacccggggaa

SEQ ID NO: 441 - DNA, 3835 bp, Homo sapiens
atgcacaggcctgggcagggacacacaaccaacagctctgtcgggaacttaggagcctgctcgcctacaaaaatgataagagagatctaaagaaaacaagctaaaccttttgagggacatactgaagccagataacccaaggtattcacagcaagatacagtgagtcttaaagttaagcaccgtgcaattagctttgcttccttgggtttttgaaacatgcatctgtataaacctgcctgtgcagacatcccgagccccaagctgggtctgccaaaatccagtgaatcggctctaaaatgtagatggcacctagcagtgaccaagactcagcctcaggcggcctgcaaacctgtgaggcccagtggagcagccgaacagaaatatgtggaaaagtttctacgtgttcatggaatttcgttgcaggaaaccaccagagcagagacgggcatggcatacaggaatcttggaaaatcaggactcagagtttcttgcttgggtcttggaacatgggtgacatttggaggtcaaatttcagatgaggttgctgaacggctgatgaccatcgcctatgaaagtggtgttaacctctttgatactgccgaagtctatgctgctggaaaggctgaagtgattctggggagcatcatcaagaagaaaggctggaggaggtccagtctggtcataacaaccaaactctactggggtggaaaagctgaaacagaaagagggctgtcaagaaagcatattattgaaggattgaagggctccctccagaggctgcagctcgagtatgtggatgtggtctttgcaaatcgaccggacagtaacactcccatggaagaaattgtccgagccatgacacatgtgataaaccaaggcatggcgatgtactggggcacctcgagatggagtgctatggagatcatggaagcctattctgtagcaagacagttcaatatgatcccaccggtctgtgaacaagctgagtaccatcttttccagagagagaaagtggaggtccagctgccagagctctaccacaaaataggtgttggcgcaatgacatggtctccacttgcctgtggaatcatctcaggaaaatacggaaacggggtgcctgaaagttccagggcttcactgaagtgctaccagtggttgaaagaaagaattgtaagtgaagaagggagaaaacagcaaaacaagctaaaagacctttccccaattgcggagcgtctgggatgcacactacctcagctagctgttgcgtggtgcctgagaaatgaaggtgtgagttctgtgctcctgggatcatccactcctgaacaactcattgaaaaccttggtgccattcaggttctcccaaagatgacatcacatgtggtaaatgagattgataacatactgcgcaacaagccctacagcaagaaggactatagatcataaggcaatgcatgaaccacagaagctgcatggttaaaatagcggcctgtgcccagtacagaaaggtgttactaaccagtcttttgaatcacttagcagcttgctgctcaacctctagtgtccctccctggattctttgaggtgtctgctgtcgctaccactgtgcacatctgaaaactcacaaccaagaaaatccattctattttcttatcttggactggagtcacctattcttgcattgctgtatacacctcatgcttatgcaatgggaagaatatgggggccagggggtgtggtactaccttcaggcatttggtaactcaaagaaggctgtacagatatattttttcaaaagaacaaaatccacagatgcaatgtgagttgcgtaagaaacagagtagatagactaaattcagtgaaggaaaggaattgagagatttttcttagtaaatagattattgttaagtaaatagttattaaaaatatatctcactgcaaaaaaaaaaaagcagtatcttcactcaaaagtcttgcttggaagaataagcagaaataattttatatattttttttctattttcacattcatactaacaagttttgttccatttgttattcaataaaacaaaaatttctaggtatttgctttattacctttcaaatatttactgttgcttggccccaagaatggccttgtacaacttatccagaatgtctattaggattctaatgttatgtccacttacaagtagagacagtaaaaggatgaatacccaatctttagtgacaatgcagctgatttatgaaagagagggctacactgctatggaaacttagcttcaaagaaaatgcaatgtatctgcaattaggtgttcattttttactacattttattaaaacctgctttatactttcaactgcttgtaggcacaacttctgcaagtttaaatatttgagctttacaaataaacatacacatgctcagttttttaagtaaacctgtaaaatacccaggaaggcaaatgttcattgtttaattagcactgggattttataatataatgtttggtatttttgaggcattgttaacatgaaagtcaaccactggctttgtgaaaaatgctatgtcactattcagaatatgctgggtaaattgacttgcctagtgaaaagcaaaatgttaaagaaagaacttctggttctataatcatattatatgcactaaactatatgcatgaaagttctttgcatggattaatggggcttacccttgttgcactcgaaatctgaggtgtatctagccctgccactattggctacttaccctcattaatatcccacttgagaaaaattgtgagactatactgtgtcaatatctgtaaaaagagagaaaacatgttttgtttttttttgaagggggtggtgtgggagtggccctttaactctatttggctatctgaggatgtacaaaattctcatttaattttctggtcagcaagttccccacacagaaatcactctgaggtttacagaagaactgtaatattattttaaaatgcgatttttctgtcattagttctagatatgtacttcatggttaaattctaaatctgaaaatgctagtgggagatatcaagaaattttctttttgattactagtacctgtattctaacagagagtttgaattttttgcccgtgttatcagaatgatggaaattgatcattttcagttgttcattgtgtattcaatccagcgaactgctgtatgtatagaggagctgaggtgctgtctaatgggaaatgtgatttgattgatttatttgcttagagtaataaaagcattttgtgcattcaatcttacaatagattttatctgatctttcactgtaaggcttatgtgtattttccatatatgtaaaacatacacatgtaaaatatatgtggccataaattaggcaataatcatctaaataaaaattatattggcagctaagctgcactgaatactcaacagaaatagtagtgatcaaaagtctgagatttaaattgcaatccaaacatattctatcatcaatcaatcaatggagattaactactgaagataccatttctcactgggttttagaacactccgcactaaggttaaggcttcacaaattcacttttaaaaacttacttgcaaatcaaaaccaaatataaatattatggcttagctgtgggaacagccagttttttatatgcgaatctgtcatggtaaatatactaatgtatttcacagttagttagttagttagttatgtccttaagaaaaaattccacgcactcttattattttcttttctcttccaaaaagaattccctggcagagaatctatcattccaaaaggtaacct

SEQ ID NO: 442 - protein, 408 aa, Homo sapiens
MHLYKPACADIPSPKLGLPKSSESALKCRWHLAVTKTQPQAACKPVRPSGAAEQKYVEKFLRVHGISLQETTRAETGMAYRNLGKSGLRVSCLGLGTWVTFGGQISDEVAERLMTIAYESGVNLFDTAEVYAAGKAEVILGSIIKKKGWRRSSLVITTKLYWGGKAETERGLSRKHIIEGLKGSLQRLQLEYVDVVFANRPDSNTPMEEIVRAMTHVINQGMAMYWGTSRWSAMEIMEAYSVARQFNMIPPVCEQAEYHLFQREKVEVQLPELYHKIGVGAMTWSPLACGIISGKYGNGVPESSRASLKCYQWLKERIVSEEGRKQQNKLKDLSPIAERLGCTLPQLAVAWCLRNEGVSSVLLGSSTPEQLIENLGAIQVLPKMTSHVVNEIDNILRNKPYSKKDYRS

SEQ ID NO: 443 - DNA, 4518 bp, Homo sapiens
aattcactggcgtgttccgcggcataagcaccccctctctgccttcccccagttccaactgttgtgctgcagcagatttggtctgagtctgggcagagcccctttttatggagcaaccctcccgatttgttacagcaagagcctggtgcaagtgatctttgccttcccatcgcacacaaaggcaaagagctccttaaagggacctgcctgctcctccgtgcagctgcaaacccgtgtcggtgcaggctcagcaacccaggctttcgctcgagaatgagtggggaggggtcttgaggagcccccacgtcctcccggagcggaggcgggagggagctgacagccggagtggatggagaccaccagtccgaggggacccgcttgcgattagctgcttcttgggatgctccgcgcgccagttgagcatcctgcctgtggtccaggggatgctggcggcgcatcttgcggtaagcctgcgctgatttgagccatcgcccagaagcgagcccgcattcagacaccgcggaccggctccgcgaagggctgcgtgcagtcaccatgaatgctcagctctaggcttctgtaaaaacctcccccactgcatggatttggctgtttaatcagccgagattacagcccgggaagatttgcaaacctgattctccctccagctgctgtgacaacttcggggccgtctgtttacttctctgggtccccggggactctttcctgcatcgcagccccttgtgccactttgtgggcttggctcgaaagtcagccgccaggactcctctgacggcatccccaggaagggggagcaaggagggcttaaaagaaaagcagaaatccccgcaactgctcaacctctcgtgactgcctgtgttctggggttctgagagggaccgtgcgctgcctggggaagcaatgcaagtctccatagcctgcacagagcacaatttgaagagtcggaatggtgaggaccgacttctgagcaagcagagctccaccgcccccaatgtggtgaacgcagcccgggccaaattccgcacggtcgctatcatcgcgcgcagcctggggacgttcacgcctcagcatcacatttctctcaaagagtccaccgcaaagcagactggcatgaaatataggaatcttggaaaatcaggactcagagtttcttgcttgggtcttggaacatgggtgacatttggaggtcaaatttcagatgaggttgctgaacggctgatgaccatcgcctatgaaagtggtgttaacctctttgatactgccgaagtctatgctgctggaaaggctgaagtgattctggggagcatcatcaagaagaaaggctggaggaggtccagtctggtcataacaaccaaactctactggggtggaaaagctgaaacagaaagagggctgtcaagaaagcatattattgaaggattgaagggctccctccagaggctgcagctcgagtatgtggatgtggtctttgcaaatcgaccggacagtaacactcccatggaagaaattgtccgagccatgacacatgtgataaaccaaggcatggcgatgtactggggcacctcgagatggagtgctatggagatcatggaagcctattctgtagcaagacagttcaatatgatcccaccggtctgtgaacaagctgagtaccatcttttccagagagagaaagtggaggtccagctgccagagctctaccacaaaataggtgttggcgcaatgacatggtctccacttgcctgtggaatcatctcaggaaaatacggaaacggggtgcctgaaagttccagggcttcactgaagtgctaccagtggttgaaagaaagaattgtaagtgaagaagggagaaaacagcaaaacaagctaaaagacctttccccaattgcggagcgtctgggatgcacactacctcagctagctgttgcgtggtgcctgagaaatgaaggtgtgagttctgtgctcctgggatcatccactcctgaacaactcattgaaaaccttggtgccattcaggttctcccaaagatgacatcacatgtggtaaatgagattgataacatactgcgcaacaagccctacagcaagaaggactatagatcataaggcaatgcatgaaccacagaagctgcatggttaaaatagcggcctgtgcccagtacagaaaggtgttactaaccagtcttttgaatcacttagcagcttgctgctcaacctctagtgtccctccctggattctttgaggtgtctgctgtcgctaccactgtgcacatctgaaaactcacaaccaagaaaatccattctattttcttatcttggactggagtcacctattcttgcattgctgtatacacctcatgcttatgcaatgggaagaatatgggggccagggggtgtggtactaccttcaggcatttggtaactcaaagaaggctgtacagatatattttttcaaaagaacaaaatccacagatgcaatgtgagttgcgtaagaaacagagtagatagactaaattcagtgaaggaaaggaattgagagatttttcttagtaaatagattattgttaagtaaatagttattaaaaatatatctcactgcaaaaaaaaaaaagcagtatcttcactcaaaagtcttgcttggaagaataagcagaaataattttatatattttttttctattttcacattcatactaacaagttttgttccatttgttattcaataaaacaaaaatttctaggtatttgctttattacctttcaaatatttactgttgcttggccccaagaatggccttgtacaacttatccagaatgtctattaggattctaatgttatgtccacttacaagtagagacagtaaaaggatgaatacccaatctttagtgacaatgcagctgatttatgaaagagagggctacactgctatggaaacttagcttcaaagaaaatgcaatgtatctgcaattaggtgttcattttttactacattttattaaaacctgctttatactttcaactgcttgtaggcacaacttctgcaagtttaaatatttgagctttacaaataaacatacacatgctcagttttttaagtaaacctgtaaaatacccaggaaggcaaatgttcattgtttaattagcactgggattttataatataatgtttggtatttttgaggcattgttaacatgaaagtcaaccactggctttgtgaaaaatgctatgtcactattcagaatatgctgggtaaattgacttgcctagtgaaaagcaaaatgttaaagaaagaacttctggttctataatcatattatatgcactaaactatatgcatgaaagttctttgcatggattaatggggcttacccttgttgcactcgaaatctgaggtgtatctagccctgccactattggctacttaccctcattaatatcccacttgagaaaaattgtgagactatactgtgtcaatatctgtaaaaagagagaaaacatgttttgtttttttttgaagggggtggtgtgggagtggccctttaactctatttggctatctgaggatgtacaaaattctcatttaattttctggtcagcaagttccccacacagaaatcactctgaggtttacagaagaactgtaatattattttaaaatgcgatttttctgtcattagttctagatatgtacttcatggttaaattctaaatctgaaaatgctagtgggagatatcaagaaattttctttttgattactagtacctgtattctaacagagagtttgaattttttgcccgtgttatcagaatgatggaaattgatcattttcagttgttcattgtgtattcaatccagcgaactgctgtatgtatagaggagctgaggtgctgtctaatgggaaatgtgatttgattgatttatttgcttagagtaataaaagcattttgtgcattcaatcttacaatagattttatctgatctttcactgtaaggcttatgtgtattttccatatatgtaaaacatacacatgtaaaatatatgtggccataaattaggcaataatcatctaaataaaaattatattggcagctaagctgcactgaatactcaacagaaatagtagtgatcaaaagtctgagatttaaattgcaatccaaacatattctatcatcaatcaatcaatggagattaactactgaagataccatttctcactgggttttagaacactccgcactaaggttaaggcttcacaaattcacttttaaaaacttacttgcaaatcaaaaccaaatataaatattatggcttagctgtgggaacagccagttttttatatgcgaatctgtcatggtaaatatactaatgtatttcacagttagttagttagttagttatgtccttaagaaaaaattccacgcactcttattattttcttttctcttccaaaaagaattccctggcagagaatctatcattccaaaaggtaacct

SEQ ID NO: 444 - protein, 401 aa, Homo sapiens
MQVSIACTEHNLKSRNGEDRLLSKQSSTAPNVVNAARAKFRTVAIIARSLGTFTPQHHISLKESTAKQTGMKYRNLGKSGLRVSCLGLGTWVTFGGQISDEVAERLMTIAYESGVNLFDTAEVYAAGKAEVILGSIIKKKGWRRSSLVITTKLYWGGKAETERGLSRKHIIEGLKGSLQRLQLEYVDVVFANRPDSNTPMEEIVRAMTHVINQGMAMYWGTSRWSAMEIMEAYSVARQFNMIPPVCEQAEYHLFQREKVEVQLPELYHKIGVGAMTWSPLACGIISGKYGNGVPESSRASLKCYQWLKERIVSEEGRKQQNKLKDLSPIAERLGCTLPQLAVAWCLRNEGVSSVLLGSSTPEQLIENLGAIQVLPKMTSHVVNEIDNILRNKPYSKKDYRS

SEQ ID NO: 445 - DNA, 3715 bp, Homo sapiens
agaaaaatcaattcagattactttgatgacagtgacttccagtcttctctgaaagatctccacgatgctggcagcccggacaggggcagcggggagtcagatctcagaggagaacaccaagttaaggagacagtctgggttttctgtagcagggaaagacaaatctcccaagaaagcctcagaaaacgctaaagacagcagccttagtccctcaggggaaagccagctcagggcgcgtcaactggctctgctgcgcgaagtggagatgaactggtacctaaagctctgcgacctgtccagcgagcacaccaccgtctgcaccacaggcatgccgcacaggaatcttggaaaatcaggactcagagtttcttgcttgggtcttggaacatgggtgacatttggaggtcaaatttcagatgaggttgctgaacggctgatgaccatcgcctatgaaagtggtgttaacctctttgatactgccgaagtctatgctgctggaaaggctgaagtgattctggggagcatcatcaagaagaaaggctggaggaggtccagtctggtcataacaaccaaactctactggggtggaaaagctgaaacagaaagagggctgtcaagaaagcatattattgaaggattgaagggctccctccagaggctgcagctcgagtatgtggatgtggtctttgcaaatcgaccggacagtaacactcccatggaagaaattgtccgagccatgacacatgtgataaaccaaggcatggcgatgtactggggcacctcgagatggagtgctatggagatcatggaagcctattctgtagcaagacagttcaatatgatcccaccggtctgtgaacaagctgagtaccatcttttccagagagagaaagtggaggtccagctgccagagctctaccacaaaataggtgttggcgcaatgacatggtctccacttgcctgtggaatcatctcaggaaaatacggaaacggggtgcctgaaagttccagggcttcactgaagtgctaccagtggttgaaagaaagaattgtaagtgaagaagggagaaaacagcaaaacaagctaaaagacctttccccaattgcggagcgtctgggatgcacactacctcagctagctgttgcgtggtgcctgagaaatgaaggtgtgagttctgtgctcctgggatcatccactcctgaacaactcattgaaaaccttggtgccattcaggttctcccaaagatgacatcacatgtggtaaatgagattgataacatactgcgcaacaagccctacagcaagaaggactatagatcataaggcaatgcatgaaccacagaagctgcatggttaaaatagcggcctgtgcccagtacagaaaggtgttactaaccagtcttttgaatcacttagcagcttgctgctcaacctctagtgtccctccctggattctttgaggtgtctgctgtcgctaccactgtgcacatctgaaaactcacaaccaagaaaatccattctattttcttatcttggactggagtcacctattcttgcattgctgtatacacctcatgcttatgcaatgggaagaatatgggggccagggggtgtggtactaccttcaggcatttggtaactcaaagaaggctgtacagatatattttttcaaaagaacaaaatccacagatgcaatgtgagttgcgtaagaaacagagtagatagactaaattcagtgaaggaaaggaattgagagatttttcttagtaaatagattattgttaagtaaatagttattaaaaatatatctcactgcaaaaaaaaaaaagcagtatcttcactcaaaagtcttgcttggaagaataagcagaaataattttatatattttttttctattttcacattcatactaacaagttttgttccatttgttattcaataaaacaaaaatttctaggtatttgctttattacctttcaaatatttactgttgcttggccccaagaatggccttgtacaacttatccagaatgtctattaggattctaatgttatgtccacttacaagtagagacagtaaaaggatgaatacccaatctttagtgacaatgcagctgatttatgaaagagagggctacactgctatggaaacttagcttcaaagaaaatgcaatgtatctgcaattaggtgttcattttttactacattttattaaaacctgctttatactttcaactgcttgtaggcacaacttctgcaagtttaaatatttgagctttacaaataaacatacacatgctcagttttttaagtaaacctgtaaaatacccaggaaggcaaatgttcattgtttaattagcactgggattttataatataatgtttggtatttttgaggcattgttaacatgaaagtcaaccactggctttgtgaaaaatgctatgtcactattcagaatatgctgggtaaattgacttgcctagtgaaaagcaaaatgttaaagaaagaacttctggttctataatcatattatatgcactaaactatatgcatgaaagttctttgcatggattaatggggcttacccttgttgcactcgaaatctgaggtgtatctagccctgccactattggctacttaccctcattaatatcccacttgagaaaaattgtgagactatactgtgtcaatatctgtaaaaagagagaaaacatgttttgtttttttttgaagggggtggtgtgggagtggccctttaactctatttggctatctgaggatgtacaaaattctcatttaattttctggtcagcaagttccccacacagaaatcactctgaggtttacagaagaactgtaatattattttaaaatgcgatttttctgtcattagttctagatatgtacttcatggttaaattctaaatctgaaaatgctagtgggagatatcaagaaattttctttttgattactagtacctgtattctaacagagagtttgaattttttgcccgtgttatcagaatgatggaaattgatcattttcagttgttcattgtgtattcaatccagcgaactgctgtatgtatagaggagctgaggtgctgtctaatgggaaatgtgatttgattgatttatttgcttagagtaataaaagcattttgtgcattcaatcttacaatagattttatctgatctttcactgtaaggcttatgtgtattttccatatatgtaaaacatacacatgtaaaatatatgtggccataaattaggcaataatcatctaaataaaaattatattggcagctaagctgcactgaatactcaacagaaatagtagtgatcaaaagtctgagatttaaattgcaatccaaacatattctatcatcaatcaatcaatggagattaactactgaagataccatttctcactgggttttagaacactccgcactaaggttaaggcttcacaaattcacttttaaaaacttacttgcaaatcaaaaccaaatataaatattatggcttagctgtgggaacagccagttttttatatgcgaatctgtcatggtaaatatactaatgtatttcacagttagttagttagttagttatgtccttaagaaaaaattccacgcactcttattattttcttttctcttccaaaaagaattccctggcagagaatctatcattccaaaaggtaacct

SEQ ID NO: 446 - protein, 419 aa, Homo sapiens
MLAARTGAAGSQISEENTKLRRQSGFSVAGKDKSPKKASENAKDSSLSPSGESQLRARQLALLREVEMNWYLKLCDLSSEHTTVCTTGMPHRNLGKSGLRVSCLGLGTWVTFGGQISDEVAERLMTIAYESGVNLFDTAEVYAAGKAEVILGSIIKKKGWRRSSLVITTKLYWGGKAETERGLSRKHIIEGLKGSLQRLQLEYVDVVFANRPDSNTPMEEIVRAMTHVINQGMAMYWGTSRWSAMEIMEAYSVARQFNMIPPVCEQAEYHLFQREKVEVQLPELYHKIGVGAMTWSPLACGIISGKYGNGVPESSRASLKCYQWLKERIVSEEGRKQQNKLKDLSPIAERLGCTLPQLAVAWCLRNEGVSSVLLGSSTPEQLIENLGAIQVLPKMTSHVVNEIDNILRNKPYSKKDYRS

SEQ ID NO: 447 - DNA, 5537 bp, Homo sapiens
ggaactgccgcggccgccaccgccgctgccggcgccgctgctgtaggggaccagcgcgggtgcgcagacgaaaggcgctctttgccagctgaaagttcccacggaaaaactaccatctcccctgcccaccatggcagacgaaattgatttcactactggagatgccggggcttccagcacttaccctatgcagtgctcggccttgcgcaaaaacggcttcgtggtgctcaaaggacgaccatgcaaaatagtggagatgtcaacttccaaaactggaaagcatggtcatgccaaggttcaccttgttggaattgatattttcacgggcaaaaaatatgaagatatttgtccttctactcacaacatggatgttccaaatattaagagaaatgattatcaactgatatgcattcaagatggttacctttccctgctgacagaaactggtgaagttcgtgaggatcttaaactgccagaaggtgaactaggcaaagaaatagagggaaaatacaatgcaggtgaagatgtacaggtgtctgtcatgtgtgcaatgagtgaagaatatgctgtagccataaaaccctgcaaataaacggaaacatcaggcatgaacactgtttatgtctgaatcaactgcagatctaatttggttctaagttgtcaccaaagctatagccttcataagcaacctcatttctttttttaattgttttcagattgtgctgggttagttttgcaagcaattgataatttttaaaaaattatcaatatgtataattttttttgaattttgtagatatgtttcctataatattcctgtggttttcagtatgtcagtccaagaaacaaacaagatagcttcagcagatgtgatttgtctgagcaaatcattcctgtgttttagttagatgataaaccagggttttaaatcaaacaatgtagcataaagtggtattgaagtaccatatttaagttgaactgctctgcattaattacagatttaatataaaatgaactgattatatattggaattgttgcactttcagcctgtgtagggcaaacacaaatccttaaacaaaaatcatgttatcaaaaactgtcagttattttggtggccacatgcaaccatgtgattactttggtcatactatttaccaaattgttggcaaacttgatgtaaccttatatggtggttttagtcccttcttatggttggcagaagggcactgaactgttgggtgaaagttagttagcaagtaagattataaggaagacacaaaagacagtggcaaagagggttgattaaatctataagtttttatgtgaggactttgtaagtcagcataaaaatgaaaagttgtttctcagttgtttttgcttttaactttgcccccaacgtttaaagggagtgatctgctttacatgatactatgcaatgcttgttttccaactatgttgaataaatagtaatatttatcagtaaatactcctttccaacttccttttttttttttttttttttgagactgagtctcactccatcagccaggctggagtgcagtggtgcaatctcggctcactgcaacctctgcctcccgagttcaagcaattctcctgcctcagcctcccaagtagctgggactacaggtgcatgccaccacgcccagctacttttttgtgtattttagtagagatggggtttcaccatgttgtctaggctggtcttgaactcctgacctcaggtgatccacctgcctcagcctcccaaagtgctgggattacaggcatgagccaccacacccagcccctttccaaccatttctaagtagattttttgacattaatgtatttattaaacaaaaactgagaattccttaaattgatttggaatttttgttaattttatgtcctttttttcctaaagtgaattaaagtgaatcatggaagcagcattactttatatgaatattattatttaagttaagttattttaagtatatgcattttttctgattgttgtgtgacttaattcagttgctggtgtgaactataactagcaaataattctataaactgaattattttaaaaggtattttaggtgacaccactgcatttctatttcatcttttgagtcatatgtatattatttccagaattttagacattattacagggtttgtgaggacctttgactcagtgacaatcatcatattggagcaaaacatagaacaaaatcactatctcagaaataccttaattctctaagactggctcttagacctctcccatcatgccttgacctctaaaaagccctttgttcctatcttctaaaggaaagtatatcatatatgatgatgtaactgatctaatcagtgactggaaatagcattagtaacagaagatcccaagttttagttgcttaatttgtacacacttttaaatattgtcttagcctcggcaaaccaatttggggaagaagcaagatactttaagagaaatacaaaggaaatttctaaagcacaagaaatagtgaggtagtagttagtcgtctttcctacaacattttagcttttgcccatctaaagcacaattaaaattaggctacattctttccagtattctatttaagtacctactacatactgctctagtttcttagtactctgtaatgtgtatcttaattgctactggttggcattgtaactcataggaattccagaaaattattaatccgtgctgcttgcagttcattcatatggcccctcttaaccatgctggtgttatgattcagtattaactctcaattagcatgcccctgttcttcctaacttgtaaaatttcacataaatatattttcaattgtgtacaaattaagggtgtacaaattataataatgcatctctatcttcatactttgaatggcaaacgctatttatgcataaatattttcattttaagtaatatatgaagtgtaaatactcgatatataagtatagattttaaagatatgggactttattttcacataagtcaatagatgtttctctagaacaaaatatttagtaaagctttataaattatattaaaaggaagcggggaacatgtattttttaacatagaacagaagtgacttcattctttttagacatcagaaatgttaaagttgattcccaatatttgttgtacttttttgtagcaaatgttaaaaatcacgagttaccatgtatagaatgtggactgtcatgttgatatcattgtacagtgataagccatttttatctgtatacatttcaccaatttattaacaggttgaatatttgtttctttttagaacattttatttatactgtgaagactttgttataccttatttgctacaacatagatcatatcattgctactttgacttagcatttgcatcataaacataattatgatgtttttttcatgctcccttccaggggctcagtcacttgaagaaactgttgctaaccaagctcttgactctgtttcccttaatgatacaagtctctgtaccagcgctttatgttaattaccaaaactctcctgcatcagagcatgatatctataataggagatactgcaataaaatgattaggctgtaaaatttggagacacaatttttcattacaatgcaatttgcatgtgcacatgtgcgcacataactttatatgttagttcttttttccaaactcccaactcttaaaagtattgtagtctgttggtgcctcaactgttggtaactttttttttttaaatttacaactttccacaacttgtttttgtactttaaggtttctcaattagaatatttctagttgagctgtaatttgaatgcattgttctcagggctatttgtgctaaaagctgaaatttcattattttaaagctaattgcctgaaaatatattggcagaattttcccaaattgtaataactgtgatacatgcatataaaaaaatccttaatgtcaacacacttaaactacatgctaaatagtcaagaaaaaaatggaaacagtagcatccatactggaatcttgccatatttttttcattttagaatagattttggcagtctcatcttagaatcctatccttaggatacatctgaaagcattcctttggcatggaccccagagatagttttggagccaggcattgatgtagaggttcaccaaacatatttagggataatagataaattcataatgcttttttgggtacactgaaatgtttacatactgaattctgtaatatgaactaggaacgcatttactatgagaaaatatggctcttaagcagtgtaagagtgaaaatataagcatatttccattaacagtatattgtactgatcagcagctctcattttaacatcagttaggcataatatttcatagttttcaagccttttttttctgctaacattcagacaagtaacaggcaacaaagatttaagaaaaatttatggtggaaaaccttaaaaattgagacaattcaatctatttaatctattaaattttttctctgaattgggtatatggcatcattatttgattttagcagggaacatttggatttagcttatgaaacacagatgttctatgggaacatggcttgaagccaatatgtaatttaatgtttttccattaaacaaacatctgaacaccaacttagctaccaagtgaggtcaagtgcctgaaaagtactgtatacatctaataagcatgttttccttatgtaaaagatgcactttatggcaatgcataccaggctttcacctgctagaaacatacttgttgccaactttgccatctaccactattctcctccttagaacaggtagaaacctattttacaaaaaaaaaaaaaaaaaaaaaaagacaggttattgtatttatatgaagtccctaaaactgtttcttggtattgatagacttaagtttatcttagttcaagattgcactttttaaaaaactctggactattttcagcaatgaccgaacagcttgtcacacatcatagttgtgatcttttttgaggagttatttattgtggttaatatctactataaataagcattcttgtgcttgttacaaagcataatgcaaattactagttctatactagtataatgaaaatgactagttctatactgttatgtacttttgtcttcctccccaaaaaggaaacagtttagcattgtctaaattcagtggcacttttttagtaatacatttttttttcttagatacaggagaactattgcttttacctgcagaaactcaaatgttttcgctaaaactttaaaattctaaaatacgtagtatgggtattactaattgtacattttacatttcaaaaatagttaaaattcaaatgttaagtctttgacttaaaaaacctttaaatatagataataccttaacaattataactttgtgatattattaaaatatatttgtctgttaacttcatcagttgtattaaataaaaatagttaacagcttgcacta

SEQ ID NO: 448 - protein, 153 aa, Homo sapiens
MADEIDFTTGDAGASSTYPMQCSALRKNGFVVLKGRPCKIVEMSTSKTGKHGHAKVHLVGIDIFTGKKYEDICPSTHNMDVPNIKRNDYQLICIQDGYLSLLTETGEVREDLKLPEGELGKEIEGKYNAGEDVQVSVMCAMSEEYAVAIKPCK

SEQ ID NO: 449 - DNA, 3916 bp, Homo sapiens
agagtgctgatttagaagaatacaaatcatggctgaaaatagtgtattaacatccactactgggaggactagcttggcagactcttccatttttgattctaaagttactgagatttccaaggaaaacttacttattggatctacttcatatgtagaagaagagatgcctcagattgaaacaagagtgatattggttcaagaagctggaaaacaagaagaacttataaaagccttaaaggacattaaagtgggctttgtaaagatggagtcagtggaagaatttgaaggtttggattctccggaatttgaaaatgtatttgtagtcacggactttcaggattctgtctttaatgacctctacaaggctgattgtagagttattggaccaccagttgtattaaattgttcacaaaaaggagagcctttgccattttcatgtcgcccgttgtattgtacaagtatgatgaatctagtactatgctttactggatttaggaaaaaagaagaactagtcaggttggtgacattggtccatcacatgggtggagttattcgaaaagactttaattcaaaagttacacatttggtggcaaattgtacacaaggagaaaaattcagggttgctgtgagtctaggtactccaattatgaagccagaatggatttataaagcttgggaaaggcggaatgaacaggatttctatgcagcagttgatgactttagaaatgaatttaaagttcctccatttcaagattgtattttaagtttcctgggattttcagatgaagagaaaaccaatatggaagaaatgactgaaatgcaaggaggtaaatatttaccgcttggagatgaaagatgcactcaccttgtagttgaagagaatatagtaaaagatcttccctttgaaccttcaaagaaactttatgttgtcaagcaagagtggttctggggaagcattcaaatggatgcccgagctggagaaactatgtatttatatgaaaaggcaaatactcctgagctcaagaaatcagtgtcaatgctttctctaaatacccctaacagcaatcgcaaacgacgtcgtttaaaagaaacacttgctcagctttcaagagagacagacgtgtcaccatttccaccccgtaagcgcccatcagctgagcattccctttccatagggtcactcctagatatctccaacacaccagagtctagcattaactatggagacaccccaaagtcttgtactaagtcttctaaaagctccactccagttccttcaaagcagtcagcaaggtggcaagttgcaaaagagctttatcaaactgaaagtaattatgttaatatattggcaacaattattcagttatttcaagtaccattggaagaggaaggacaacgtggtggacctatccttgcaccagaggagattaagactatttttggtagcatcccagatatctttgatgtacacactaagataaaggatgatcttgaagaccttatagttaattgggatgagagcaaaagcattggtgacatttttctgaaatattcaaaagatttggtaaaaacctaccctccctttgtaaacttctttgaaatgagcaaggaaacaattattaaatgtgaaaaacagaaaccaagatttcatgcttttctcaagataaaccaagcaaaaccagaatgtggacggcagagccttgttgaacttcttatccgaccagtacagaggttacccagtgttgcattacttttaaatgatcttaagaagcatacagctgatgaaaatccagacaaaagcactttagaaaaagctattggatcactgaaggaagtaatgacgcatattaatgaggataagagaaaaacagaagctcaaaagcaaatttttgatgttgtttatgaagtagatggatgcccagctaatcttttatcttctcaccgaagcttagtacagcgggttgaaacaatttctctaggtgagcacccctgtgacagaggagaacaagtaactctcttcctcttcaatgattgcctagagatagcaagaaaacggcacaaggttattggcacttttaggagtcctcatggccaaacccgacccccagcttctcttaagcatattcacctaatgcctctttctcagattaagaaggtattggacataagagagacagaagattgccataatgcttttgccttgcttgtgaggccaccaacagagcaggcaaatgtgctactcagtttccagatgacatcagatgaacttccaaaagaaaactggctaaagatgctgtgtcgacatgtagctaacaccatttgtaaagcagatgctgagaatcttatttatactgctgatccagaatcctttgaagtaaatacaaaagatatggacagtacattgagtagagcatcaagagcaataaaaaagacttcaaaaaaggttacaagagcattctctttctccaaaactccaaaaagagctcttcgaagggctcttatgacatcccacggctcagtggagggaagaagtccttccagcaatgataagcatgtaatgagtcgtctttctagcacatcatcattagcaggtatcccttctccctcccttgtcagccttccttccttctttgaaaggagaagtcatacgttaagtagatctacaactcatttgatatgaagcgttaccaaaatcttaaattatagaaatgtatagacacctcatactcaaataagaaactgacttaaatggtacttgtaattagcacttggtgaaagctggaaggaagataaataacactaaactatgctatttgatttttcttcttgaaagagtaaggtttacctgttacattttcaagttaattcatgtaaaaaatgatagtgattttgatgtaatttatctcttgtttgaatctgtcattcaaaggccaataatttaagttgctatcagctgatattagtagctttgcaaccctgatagagtaaataaattttatgggcgggtgccaaatactgctgtgaatctatttgtatagtatccatgaatgaatttatggaaatagatatttgtgcagctcaatttatgcagagattaaatgacatcataatactggatgaaaacttgcatagaattctgattaaatagtgggtctgtttcacatgtgcagtttgaagtatttaaataaccactcctttcacagtttattttcttctcaagcgttttcaagatctagcatgtggattttaaaagatttgccctcattaacaagaataacatttaaaggagattgtttcaaaatatttttgcaaattgagataaggacagaaagattgagaaacattgtatattttgcaaaaacaagatgtttgtagctgtttcagagagagtacggtatatttatggtaattttatccactagcaaatcttgatttagtttgatagtgtgtggaattttattttgaaggataagaccatgggaaaattgtggtaaagactgtttgtacccttcatgaaataattctgaagttgccatcagttttactaatcttctgtgaaatgcatagatatgcgcatgttcaactttttattgtggtcttataattaaatgtaaaattgaaaattcatttgctgtttcaaagtgtgatatctttcacaatagcctttttatagtcagtaattcagaataatcaagttcatatggataaatgcatttttatttcctatttctttagggagtgctacaaatgtttgtcacttaaatttcaagtttctgttttaatagttaactgactatagattgttttctatgccatgtatgtgccacttctgagagtagtaaatgactctttgctacattttaaaagcaattgtattagtaagaactttgtaaataaatacctaaaacccaagtgt

SEQ ID NO: 450 - protein, 883 aa, Homo sapiens
MAENSVLTSTTGRTSLADSSIFDSKVTEISKENLLIGSTSYVEEEMPQIETRVILVQEAGKQEELIKALKDIKVGFVKMESVEEFEGLDSPEFENVFVVTDFQDSVFNDLYKADCRVIGPPVVLNCSQKGEPLPFSCRPLYCTSMMNLVLCFTGFRKKEELVRLVTLVHHMGGVIRKDFNSKVTHLVANCTQGEKFRVAVSLGTPIMKPEWIYKAWERRNEQDFYAAVDDFRNEFKVPPFQDCILSFLGFSDEEKTNMEEMTEMQGGKYLPLGDERCTHLVVEENIVKDLPFEPSKKLYVVKQEWFWGSIQMDARAGETMYLYEKANTPELKKSVSMLSLNTPNSNRKRRRLKETLAQLSRETDVSPFPPRKRPSAEHSLSIGSLLDISNTPESSINYGDTPKSCTKSSKSSTPVPSKQSARWQVAKELYQTESNYVNILATIIQLFQVPLEEEGQRGGPILAPEEIKTIFGSIPDIFDVHTKIKDDLEDLIVNWDESKSIGDIFLKYSKDLVKTYPPFVNFFEMSKETIIKCEKQKPRFHAFLKINQAKPECGRQSLVELLIRPVQRLPSVALLLNDLKKHTADENPDKSTLEKAIGSLKEVMTHINEDKRKTEAQKQIFDVVYEVDGCPANLLSSHRSLVQRVETISLGEHPCDRGEQVTLFLFNDCLEIARKRHKVIGTFRSPHGQTRPPASLKHIHLMPLSQIKKVLDIRETEDCHNAFALLVRPPTEQANVLLSFQMTSDELPKENWLKMLCRHVANTICKADAENLIYTADPESFEVNTKDMDSTLSRASRAIKKTSKKVTRAFSFSKTPKRALRRALMTSHGSVEGRSPSSNDKHVMSRLSSTSSLAGIPSPSLVSLPSFFERRSHTLSRSTTHLI

SEQ ID NO: 451 - DNA, 4918 bp, Homo sapiens
ccaccgactcctgcccgcctcaacacaatgccttacctgtgaagcttgaggccactcaagttccaaatttgtgacaaatcccccagggctcactggagtggcagatatagacctgcagctaactggatttgatttataagagagaaatctgcagtcaatgcccactcttgccacactgctaatatggaaaacagaatgttcaataggatatggtctgataaatagtgatgattgaagatgctgctccaatacatgtgaaatcaatgggagatatctgctgtctgaagatctttcagagcttttctcgacaagctcccctgtaagaaatcggaggtatattctaccattatacagtctttctcaagtggatataaatacgtttgcctcactgtaaccagacaactagacaactaatgtgggaccatggcactgcccagatgcacgtggccaaattatgtttggagagcagtgatggcatgcttggtacaccggggattgggtgccccattgactctctgtatgttgggatgtttgcttcaggctggccatgtgctatcacaaaaattggatgatgtggacccactggtggctaccaactttggaaagataagagggattaagaaggaactcaataatgaaattttggggcctgttattcaatttcttggggttccatatgcagccccaccaacaggggaacgtcgttttcagcctccagaaccaccatctccctggtcagatatcagaaatgccactcaatttgctcctgtgtgtccccagaatatcattgatggcagattgccagaagtcatgcttcctgtgtggtttactaataacttggatgtggtttcatcatatgtgcaagaccagagcgaagactgcctatatttaaatatatatgtcccgactgaggatgatattcgggacagtgggggtcccaaaccagtgatggtgtatatccatggtggctcatatatggaaggtactggaaatttatatgatggaagtgtcttggcaagttatggcaatgtgatcgtcatcacagtcaactatcgacttggagtactcggtttcttgagtacaggcgatcaggctgcaaaggggaactatggactccttgatctcatacaagctttaagatggactagtgaaaacattggattctttggtggtgaccccttaagaatcactgtttttggatctggtgctgggggttcatgtgtcaacctgctgactttatcccattattctgaaggtaaccgttggagcaattcaaccaaaggactttttcaacgagcaatagctcaaagtggaacagccctttccagctgggctgttagttttcaacctgcaaaatatgctagaatgttggccacaaaagttggttgcaatgtttcagatacagtagagttagtggaatgcctacagaagaagccttacaaagaacttgttgaccaagatattcaaccagctcgataccacatagcctttggacctgtgattgatggtgatgtaataccagacgacccccagatattgatggagcaaggagagtttctcaactatgatataatgttaggagtgaaccaaggggaagggttaaaatttgttgaaaatatagtagatagcgatgatggtatatcagctagtgattttgactttgctgtttcaaattttgttgataatttatatggatatcctgaaggcaaagatgttttgagagaaaccattaagttcatgtatactgactgggctgaccgtcataaccctgaaaccagaagaaagacattactggctttgtttacggaccatcagtgggtggcaccagctgtagccacagcggatcttcactcaaactttggttcacctacgtacttctatgccttttaccatcattgccaaacagatcaggttccagcttgggctgatgcagcccacggagacgaggttccctatgtactgggaatccccatgattggccctacagagttatttccttgcaatttctccaaaaatgatgtgatgctgagtgcagttgtaatgacatactggacaaattttgctaaaactggtgacccaaatcaaccagtccctcaagacacgaaattcattcataccaaacccaaccgttttgaagaagtagcatggaccagatattcccagaaagaccaactttatctccatattggattaaaaccaagagttaaagaacattacagagccaataaggtgaacctctggttggagttggtacctcatctgcataatctcaatgacatttctcagtatacctctacaacaactaaagtgccatcaactgacatcactttcagacctacgagaaaaaattctgtacctgtcacgtcagcctttcccactgccaagcaggatgatcccaaacaacaaccaagtccattttcagtggatcaaagggactactcaacagagctgagtgtcactattgcagttggagcatcactgctgtttctgaacatcttggcctttgcagccctgtactacaaaaaggataagaggagacatgatgttcacaggagatgcagccctcagcgcactactaccaatgatctaacccatgcacaagaagaggaaatcatgtccctccaaatgaagcacactgatttggatcatgaatgtgagtccattcatccacatgaggtggttcttcggaccgcctgtcccccagattacacactagctatgaggaggtcacctgatgatgttcccttaatgacacccaacaccattacaatgattcccaacactataccagggattcagcccttacacacattcaatacatttactggaggacagaacaatactctgccccatccccatccccacccccattcacattcaacaaccagggtatagccagataagagaaacaaactattttttttgatggattgcagtaaacgatcactgaagattccttggctttcaacctacaagacttactatttaaataaggaggaatattatgtgaatatacatatcaagaactttgggggttttgaaaaaaatgaattgtatatatacaaatcaactttaaaaacaaatttcaattgcttgaagcaattgttctgaatgatactttttcattcacattcaagaattaattttttgaagatttaagttacataatggaattaggcatgtggaacaccaaacaggaaagaactatgtctgaaatataaaaaataaaaataaaaaaacaactatgaatatgcacaagggacacaccagtggaatgtcagataattttcaccagtttttatttggagccgttttattgtgtagaccatatttacatatttggataagtacacaaagcgtcaatgctgttaatggccttagcaaaggctcatgctgaaatttgccagtaaaacaaagaagtttaaagactggcaggtacaccattatcacataagtgctgtcagtataaagttgtggggataaaggaaactggatatttttagcacgatgtgcatgataatttatatgcttggtggctgtgctgctgattaagccgtaattaaaattcttctcatcccattggagtttttaatagaagcttcctccatcaattggcagaacctaaagaagattttaaggggcaaaagtaattacaataaaataattcacagtagtttcaatatagaaggaattagctattaaaggtatttgaagaaactataggtatagtggtgaatactcgctgatatgaatcccagaaaaaaatttcctgtttttaatgttcttttcaatcccatctagataatttatagaaatataaccctaattggacatgtggtacaggatctataagttgctgtgtttttttgttactctgtattttgttccttttggtaaggtgaagtgtgtccaaagagttacttgcaacagtctttcatgatatgaggatgcccccgtattaccactctgattatagttctgagttctttgatttactcatgctgcatgacaaaatgtttactaataacaattcattataaagttatatccctctttacatcacttatctttctcactgaggttcattcactggaatttactcacgcaatctcagtagagtacaacgtagatacagaacctaggagagtcaacatctggaggattttagtctttcttacacatatgtgtgattttaaacgaatattctcagaccacaggaaactcttcatccccctgttgtttaccagtaacagtatatcacagacctttccaaatgtttgtatatgtaatcagatgtacatttatattgaaaaacaaatgagatggacttaaagagcacatcctgataaatactttctctctcacctgtactatatttctattagactaaagttatgtgattttttttttacattttttcagatgactagcaattttgatagtttataagataatgcaaagaactttctctgacaaactaactgcagtaacagaaacctttcttttcagttactctttttcaagaatgaaagattattatacaaaaaattgtatactacttgatggaaccaactttgtacatcttggccatgtcactggtcattgtgtgaaataaagataatctggataatgactattagtccaatgctaagaaacatgatctttgctcattaaagagctaaaatgtttattgctgttttgtctttcttttttctaaaaaaagaaaaaaaagaaaaaaaggaaaagaagaacaaagaaacatgactgtctcaaagagtaatttttctagattagaccagtcaggtttttgaagacatataggtaacttccacagaaaacacaaacatgtatttaaaggcaagtctcatctaagatgaaactcataaaaattatttaatgtttgttatgaatttaaaag

SEQ ID NO: 452 - protein, 823 aa, Homo sapiens
MALPRCTWPNYVWRAVMACLVHRGLGAPLTLCMLGCLLQAGHVLSQKLDDVDPLVATNFGKIRGIKKELNNEILGPVIQFLGVPYAAPPTGERRFQPPEPPSPWSDIRNATQFAPVCPQNIIDGRLPEVMLPVWFTNNLDVVSSYVQDQSEDCLYLNIYVPTEDDIRDSGGPKPVMVYIHGGSYMEGTGNLYDGSVLASYGNVIVITVNYRLGVLGFLSTGDQAAKGNYGLLDLIQALRWTSENIGFFGGDPLRITVFGSGAGGSCVNLLTLSHYSEGNRWSNSTKGLFQRAIAQSGTALSSWAVSFQPAKYARMLATKVGCNVSDTVELVECLQKKPYKELVDQDIQPARYHIAFGPVIDGDVIPDDPQILMEQGEFLNYDIMLGVNQGEGLKFVENIVDSDDGISASDFDFAVSNFVDNLYGYPEGKDVLRETIKFMYTDWADRHNPETRRKTLLALFTDHQWVAPAVATADLHSNFGSPTYFYAFYHHCQTDQVPAWADAAHGDEVPYVLGIPMIGPTELFPCNFSKNDVMLSAVVMTYWTNFAKTGDPNQPVPQDTKFIHTKPNRFEEVAWTRYSQKDQLYLHIGLKPRVKEHYRANKVNLWLELVPHLHNLNDISQYTSTTTKVPSTDITFRPTRKNSVPVTSAFPTAKQDDPKQQPSPFSVDQRDYSTELSVTIAVGASLLFLNILAFAALYYKKDKRRHDVHRRCSPQRTTTNDLTHAQEEEIMSLQMKHTDLDHECESIHPHEVVLRTACPPDYTLAMRRSPDDVPLMTPNTITMIPNTIPGIQPLHTFNTFTGGQNNTLPHPHPHPHSHSTTRV

SEQ ID NO: 453 - DNA, 1668 bp, Homo sapiens
aaatatgtttggataacccagcagagccatttaacctttgggaacaaggcaactagcgtctggcagcaggaatccaaccagtgccctgagttctgaggcagagaggaggacagaagaaacaagaggctggagattgtcaaattcagtatcccagttggctcttgattcttggtgaaaccatccctcagctcctagagggagattgttagatcatgaaactaattaccatccttttcctctgctccaggctgctactaagtttaacccaggaatcacagtccgaggaaattgactgcaatgacaaggatttatttaaagctgtggatgctgctctgaagaaatataacagtcaaaaccaaagtaacaaccagtttgtattgtaccgcataactgaagccactaagacggttggctctgacacgttttattccttcaagtacgaaatcaaggagggggattgtcctgttcaaagtggcaaaacctggcaggactgtgagtacaaggatgctgcaaaagcagccactggagaatgcacggcaaccgtggggaagaggagcagtacgaaattctccgtggctacccagacctgccagattactccagccgagggccctgtggtgacagcccagtacgactgcctcggctgtgtgcatcctatatcaacgcagagcccagacctggagcccattctgagacacggcattcagtactttaacaacaacactcaacattcctccctcttcatgcttaatgaagtaaaacgggcccaaagacaggtggtggctggattgaactttcgaattacctactcaattgtgcaaacgaattgttccaaagagaattttctgttcttaactccagactgcaagtccctttggaatggtgataccggtgaatgtacagataatgcatacatcgatattcagctacgaattgcttccttctcacagaactgtgacatttatccagggaaggattttgtacaaccacctaccaagatttgcgtgggctgccccagagatatacccaccaacagcccagagctggaggagacactgactcacaccatcacaaagcttaatgcagagaataacgcaactttctatttcaagattgacaatgtgaaaaaagcaagagtacaggtggtggctggcaagaaatattttattgacttcgtggccagggaaaccacatgttccaaggaaagtaatgaagagttgaccgaaagctgtgagaccaaaaaacttggccaaagcctagattgcaacgctgaagtttatgtggtaccctgggagaaaaaaatttaccctactgtcaactgtcaaccactgggaatgatctcactgatgaaaaggcctccaggtttttcacctttccgatcatcacgaataggggaaataaaagaagaaacaactagtcacctaaggtcctgcgagtacaagggtcgacccccaaaggcaggggcagagccagcatctgagagggaggtctcttgaccaatgggcagaatcttcactccaggcacatagccccaaccacctctgccagcaaccttgagaggaaggacaagaagaaagatgggatagaatttaaatagagaagaatgccattttatcactctgcctctgggtgaaataaagatcagtcttgatgttctaactctaaaaa

SEQ ID NO: 454 - protein, 427 aa, Homo sapiens
MKLITILFLCSRLLLSLTQESQSEEIDCNDKDLFKAVDAALKKYNSQNQSNNQFVLYRITEATKTVGSDTFYSFKYEIKEGDCPVQSGKTWQDCEYKDAAKAATGECTATVGKRSSTKFSVATQTCQITPAEGPVVTAQYDCLGCVHPISTQSPDLEPILRHGIQYFNNNTQHSSLFMLNEVKRAQRQVVAGLNFRITYSIVQTNCSKENFLFLTPDCKSLWNGDTGECTDNAYIDIQLRIASFSQNCDIYPGKDFVQPPTKICVGCPRDIPTNSPELEETLTHTITKLNAENNATFYFKIDNVKKARVQVVAGKKYFIDFVARETTCSKESNEELTESCETKKLGQSLDCNAEVYVVPWEKKIYPTVNCQPLGMISLMKRPPGFSPFRSSRIGEIKEETTSHLRSCEYKGRPPKAGAEPASEREVS

SEQ ID NO: 455 - DNA, 1905 bp, Homo sapiens
gctgtcttttcagtcgggcgctgagtggtttttcggatcatgtctggtggctccgcggattataacagagaacatggcggcccagagggaatggaccccgatggtgtcatcgagagcaactggaatgagattgttgataactttgatgatatgaatttaaaggagtctctccttcgtggcatctatgcttacggttttgagaagccttccgctattcagcagagagctattattccctgtattaaagggtatgatgtgattgctcaagctcagtcaggtactggcaagacagccacatttgctatttccatcctgcaacagttggagattgagttcaaggagacccaagcactagtattggcccccaccagagaactggctcaacagatccaaaaggtaattctggcacttggagactatatgggagccacttgtcatgcctgcattggtggaacaaatgttcgaaatgaaatgcaaaaactgcaggctgaagcaccacatattgttgttggtacacccgggagagtgtttgatatgttaaacagaagatacctttctccaaaatggatcaaaatgtttgttttggatgaagcagatgaaatgttgagccgtggttttaaggatcaaatctatgagattttccaaaaactaaacacaagtattcaggttgtgttgctttctgccacaatgccaactgatgtgttggaagtgaccaaaaaattcatgagagatccaattcgaattctggtgaaaaaggaagaattgacccttgaaggaatcaaacagttttatattaatgttgagagagaggaatggaagttggatacactttgtgacttgtacgagacactgaccattacacaggctgttatttttctcaatacgaggcgcaaggtggactggctgactgagaagatgcatgccagagacttcacagtttctgctctgcatggtgacatggaccagaaggagagagatgttatcatgagggaattccggtcagggtcaagtcgtgttctgatcactactgacttgttggctcgcgggattgatgtgcaacaagtgtctttggttataaattatgatctacctaccaatcgtgaaaactatattcacagaattggcagagggggtcgatttgggaggaaaggtgtggctataaactttgttactgaagaagacaagaggattcttcgtgacattgagactttctacaatactacagtggaggagatgcccatgaatgtggctgaccttatttaattcctgggatgagagttttggatgcagtgctcgctgttgctgaataggcgatcacaacgtgcattgtgcttctttctttgggaatatttgaatcttgtctcaatgctcataacggatcagaaatacagattttgatagcaaagcgacgttagtcgtgagctcttgtgaggaaagtcattggctttatcctctttagagttagactgttggggtgggtataaaagatggggtctgtaaaatctttctttcttagaaatttatttcctagttctgtagaaatggttgtattagatgttctctatcatttaataatatacttgtggactaaaagatataagtgctgtataaaatcagccaattatgttaaactagcatatctgcctttattgtgtttgtcattagcctgagtagaaaggcctttaaaatttttttagaaagcatttgaatgcattttgtttggtattgtatttattcaataaagtatttaattagtgctaagtgtgaactggaccctgttgctaagccccagcaagcaatcctaggtagggtttaatccccagtaaaattgccatattgcacatgtcttaatgaagtttgaatgttaaataaattgtatattcactttaaaaaaaaaaaaaaaaa

SEQ ID NO: 456 - protein, 407 aa, Homo sapiens
MSGGSADYNREHGGPEGMDPDGVIESNWNEIVDNFDDMNLKESLLRGIYAYGFEKPSAIQQRAIIPCIKGYDVIAQAQSGTGKTATFAISILQQLEIEFKETQALVLAPTRELAQQIQKVILALGDYMGATCHACIGGTNVRNEMQKLQAEAPHIVVGTPGRVFDMLNRRYLSPKWIKMFVLDEADEMLSRGFKDQIYEIFQKLNTSIQVVLLSATMPTDVLEVTKKFMRDPIRILVKKEELTLEGIKQFYINVEREEWKLDTLCDLYETLTITQAVIFLNTRRKVDWLTEKMHARDFTVSALHGDMDQKERDVIMREFRSGSSRVLITTDLLARGIDVQQVSLVINYDLPTNRENYIHRIGRGGRFGRKGVAINFVTEEDKRILRDIETFYNTTVEEMPMNVADLI

SEQ ID NO: 457 - DNA, 70 bp, Homo sapiens
aagtgaaatgatggcaatcatctttcgggactgacctgaaatgaagagaatactcattgctgatcacttg

SEQ ID NO: 458 - DNA, 178 bp, Homo sapiens
accttcttgtataagcactgtgctaaaattgcagacactaggaccatgtcttggtttttgcaataatgcttgcagagtacacacaagaagaaaagtaacagcactagattgtaaagactggggtggacctctttcttaatgtccaatgtcctttgtcttaagatttggtgcaatatct

SEQ ID NO: 459 - DNA, 135 bp, Homo sapiens
aaagcaggattcagactacaatatagctgctaagtgctgtgttgtcgttccccctgcttaaaataaagttgtttcttaactatacctgtctgctattctcctgtagcagccagggacgcttggtctcatacatgt

SEQ ID NO: 460 - DNA, 137 bp, Homo sapiens
taccaaaagttagctttttggggggcaggtttttaagtaacctttgccaacttgggctatttggaagagtaaaagaccacactccacagtgggctataccacttagtatagttcgctactattttgtggcctacatg

SEQ ID NO: 461 - DNA, 1427 bp, Homo sapiens
accggcgtattcccgccctgcttttcgcccgccgttccgtggcgggaactgaggcgactgtggggacatcagtgatcgtaagtctcctgggcccgttattctcagattaggtgacggagctaagacttcgagaccatctcgtcctttttgtatcgcggaaacctgaggaacgagccggcggcggtgacctgcacgagaagccaggctaactgggtgaagtaccatgcaagcatttcttaaaggtacatccatcagtactaaacccccgctgaccaaggatcgaggagtagctgccagtgcgggaagtagcggagagaacaagaaagccaaacccgttccctgggtggaaaaatatcgcccaaaatgtgtggatgaagttgctttccaggaagaagtggttgcagtgctgaaaaaatctttagaaggagcagatcttcctaatctcttgttttacggaccacctggaactggaaaaacatccactattttggcagcagctagagaactctttgggcctgaacttttccgattaagagttcttgagttaaatgcatctgatgaacgtggaatacaagtagttcgagagaaagtgaaaaattttgctcaattaactgtgtcaggaagtcgctcagatgggaagccgtgtccgccttttaagattgtgattctggatgaagcagattctatgacctcagctgctcaggcagctttaagacgtaccatggagaaggagtcgaaaaccacccgattctgtcttatctgtaactatgtcagtcgaataattgaacccctgacctctagatgttcaaaattccgcttcaagcctctgtcagataaaattcaacagcagcgattactagacattgccaagaaggaaaatgtcaaaattagtgatgagggaatagcttatcttgttaaagtgtcagaaggagacttaagaaaagccattacatttcttcaaagcgctactcgattaacaggtggaaaggagatcacagagaaagtgattacagacattgccggggtaataccagctgagaaaattgatggagtatttgctgcctgtcagagtggctcttttgacaaactagaagctgtggtcaaggatttaatagatgagggtcatgcagcaactcagctcgtcaatcaactccatgatgtggttgtagaaaataacttatctgataaacagaagtctattatcacagaaaaacttgccgaagttgacaaatgcctagcagatggtgctgatgaacatttgcaactcatcagcctttgtgcaactgtgatgcagcagttatctcagaattgttaacgtgaatatatctggatggggggttttgtaaataatgaagttgtaataaaaataaaatgaccaaaagcacctttaaaaaaaaaaaaaaaaaaaaaaaaaaaaaaaaaaaaaa

SEQ ID NO: 462 - protein, 363 aa, Homo sapiens
MQAFLKGTSISTKPPLTKDRGVAASAGSSGENKKAKPVPWVEKYRPKCVDEVAFQEEVVAVLKKSLEGADLPNLLFYGPPGTGKTSTILAAARELFGPELFRLRVLELNASDERGIQVVREKVKNFAQLTVSGSRSDGKPCPPFKIVILDEADSMTSAAQAALRRTMEKESKTTRFCLICNYVSRIIEPLTSRCSKFRFKPLSDKIQQQRLLDIAKKENVKISDEGIAYLVKVSEGDLRKAITFLQSATRLTGGKEITEKVITDIAGVIPAEKIDGVFAACQSGSFDKLEAVVKDLIDEGHAATQLVNQLHDVVVENNLSDKQKSIITEKLAEVDKCLADGADEHLQLISLCATVMQQLSQNC

SEQ ID NO: 463 - DNA, 1395 bp, Homo sapiens
accggcgtattcccgccctgcttttcgcccgccgttccgtggcgggaactgaggcgactgtggggacatcagtgatcggtgacggagctaagacttcgagaccatctcgtcctttttgtatcgcggaaacctgaggaacgagccggcggcggtgacctgcacgagaagccaggctaactgggtgaagtaccatgcaagcatttcttaaaggtacatccatcagtactaaacccccgctgaccaaggatcgaggagtagctgccagtgcgggaagtagcggagagaacaagaaagccaaacccgttccctgggtggaaaaatatcgcccaaaatgtgtggatgaagttgctttccaggaagaagtggttgcagtgctgaaaaaatctttagaaggagcagatcttcctaatctcttgttttacggaccacctggaactggaaaaacatccactattttggcagcagctagagaactctttgggcctgaacttttccgattaagagttcttgagttaaatgcatctgatgaacgtggaatacaagtagttcgagagaaagtgaaaaattttgctcaattaactgtgtcaggaagtcgctcagatgggaagccgtgtccgccttttaagattgtgattctggatgaagcagattctatgacctcagctgctcaggcagctttaagacgtaccatggagaaggagtcgaaaaccacccgattctgtcttatctgtaactatgtcagtcgaataattgaacccctgacctctagatgttcaaaattccgcttcaagcctctgtcagataaaattcaacagcagcgattactagacattgccaagaaggaaaatgtcaaaattagtgatgagggaatagcttatcttgttaaagtgtcagaaggagacttaagaaaagccattacatttcttcaaagcgctactcgattaacaggtggaaaggagatcacagagaaagtgattacagacattgccggggtaataccagctgagaaaattgatggagtatttgctgcctgtcagagtggctcttttgacaaactagaagctgtggtcaaggatttaatagatgagggtcatgcagcaactcagctcgtcaatcaactccatgatgtggttgtagaaaataacttatctgataaacagaagtctattatcacagaaaaacttgccgaagttgacaaatgcctagcagatggtgctgatgaacatttgcaactcatcagcctttgtgcaactgtgatgcagcagttatctcagaattgttaacgtgaatatatctggatggggggttttgtaaataatgaagttgtaataaaaataaaatgaccaaaagcacctttaaaaaaaaaaaaaaaaaaaaaaaaaaaaaaaaaaaaaa

SEQ ID NO: 464 - protein, 363 aa, Homo sapiens; identical to SEQ ID NO: 462

SEQ ID NO: 465 - DNA, 3445 bp, Homo sapiens
gagcaaccgcagcttctagtatccagactccagcgccgccccgggcgcggaccccaaccccgacccagagcttctccagcggcggcgcagcgagcagggctccccgccttaacttcctccgcggggcccagccaccttcgggagtccgggttgcccacctgcaaactctccgccttctgcacctgccacccctgagccagcgcgggcgcccgagcgagtcatggccaacgcggggctgcagctgttgggcttcattctcgccttcctgggatggatcggcgccatcgtcagcactgccctgccccagtggaggatttactcctatgccggcgacaacatcgtgaccgcccaggccatgtacgaggggctgtggatgtcctgcgtgtcgcagagcaccgggcagatccagtgcaaagtctttgactccttgctgaatctgagcagcacattgcaagcaacccgtgccttgatggtggttggcatcctcctgggagtgatagcaatctttgtggccaccgttggcatgaagtgtatgaagtgcttggaagacgatgaggtgcagaagatgaggatggctgtcattgggggtgcgatatttcttcttgcaggtctggctattttagttgccacagcatggtatggcaatagaatcgttcaagaattctatgaccctatgaccccagtcaatgccaggtacgaatttggtcaggctctcttcactggctgggctgctgcttctctctgccttctgggaggtgccctactttgctgttcctgtccccgaaaaacaacctcttacccaacaccaaggccctatccaaaacctgcaccttccagcgggaaagactacgtgtgacacagaggcaaaaggagaaaatcatgttgaaacaaaccgaaaatggacattgagatactatcattaacattaggaccttagaattttgggtattgtaatctgaagtatggtattacaaaacaaacaaacaaacaaaaaacccatgtgttaaaatactcagtgctaaacatggcttaatcttattttatcttctttcctcaatataggagggaagatttttccatttgtattactgcttcccattgagtaatcatactcaattgggggaaggggtgctccttaaatatatatagatatgtatatatacatgtttttctattaaaaatagacagtaaaatactattctcattatgttgatactagcatacttaaaatatctctaaaataggtaaatgtatttaattccatattgatgaagatgtttattggtatattttctttttcgtctatatatacatatgtaacagtcaaatatcatttactcttcttcattagctttgggtgcctttgccacaagacctagcctaatttaccaaggatgaattctttcaattcttcatgcgtgcccttttcatatacttattttattttttaccataatcttatagcacttgcatcgttattaagcccttatttgttttgtgtttcattggtctctatctcctgaatctaacacatttcatagcctacattttagtttctaaagccaagaagaatttattacaaatcagaactttggaggcaaatctttctgcatgaccaaagtgataaattcctgttgaccttcccacacaatccctgtactctgacccatagcactcttgtttgctttgaaaatatttgtccaattgagtagctgcatgctgttcccccaggtgttgtaacacaactttattgattgaatttttaagctacttattcatagttttatatccccctaaactacctttttgttccccattccttaattgtattgttttcccaagtgtaattatcatgcgttttatatcttcctaataaggtgtggtctgtttgtctgaacaaagtgctagactttctggagtgataatctggtgacaaatattctctctgtagctgtaagcaagtcacttaatctttctacctcttttttctatctgccaaattgagataatgatacttaaccagttagaagaggtagtgtgaatattaattagtttatattactctcattctttgaacatgaactatgcctatgtagtgtctttatttgctcagctggctgagacactgaagaagtcactgaacaaaacctacacacgtaccttcatgtgattcactgccttcctctctctaccagtctatttccactgaacaaaacctacacacataccttcatgtggttcagtgccttcctctctctaccagtctatttccactgaacaaaacctacgcacataccttcatgtggctcagtgccttcctctctctaccagtctatttccattctttcagctgtgtctgacatgtttgtgctctgttccattttaacaactgctcttacttttccagtctgtacagaatgctatttcacttgagcaagatgatgtaatggaaagggtgttggcattggtgtctggagacctggatttgagtcttggtgctatcaatcaccgtctgtgtttgagcaaggcatttggctgctgtaagcttattgcttcatctgtaagcggtggtttgtaattcctgatcttcccacctcacagtgatgttgtggggatccagtgagatagaatacatgtaagtgtggttttgtaatttaaaaagtgctatactaagggaaagaattgaggaattaactgcatacgttttggtgttgcttttcaaatgtttgaaaacaaaaaaaatgttaagaaatgggtttcttgccttaaccagtctctcaagtgatgagacagtgaagtaaaattgagtgcactaaacaaataagattctgaggaagtcttatcttctgcagtgagtatggcccgatgctttctgtggctaaacagatgtaatgggaagaaataaaagcctacgtgttggtaaatccaacagcaagggagatttttgaatcataataactcataaggtgctatctgttcagtgatgccctcagagctcttgctgttagctggcagctgacgctgctaggatagttagtttggaaatggtacttcataataaactacacaaggaaagtcagccactgtgtcttatgaggaattggacctaataaattttagtgtgccttccaaacctgagaatatatgcttttggaagttaaaatttaaatggcttttgccacatacatagatcttcatgatgtgtgagtgtaattccatgtggatatcagttaccaaacattacaaaaaaattttatggcccaaaatgaccaacgaaattgttacaatagaatttatccaattttgatctttttatattcttctaccacacctggaaacagaccaatagacattttggggttttataataggaatttgtataaagcattactctttttcaataaattgttttttaatttaaaaaaaggaaaaaaaaaaaaaaaaa

SEQ ID NO: 466 - protein, 211 aa, Homo sapiens
MANAGLQLLGFILAFLGWIGAIVSTALPQWRIYSYAGDNIVTAQAMYEGLWMSCVSQSTGQIQCKVFDSLLNLSSTLQATRALMVVGILLGVIAIFVATVGMKCMKCLEDDEVQKMRMAVIGGAIFLLAGLAILVATAWYGNRIVQEFYDPMTPVNARYEFGQALFTGWAAASLCLLGGALLCCSCPRKTTSYPTPRPYPKPAPSSGKDYV

SEQ ID NO: 467 - DNA, 1494 bp, Homo sapiens
ccccacccgaaacacactcagcccttgcactgacctgccttctgattggaggctggttgcttcggataatgacctccaggaccccactgttggttacagcctgtttgtattattcttactgcaactcaagacacctgcagcagggcgtgagaaaaagtaaaagaccagtattttcacattgccaggtaccagaaacacagaagactgacacccgccacttaagtggggccagggctggtgtctgcccatgttgccatcctgatgggctgcttgccacaatgagggatcttcttcaatacatcgcttgcttctttgcctttttctctgctgggtttttgattgtggccacctggactgactgttggatggtgaatgctgatgactctctggaggtgagcacaaaatgccgaggcctctggtgggaatgcgtcacaaatgcttttgatgggattcgcacctgtgatgagtacgattccatacttgcggagcatcccttgaagctggtggtaactcgagcgttgatgattactgcagatattctagctgggtttggatttctcaccctgctccttggtcttgactgcgtgaaattcctccctgatgagccgtacattaaagtccgcatctgctttgttgctggagccacgttactaatagcaggtaccccaggaatcattggctctgtgtggtatgctgttgatgtgtatgtggaacgttctactttggttttgcacaatatatttcttggtatccaatataaatttggttggtcctgttggctcggaatggctgggtctctgggttgctttttggctggagctgttctcacctgctgcttatatctttttaaagatgttggacctgagagaaactatccttattccttgaggaaagcctattcagccgcgggtgtttccatggccaagtcatactcagcccctcgcacagagacggccaaaatgtatgctgtagacacaagggtgtaaaatgcacgtttcagggtgtgtttgcatatgatttaatcaatcagtatggttacattgataaaatagtaagtcaatccaggaacagttatttagaattcatattgaattaaattaattgctagcttaatcaaaatgtttgattctcctatactttttctttctattactcttatattttcccgtcattctctctgctaaccttccaccttatgcacacactttccctatattttaagataagtctgctaggatgtagaaatatttgtttgtgatttctatatagctattagagattatgacatagtaatattaaaatgaaatgatacttaaacagaaagcaatttccaaagaggccagggaccctaatctttgaagagatgaagaaacttacttttctccctggcttttggttcactttttgtacttttaacaagtgggtgaattatttgataattttgaggaagattattcttttaaattcaaactagtatgtcaatgcctaccatta

SEQ ID NO: 468 - protein, 305 aa, Homo sapiens
MTSRTPLLVTACLYYSYCNSRHLQQGVRKSKRPVFSHCQVPETQKTDTRHLSGARAGVCPCCHPDGLLATMRDLLQYIACFFAFFSAGFLIVATWTDCWMVNADDSLEVSTKCRGLWWECVTNAFDGIRTCDEYDSILAEHPLKLVVTRALMITADILAGFGFLTLLLGLDCVKFLPDEPYIKVRICFVAGATLLIAGTPGIIGSVWYAVDVYVERSTLVLHNIFLGIQYKFGWSCWLGMAGSLGCFLAGAVLTCCLYLFKDVGPERNYPYSLRKAYSAAGVSMAKSYSAPRTETAKMYAVDTRV

SEQ ID NO: 469 - DNA, 1449 bp, Homo sapiens
agttctgagaaagaaggaaataaacacaggcaccaaaccactatcctaagttgactgtcctttaaatatgtcaagatccagacttttcagtgtcacctcagcgatctcaacgatagggatcttgtgtttgccgctattccagttggtgctctcggacctaccatgcgaagaagatgaaatgtgtgtaaattataatgaccaacaccctaatggctggtatatctggatcctcctgctgctggttttggtggcagctcttctctgtggagctgtggtcctctgcctccagtgctggctgaggagaccccgaattgattctcacaggcgcaccatggcagtttttgctgttggagacttggactctatttatgggacagaagcagctgtgagtccaactgttggaattcaccttcaaactcaaacccctgacctatatcctgttcctgctccatgttttggccctttaggctccccacctccatatgaagaaattgtaaaaacaacctgattttaggtgtggattatcaatttaaagtattaacgacatctgtaattccaaaacatcaaatttaggaatagttatttcagttgttggaaatgtccagagatctattcatatagtctgaggaaggacaattcgacaaaagaatggatgttggaaaaaattttggtcatggagatgtttaaatagtaaagtagcaggcttttgatgtgtcactgctgtatcatacttttatgctacacaaccaaattaatgcttctccactagtatccaaacaggcaacaattaggtgctggaagtagtttccatcacatttaggactccactgcagtatacagcacaccattttctgctttaaactctttcctagcatggggtccataaaaattattataatttaacaatagcccaagccgagaatccaacatgtccagaaccagaaccagaaagatagtatttgaatgaaggtgaggggagagagtaggaaaaagaaaagtttggagttgaagggtaaaggataaatgaagaggaaaaggaaaagattacaagtctcagcaaaaacaagaggttttatgccccaacctgaagaggaagaaattgtagatagaaggtgaaggagattgctgaagatatagagcacatataatgccaacacggggagaaaagaaaatttccccttttacagtaatgaatgtggcctccatagtccatagtgtttctctggagcctcagggcttggcatttattgcagcatcatgctaagaaccttcggcataggtatctgttcccatgaggactgcagaagtagcaatgagacatcttcaagtggcattttggcagtggccatcagcagggggacagacaaaaacatccatcacagatgacatatgatcttcagctgacaaatttgttgaacaaaacaataaacatcaatagatatctaaaaa

SEQ ID NO: 470 - protein, 146 aa, Homo sapiens
MSRSRLFSVTSAISTIGILCLPLFQLVLSDLPCEEDEMCVNYNDQHPNGWYIWILLLLVLVAALLCGAVVLCLQCWLRRPRIDSHRRTMAVFAVGDLDSIYGTEAAVSPTVGIHLQTQTPDLYPVPAPCFGPLGSPPPYEEIVKTT

SEQ ID NO: 471 - DNA, 1955 bp, Homo sapiens
acagaagcgcgcagagtcccatcctgccacgccacgaggagagaagaaggaaagatacagtgttaggaaagagacctccctcgcccctacgccccgcgcccctgcgcctcgcttcagcctcaggacagtcctgccgggacggtgagcgcattcagcaccctggacagcaccgcggttgcgctgcctccagggcggccccgggctgctcctgctccgcagagctacgccctccccccgggtgccccggaccctgcacttgccgccgctttcctcgcgctgctctggaccttgctagccggctctgcacctcccagaagccgtgggcgcgccgctcagctgctccatcgcctcactttcccaggctcgcgcccgaagcagagccatgagaaccccagggtgcctggcgagccgctagcgccatgggccccggcgaggcgctgctggcgggtctcctggtgatggtactggccgtggcgctgctatccaacgcactggtgctgctttgttgcgcctacagcgctgagctccgcactcgagcctcaggcgtcctcctggtgaatctgtctctgggccacctgctgctggcggcgctggacatgcccttcacgctgctcggtgtgatgcgcgggcggacaccgtcggcgcccggcgcatgccaagtcattggcttcctggacaccttcctggcgtccaacgcggcgctgagcgtggcggcgctgagcgcagaccagtggctggcagtgggcttcccactgcgctacgccggacgcctgcgaccgcgctatgccggcctgctgctgggctgtgcctggggacagtcgctggccttctcaggcgctgcacttggctgctcgtggcttggctacagcagcgccttcgcgtcctgttcgctgcgcctgccgcccgagcctgagcgtccgcgcttcgcagccttcaccgccacgctccatgccgtgggcttcgtgctgccgctggcggtgctctgcctcacctcgctccaggtgcaccgggtggcacgcagacactgccagcgcatggacaccgtcaccatgaaggcgctcgcgctgctcgccgacctgcaccccagtgtgcggcagcgctgcctcatccagcagaagcggcgccgccaccgcgccaccaggaagattggcattgctattgcgaccttcctcatctgctttgccccgtatgtcatgaccaggctggcggagctcgtgcccttcgtcaccgtgaacgcccagtggggcatcctcagcaagtgcctgacctacagcaaggcggtggccgacccgttcacgtactctctgctccgccggccgttccgccaagtcctggccggcatggtgcaccggctgctgaagagaaccccgcgcccagcatccacccatgacagctctctggatgtggccggcatggtgcaccagctgctgaagagaaccccgcgcccagcgtccacccacaacggctctgtggacacagagaatgattcctgcctgcagcagacacactgagggcctggcagggctcatcgcccccaccttctaagaagccctgtggaaagggcactggccctgccacagagatgccactggggacccccagacaccagtggcttgactttgagctaaggctgaagtacaggaggaggaggaggagagggccggatgtgggtgtggacagcagtagtggcggaggagagctcggggctgggctgcctggctgctgggtggccccgggacagtggcttttcctctctgaaccttagcttcctcacccttgttctggggtcatggcgatgcttcgagacagtgggtagggaagtgccctgtgtggcatatggtactcgtgggcgtgctataagtgactgctgttcatgtgggtgaggtggtcactcttgctcagggtctgttgtgcagcccagatggacacctgtttctccaaaaaaaaaaaaaaaa

SEQ ID NO: 472 - protein, 363 aa, Homo sapiens
MGPGEALLAGLLVMVLAVALLSNALVLLCCAYSAELRTRASGVLLVNLSLGHLLLAALDMPFTLLGVMRGRTPSAPGACQVIGFLDTFLASNAALSVAALSADQWLAVGFPLRYAGRLRPRYAGLLLGCAWGQSLAFSGAALGCSWLGYSSAFASCSLRLPPEPERPRFAAFTATLHAVGFVLPLAVLCLTSLQVHRVARRHCQRMDTVTMKALALLADLHPSVRQRCLIQQKRRRHRATRKIGIAIATFLICFAPYVMTRLAELVPFVTVNAQWGILSKCLTYSKAVADPFTYSLLRRPFRQVLAGMVHRLLKRTPRPASTHDSSLDVAGMVHQLLKRTPRPASTHNGSVDTENDSCLQQTH

SEQ ID NO: 473 - DNA, 2229 bp, Homo sapiens
ccggcatttgcgtttggggcgccctccctgcgccgggggcgggagcccagcgagcgcagagccccggccccgcgcggcccgagtgccacatcactgcgctggccgtccaaggtccgccgccccaccatgccgcccccgccgccgctgctgctccttacagtcctggtcgtcgccgctgcccggccggggtgcgagtttgagcggaaccccgccggtgaatgccacaggccaccagctgcagacagcgccacctgcgtggacctgcagctcaggacctgcagcgatgccgcctacaaccacaccaccttccccaacctgcttcagcaccggtcgtgggaggtggtggaggccagctccgagtacatcctgctgagcgttctacaccagctcctggaaggccagtgcaacccggacctgcggctgctgggctgtgctgtgctggccccccggtgtgagggcggctgggtgcgcagaccctgccggcacatctgcgagggcctgcgggaggtctgccagcccgccttcgacgccattgacatggcctggccctacttccttgactgccaccgctacttcacgagagaggacgagggctgctatgacccgctggagaagcttcggggaggcctggaggctgacgaggcactgccctcagggctgccgcccaccttcatccgcttcagccaccactcctacgcccagatggtgcgtgtgctgaggcggacggcctcccgctgcgcccacgtggccaggacctacagcatcgggcgcagcttcgacggcagggagctgctggtcatcgagttctccagccgccccggccagcacgagctgatggagcccgaggtgaagctcatcggcaacattcatggcaacgaggtggcgggccgggagatgctcatctacctagcccagtacctgtgctctgagtacctgcttggtaacccccgcatccagcgcctgctcaacaccacccgcatccacctgctgccctccatgaaccctgacggctatgaggtggcagctgccgagggtgccggctacaacgggtggacgagcgggaggcagaacgcgcagaacctggatctgaaccgaaatttcccggacctgacgtccgagtactaccggctggcggagacccgcggcgcacgcagcgaccacatccccatcccccagcactactggtggggtaaggtggccccggagacaaaggcaatcatgaagtggatgcagaccataccctttgtgctctcagccagccttcatgggggcgacctggtggtgtcctaccccttcgacttctccaagcacccccaggaggagaagatgttttctcccacgcccgacgagaagatgttcaagctgctgtccagagcctacgctgacgtccaccccatgatgatggacaggtcggagaataggtgtggaggcaatttcctgaagagggggagcatcatcaacggggcggactggtacagcttcacgggaggcatgtccgatttcaactacctgcacaccaactgctttgagatcacggtagagctgggctgtgtgaagttcccccccgaggaggccctgtacacactctggcagcacaacaaggagtcactcctgaatttcgtggagacggtgcaccggggcatcaaaggtgtggtgacagataaattcggcaagccagtcaaaaacgcccggatctcagtcaaaggcattcgccacgacatcaccacagccccagatggtgactactggagactgctgcccccaggtatccacattgtcattgcccaagcccctggctacgccaaagtcatcaagaaagtcatcatccccgcccggatgaagagggctggccgtgtggacttcattctgcaacctctggggatgggacccaagaactttattcatgggctgcggaggactgggccccacgacccgctgggaggtgccagctctttgggggaggccacggagcccgacccgctccgggcgcgcaggcagccctcggccgacgggagtaagccctggtggtggtcctacttcacatcgctgagcacccacaggccacgctggctgctcaagtactagccccggccccagcacccgccaggatgtggagaccgaggcccatctccgcatcccgggctcctggctcttgattttgtctgccacagacatcccacaaagccgctgccattttattaaagtgttttgatccactttccactggaa

SEQ ID NO: 474 - protein, 652 aa, Homo sapiens
MPPPPPLLLLTVLVVAAARPGCEFERNPAGECHRPPAADSATCVDLQLRTCSDAAYNHTTFPNLLQHRSWEVVEASSEYILLSVLHQLLEGQCNPDLRLLGCAVLAPRCEGGWVRRPCRHICEGLREVCQPAFDAIDMAWPYFLDCHRYFTREDEGCYDPLEKLRGGLEADEALPSGLPPTFIRFSHHSYAQMVRVLRRTASRCAHVARTYSIGRSFDGRELLVIEFSSRPGQHELMEPEVKLIGNIHGNEVAGREMLIYLAQYLCSEYLLGNPRIQRLLNTTRIHLLPSMNPDGYEVAAAEGAGYNGWTSGRQNAQNLDLNRNFPDLTSEYYRLAETRGARSDHIPIPQHYWWGKVAPETKAIMKWMQTIPFVLSASLHGGDLVVSYPFDFSKHPQEEKMFSPTPDEKMFKLLSRAYADVHPMMMDRSENRCGGNFLKRGSIINGADWYSFTGGMSDFNYLHTNCFEITVELGCVKFPPEEALYTLWQHNKESLLNFVETVHRGIKGVVTDKFGKPVKNARISVKGIRHDITTAPDGDYWRLLPPGIHIVIAQAPGYAKVIKKVIIPARMKRAGRVDFILQPLGMGPKNFIHGLRRTGPHDPLGGASSLGEATEPDPLRARRQPSADGSKPWWWSYFTSLSTHRPRWLLKY

SEQ ID NO: 475 - DNA, 2492 bp, Homo sapiens
ccggcatttgcgtttggggcgccctccctgcgccgggggcgggagcccagcgagcgcagagccccggccccgcgcggcccgagtgccacatcactgcgctggccgtccaaggtccgccgccccaccatgccgcccccgccgccgctgctgctccttacagtcctggtcgtcgccgctgcccggccggggtgcgagtttgagcggaaccccgccggtgaatgccacaggccaccagctgcagacagcggtacagtaccgggacctccctggcttctgttctgtaggagggctgcagcccccacactgtcagagcactttaggcagctgaatccgtgatttcagaagctctgattcctgcacagtagctgttgtcctggtcctcccctgccagaccgtgggtgcccctccctgcaggccctggccctgcgtggggtcccctacgtaaatgtctgacgcgtcacggtcagggccactgcgggagggactgacctgccgaccctgcctccccagccacctgcgtggacctgcagctcaggacctgcagcgatgccgcctacaaccacaccaccttccccaacctgcttcagcaccggtcgtgggaggtggtggaggccagctccgagtacatcctgctgagcgttctacaccagctcctggaaggccagtgcaacccggacctgcggctgctgggctgtgctgtgctggccccccggtgtgagggcggctgggtgcgcagaccctgccggcacatctgcgagggcctgcgggaggtctgccagcccgccttcgacgccattgacatggcctggccctacttccttgactgccaccgctacttcacgagagaggacgagggctgctatgacccgctggagaagcttcggggaggcctggaggctgacgaggcactgccctcagggctgccgcccaccttcatccgcttcagccaccactcctacgcccagatggtgcgtgtgctgaggcggacggcctcccgctgcgcccacgtggccaggacctacagcatcgggcgcagcttcgacggcagggagctgctggtcatcgagttctccagccgccccggccagcacgagctgatggagcccgaggtgaagctcatcggcaacattcatggcaacgaggtggcgggccgggagatgctcatctacctagcccagtacctgtgctctgagtacctgcttggtaacccccgcatccagcgcctgctcaacaccacccgcatccacctgctgccctccatgaaccctgacggctatgaggtggcagctgccgagggtgccggctacaacgggtggacgagcgggaggcagaacgcgcagaacctggatctgaaccgaaatttcccggacctgacgtccgagtactaccggctggcggagacccgcggcgcacgcagcgaccacatccccatcccccagcactactggtggggtaaggtggccccggagacaaaggcaatcatgaagtggatgcagaccataccctttgtgctctcagccagccttcatgggggcgacctggtggtgtcctaccccttcgacttctccaagcacccccaggaggagaagatgttttctcccacgcccgacgagaagatgttcaagctgctgtccagagcctacgctgacgtccaccccatgatgatggacaggtcggagaataggtgtggaggcaatttcctgaagagggggagcatcatcaacggggcggactggtacagcttcacgggaggcatgtccgatttcaactacctgcacaccaactgctttgagatcacggtagagctgggctgtgtgaagttcccccccgaggaggccctgtacacactctggcagcacaacaaggagtcactcctgaatttcgtggagacggtgcaccggggcatcaaaggtgtggtgacagataaattcggcaagccagtcaaaaacgcccggatctcagtcaaaggcattcgccacgacatcaccacagccccagatggtgactactggagactgctgcccccaggtatccacattgtcattgcccaagcccctggctacgccaaagtcatcaagaaagtcatcatccccgcccggatgaagagggctggccgtgtggacttcattctgcaacctctggggatgggacccaagaactttattcatgggctgcggaggactgggccccacgacccgctgggaggtgccagctctttgggggaggccacggagcccgacccgctccgggcgcgcaggcagccctcggccgacgggagtaagccctggtggtggtcctacttcacatcgctgagcacccacaggccacgctggctgctcaagtactagccccggccccagcacccgccaggatgtggagaccgaggcccatctccgcatcccgggctcctggctcttgattttgtctgccacagacatcccacaaagccgctgccattttattaaagtgttttgatccactttccactggaa

SEQ ID NO: 476 - protein, 515 aa, Homo sapiens
MAWPYFLDCHRYFTREDEGCYDPLEKLRGGLEADEALPSGLPPTFIRFSHHSYAQMVRVLRRTASRCAHVARTYSIGRSFDGRELLVIEFSSRPGQHELMEPEVKLIGNIHGNEVAGREMLIYLAQYLCSEYLLGNPRIQRLLNTTRIHLLPSMNPDGYEVAAAEGAGYNGWTSGRQNAQNLDLNRNFPDLTSEYYRLAETRGARSDHIPIPQHYWWGKVAPETKAIMKWMQTIPFVLSASLHGGDLVVSYPFDFSKHPQEEKMFSPTPDEKMFKLLSRAYADVHPMMMDRSENRCGGNFLKRGSIINGADWYSFTGGMSDFNYLHTNCFEITVELGCVKFPPEEALYTLWQHNKESLLNFVETVHRGIKGVVTDKFGKPVKNARISVKGIRHDITTAPDGDYWRLLPPGIHIVIAQAPGYAKVIKKVIIPARMKRAGRVDFILQPLGMGPKNFIHGLRRTGPHDPLGGASSLGEATEPDPLRARRQPSADGSKPWWWSYFTSLSTHRPRWLLKY

SEQ ID NO: 477 - DNA, 2196 bp, Homo sapiens
ccggcatttgcgtttggggcgccctccctgcgccgggggcgggagcccagcgagcgcagagccccggccccgcgcggcccgagtgccacatcactgcgctggccgtccaaggtccgccgccccaccatgccgcccccgccgccgctgctgctccttacagtcctggtcgtcgccgctgcccggccggggtgcgagtttgagcggaaccccgccgccacctgcgtggacctgcagctcaggacctgcagcgatgccgcctacaaccacaccaccttccccaacctgcttcagcaccggtcgtgggaggtggtggaggccagctccgagtacatcctgctgagcgttctacaccagctcctggaaggccagtgcaacccggacctgcggctgctgggctgtgctgtgctggccccccggtgtgagggcggctgggtgcgcagaccctgccggcacatctgcgagggcctgcgggaggtctgccagcccgccttcgacgccattgacatggcctggccctacttccttgactgccaccgctacttcacgagagaggacgagggctgctatgacccgctggagaagcttcggggaggcctggaggctgacgaggcactgccctcagggctgccgcccaccttcatccgcttcagccaccactcctacgcccagatggtgcgtgtgctgaggcggacggcctcccgctgcgcccacgtggccaggacctacagcatcgggcgcagcttcgacggcagggagctgctggtcatcgagttctccagccgccccggccagcacgagctgatggagcccgaggtgaagctcatcggcaacattcatggcaacgaggtggcgggccgggagatgctcatctacctagcccagtacctgtgctctgagtacctgcttggtaacccccgcatccagcgcctgctcaacaccacccgcatccacctgctgccctccatgaaccctgacggctatgaggtggcagctgccgagggtgccggctacaacgggtggacgagcgggaggcagaacgcgcagaacctggatctgaaccgaaatttcccggacctgacgtccgagtactaccggctggcggagacccgcggcgcacgcagcgaccacatccccatcccccagcactactggtggggtaaggtggccccggagacaaaggcaatcatgaagtggatgcagaccataccctttgtgctctcagccagccttcatgggggcgacctggtggtgtcctaccccttcgacttctccaagcacccccaggaggagaagatgttttctcccacgcccgacgagaagatgttcaagctgctgtccagagcctacgctgacgtccaccccatgatgatggacaggtcggagaataggtgtggaggcaatttcctgaagagggggagcatcatcaacggggcggactggtacagcttcacgggaggcatgtccgatttcaactacctgcacaccaactgctttgagatcacggtagagctgggctgtgtgaagttcccccccgaggaggccctgtacacactctggcagcacaacaaggagtcactcctgaatttcgtggagacggtgcaccggggcatcaaaggtgtggtgacagataaattcggcaagccagtcaaaaacgcccggatctcagtcaaaggcattcgccacgacatcaccacagccccagatggtgactactggagactgctgcccccaggtatccacattgtcattgcccaagcccctggctacgccaaagtcatcaagaaagtcatcatccccgcccggatgaagagggctggccgtgtggacttcattctgcaacctctggggatgggacccaagaactttattcatgggctgcggaggactgggccccacgacccgctgggaggtgccagctctttgggggaggccacggagcccgacccgctccgggcgcgcaggcagccctcggccgacgggagtaagccctggtggtggtcctacttcacatcgctgagcacccacaggccacgctggctgctcaagtactagccccggccccagcacccgccaggatgtggagaccgaggcccatctccgcatcccgggctcctggctcttgattttgtctgccacagacatcccacaaagccgctgccattttattaaagtgttttgatccactttccactggaa

SEQ ID NO: 478 - protein, 641 aa, Homo sapiens
MPPPPPLLLLTVLVVAAARPGCEFERNPAATCVDLQLRTCSDAAYNHTTFPNLLQHRSWEVVEASSEYILLSVLHQLLEGQCNPDLRLLGCAVLAPRCEGGWVRRPCRHICEGLREVCQPAFDAIDMAWPYFLDCHRYFTREDEGCYDPLEKLRGGLEADEALPSGLPPTFIRFSHHSYAQMVRVLRRTASRCAHVARTYSIGRSFDGRELLVIEFSSRPGQHELMEPEVKLIGNIHGNEVAGREMLIYLAQYLCSEYLLGNPRIQRLLNTTRIHLLPSMNPDGYEVAAAEGAGYNGWTSGRQNAQNLDLNRNFPDLTSEYYRLAETRGARSDHIPIPQHYWWGKVAPETKAIMKWMQTIPFVLSASLHGGDLVVSYPFDFSKHPQEEKMFSPTPDEKMFKLLSRAYADVHPMMMDRSENRCGGNFLKRGSIINGADWYSFTGGMSDFNYLHTNCFEITVELGCVKFPPEEALYTLWQHNKESLLNFVETVHRGIKGVVTDKFGKPVKNARISVKGIRHDITTAPDGDYWRLLPPGIHIVIAQAPGYAKVIKKVIIPARMKRAGRVDFILQPLGMGPKNFIHGLRRTGPHDPLGGASSLGEATEPDPLRARRQPSADGSKPWWWSYFTSLSTHRPRWLLKY

SEQ ID NO: 479 - DNA, 734 bp, Homo sapiens
atgcagacgcagccgagggcgcgctcgcgctcccgggagggcgggagcgagcggcgtgtcccgttgggtctctccgctcccggggaaatggacaggccggttggggtgggggtcggctggcaaacagtggtcgggagcattgggcgggcgcgcgcacgagggcaagcacgcgcgggagggagggacggttcctgggcaacggcccctccttggcgcgggatccgcgcagagtctgcctgggtcgcacgcgtctccgcccctcgcggtgcctcctccttcctgtcacctcggttccgccctgggtggggagaagccctgctgcaccactcgggcttcccagagcggggctggcccgcgggggaaactgaggcccgggaccccgaccggcgcctgcactgtgcgacccgcgtagaaataggcgcccgaggggcccccagcgcaacgcgggagcccggcccagcccgggggtcctgtggtgaactagcgtctgggctctgccggcttgaagtccgctgagcgcctcgccgcgcacctctagaccccgagtccccgatctagggcctccttgtagccctaggtagcgccctctaagcttgtttctgtttttaggcgctggtaggagtgctgtcaccgacgtcgtagagccgccgagggtgtttctgtaggaaacattttacataaagtatttgaaggtctagataaagaataacagagtgatccatactacatgatga

SEQ ID NO: 480 - protein, 171 aa, Homo sapiens [sequence omitted]

SEQ ID NO: 481 - DNA, 5627 bp, Homo sapiens
ccccagcagccgccccagccgcagccgcagccgcccggctcgtctgccaccaccccgggcggcggcagcggcggctcgctcagcgccatgccgccgcccagccccgactcagagaacggcttctaccccgggctgccgtcgtccatgaacccggccttcttccctagcttctcgcccgtgtcgccgcacggctgcactgggctcagcgttccgacgagcggcggcggcggcggcggcttcggcggccccttctcggctaccgctgtgccccctccgccgccgcccgccatgaatatacctcaacagcagcccccgccgcccgcggcgccgcagcagccgcagagccggaggtcgcccgtcagcccgcagctccagcagcagcaccaggcggcggccgccgccttcctgcagcagaggaactcctataaccaccaccagcctcttctgaaacagtctccctggagcaaccatcagagcagtggctggggcactggaagtatgtcctggggagcaatgcatggcagagatcatcgtagaaccggaaacatgggaatcccaggaactatgaatcagatatctccattgaagaaaccgttttctggtaatgtcatagcaccaccgaaatttactcgctcaactccatcactgactccaaaatcttggattgaagataatgtgttcagaacagacaacaatagtaatacactcttacccttacaggtgagatctagtttgcagttgccagcttggggctcagattcactccaagatagttggtgcactgcagccggaacatccagaatagaccaggatcgaagtagaatgtatgacagtttgaatatgcactctttggaaaattcccttatcgatattatgagagcagagcatgatcctcttaagggtcgattgagctatccacatccaggaactgacaatctgttgatgttaaatggtcgttcttccctctttccaatagatgatggcttgcttgatgatggtcacagtgatcaagttggagttttaaattcacccacctgttattcagctcaccaaaatggagagcgaatagaacgcttctctcgaaaagtttttgttggtggtcttcctccagatattgatgaagatgaaataactgctagcttcagaagatttgggcctttggtagtagattggcctcataaagcagaaagcaagtcctattttccaccaaaaggctatgcatttcttctctttcaagaagagagctcagttcaggcactcattgatgcttgtattgaagaagatggaaaactctatctgtgtgtttctagccctactatcaaggacaaaccagttcaaatacgtccttggaatttaagtgatagtgattttgtaatggatggttctcagcctttggatccccgaaaaacaatttttgttggaggtgttcctaggccattaagggctgtggaacttgctatgatcatggaccggctgtatggtggagtttgttatgcaggaattgatacagatcctgagctaaaatacccaaaaggtgctgggcgagttgctttctccaatcagcagagctatattgctgccattagtgctcggtttgttcagcttcagcatggtgatattgataaacgtgtggaggtaaagccatatgtgctagatgaccagatgtgtgatgaatgccagggcgcacgctgtggtggaaaatttgctccctttttttgtgccaatgtcacttgcctgcagtattactgtgagttttgttgggcaaatatccactctcgtgctggacgtgagttccataagccattggtaaaggaaggtgctgatcgcccacgtcagatccacttccgctggaactaagaatagcaaactggcctctgtttaacaaggaaagaaagggtgcatgtggcttactgtgtctgaagatactgacatgcagaagaaataagtgcattcttctgcttttcaccccagctatcaatacatgcatctttatcagcagccaaaacactacaagcctcttgtttttcaccaaaaccctacatctcaggcttactaatttttgtgatattttcatgttcaaataaaatgtttttttgtattttctccaagttatttttatatgtaaagttaaaattagatatgagaatgttttgcgtaggggcaacacagtctgctgctatatagtgggggaagcgtgcacttatttctaaacatgggtttttaacttcaagatctgccccagtaatttaccaaaggtagcaaaataatagtgaagatggaatatgtctgctacaaatgcttatttttattgttgctattttcagtgtatacataaactaaaaattagggttgatttttttgctctccattttgacttgcaagaaataatacctcaagataatctgatttattagctatttttaaacatttttaatcacaagctgtattagctttgctgctatataggtgttatgtgtaaatgccacctattaatacgggactgaaaacgttagagacacactgcattgcagataaaatgcaggcagcacaatatggcctaaactgccatagttttagaatgtgaaaaaaatgcatgtttacttacctgtatacaccatatgcatgcactagaattattaactaacgaggtgaggtattgcaaatgttcaaaaaagctctcttgaatctaggtagcatgaacaaattataaaatttgtttaaaaaagcaaacttgcatgcattattgtgacttcaagtttaaaaaatcgtcttacatgtgtacaatatgcaaattagttttagattagagagtgcagccattttgtgatctggtcagtagtggaattcgattttatgcagactggatgtaatatttgtaatccctgtgcaattttgtgacgtgcggttctaattcatgtgcagtgatatagtatagataaaagaatgagtaaaagaaaatacaagaattctaaagaaagttggttttagcccctttgatagtccatggttaagacatcctttataaaccaaagatggccagcacactgctaaccagtcaccaaatgtaagacccataagaaacccatatttaaaaatctgaattttttagaagaatgcaaaactttagtaaaccctaagtaaagtcaaaatggagaaggggaaatatacagatggctagttgcataaaattaaattttacctttataagacaatggtgaaatctggcttgaacttgcttatgtgtttaacctataaatattggggtcttctgtctaaactggggtcactgttgcatggaacattgttcttaatagttgagaattgcttttttgaaaattttcatgaaggaattttggtaatgactttgcttgcaggttttttggggtgttttgagaaagtggcatggaaacatgcagtagttaatgagtttctcttggtactgaacactattagaatatcattagtgatattttttctctttagagcatttttaatgcaactagcccctatattttaatgtaagagttactctgcaatctaagcaaagcacccaacaatggtaaatgttttttaaaaatgcagaactaagatttttgactctaaagagagaaaattacaagggtgttgccttatagcaaacccttgggacaatccttcatgtgagcaaagtgttgatcttaatattggttgtctgtggtgtgcttttttgtactgtaaaaatatgtggttcatgtctaactctgctgttttattgtggttgtggttcaagtttttaatgtttaaagttgatgctgttttcagaagagctttttactaatttatttgtcagtgttccctatttgttacttaaccatgatcctccagattttttggagtattcttttctaaccttaaccctgccaaaccttgatccattttgacatttgttatgcactatttttatatctctgtgagagatttttccaacagtcagctattttatggcacactttttttgactgatgacatctcctttgctatacctcaatttttggaatttagagaagaaatcagtagttttgcaatgttaattatttagatatttaatttcgcagatttttaaactttattttcataatttctgcttaatgtttaaaattgaagagccttttcatgtattaaataatgaacacaaattatataattaaaataattggagatgttgaaaatcattttcccttcttaaacagaaataaatatttggaatgaaggggaatgtactagaacaccctttttgccacgggtaaaaataacagaaatgtatggtttgttttaccttcatttctgtacaagtaaagcttattagtctaatgttttgttcctttcccacctcacccctacctcttttgttttgttttgtttttgccctttatgtactacattcttattttctaacttttaaacactgtattggaggtttttttttaatttacagatcatatttattttactatttttgtagaaaattattaattttgattgtatttttgtattttaaaagcttcttcacttgtgttccctaaatattcatattgctgcccaaaagtatgactgtggaggaaaaaaaaatactttaaaaatccacactttttgttaagaaggaaacatttagcatttatatatttgtgtatggaaaacacttgatattttatccctgttgcatctggctgcacagagcctctcctcaaagatgctacaaaacttgaatataacacattttggaaggctgactaacctcgattctgtgttgtgatgtgcaatactgtttctaatgtttgtataaaaaaaaacagtgtaaacctttttaatgcaaatttatttttttcattgcatattttgcagattttatccacagtgtcattttttactgtcagaaaagataccccttttgtcattgcaactattttttaaatccagaaatctttgtactgatgtaaatgattgtagttattttggatagtgttttgctaacaaaaggagagacttttttcatgcatatttctattttgtttttttgggttttattttattttaatagtagtaaaatacttggaataatttttcatattcttgtcattaatattattttgtatttttatgtggaaatatataattttatgacactaattgctaaagtttattttatgttgaattatttttggagctgaaatctttgtaatattaaagcaactagtttctaattcccagtttctgtatagaatcgcacaagtggtttatggagtgtttggattgtaattataaatggttctttgatatgcaaattaatattttcagttgattttattttatattcctaatggggtgttaaagccgttttttatttttttctaaataaaaagagaacccatgcttttatggacactaggtaaacaccttcagcttaaatttttcgttaaatattttagtttattttattgttatcttccaggtgtctaaatctccagtctgtctgttgtactggtaatttaactctgtaatggaatagtttgctgccaactatttatattaagtaatttttaaatatttgtaatattgttgactgactaataaactattaagttattggc

SEQ ID NO: 482 - protein, 589 aa, Homo sapiens
MPPPSPDSENGFYPGLPSSMNPAFFPSFSPVSPHGCTGLSVPTSGGGGGGFGGPFSATAVPPPPPPAMNIPQQQPPPPAAPQQPQSRRSPVSPQLQQQHQAAAAAFLQQRNSYNHHQPLLKQSPWSNHQSSGWGTGSMSWGAMHGRDHRRTGNMGIPGTMNQISPLKKPFSGNVIAPPKFTRSTPSLTPKSWIEDNVFRTDNNSNTLLPLQVRSSLQLPAWGSDSLQDSWCTAAGTSRIDQDRSRMYDSLNMHSLENSLIDIMRAEHDPLKGRLSYPHPGTDNLLMLNGRSSLFPIDDGLLDDGHSDQVGVLNSPTCYSAHQNGERIERFSRKVFVGGLPPDIDEDEITASFRRFGPLVVDWPHKAESKSYFPPKGYAFLLFQEESSVQALIDACIEEDGKLYLCVSSPTIKDKPVQIRPWNLSDSDFVMDGSQPLDPRKTIFVGGVPRPLRAVELAMIMDRLYGGVCYAGIDTDPELKYPKGAGRVAFSNQQSYIAAISARFVQLQHGDIDKRVEVKPYVLDDQMCDECQGARCGGKFAPFFCANVTCLQYYCEFCWANIHSRAGREFHKPLVKEGADRPRQIHFRWN

SEQ ID NO: 483 - DNA, 5537 bp, Homo sapiens
ccccagcagccgccccagccgcagccgcagccgcccggctcgtctgccaccaccccgggcggcggcagcggcggctcgctcagcgccatgccgccgcccagccccgactcagagaacggcttctaccccgggctgccgtcgtccatgaacccggccttcttccctagcttctcgcccgtgtcgccgcacggctgcactgggctcagcgttccgacgagcggcggcggcggcggcggcttcggcggccccttctcggctaccgctgtgccccctccgccgccgcccgccatgaatatacctcaacagcagcccccgccgcccgcggcgccgcagcagccgcagagccggaggtcgcccgtcagcccgcagctccagcagcagcaccaggcggcggccgccgccttcctgcagcagaggaactcctataaccaccaccagcctcttctgaaacagtctccctggagcaaccatcagagcagtggctggggcactggaagtatgtcctggggagcaatgcatggcagagatcatcgtagaaccggaaacatgggaatcccaggaactatgaatcagatatctccattgaagaaaccgttttctggtaatgtcatagcaccaccgaaatttactcgctcaactccatcactgactccaaaatcttggattgaagataatgtgttcagaacagacaacaatagtaatacactcttacccttacaggatcgaagtagaatgtatgacagtttgaatatgcactctttggaaaattcccttatcgatattatgagagcagagcatgatcctcttaagggtcgattgagctatccacatccaggaactgacaatctgttgatgttaaatggtcgttcttccctctttccaatagatgatggcttgcttgatgatggtcacagtgatcaagttggagttttaaattcacccacctgttattcagctcaccaaaatggagagcgaatagaacgcttctctcgaaaagtttttgttggtggtcttcctccagatattgatgaagatgaaataactgctagcttcagaagatttgggcctttggtagtagattggcctcataaagcagaaagcaagtcctattttccaccaaaaggctatgcatttcttctctttcaagaagagagctcagttcaggcactcattgatgcttgtattgaagaagatggaaaactctatctgtgtgtttctagccctactatcaaggacaaaccagttcaaatacgtccttggaatttaagtgatagtgattttgtaatggatggttctcagcctttggatccccgaaaaacaatttttgttggaggtgttcctaggccattaagggctgtggaacttgctatgatcatggaccggctgtatggtggagtttgttatgcaggaattgatacagatcctgagctaaaatacccaaaaggtgctgggcgagttgctttctccaatcagcagagctatattgctgccattagtgctcggtttgttcagcttcagcatggtgatattgataaacgtgtggaggtaaagccatatgtgctagatgaccagatgtgtgatgaatgccagggcgcacgctgtggtggaaaatttgctccctttttttgtgccaatgtcacttgcctgcagtattactgtgagttttgttgggcaaatatccactctcgtgctggacgtgagttccataagccattggtaaaggaaggtgctgatcgcccacgtcagatccacttccgctggaactaagaatagcaaactggcctctgtttaacaaggaaagaaagggtgcatgtggcttactgtgtctgaagatactgacatgcagaagaaataagtgcattcttctgcttttcaccccagctatcaatacatgcatctttatcagcagccaaaacactacaagcctcttgtttttcaccaaaaccctacatctcaggcttactaatttttgtgatattttcatgttcaaataaaatgtttttttgtattttctccaagttatttttatatgtaaagttaaaattagatatgagaatgttttgcgtaggggcaacacagtctgctgctatatagtgggggaagcgtgcacttatttctaaacatgggtttttaacttcaagatctgccccagtaatttaccaaaggtagcaaaataatagtgaagatggaatatgtctgctacaaatgcttatttttattgttgctattttcagtgtatacataaactaaaaattagggttgatttttttgctctccattttgacttgcaagaaataatacctcaagataatctgatttattagctatttttaaacatttttaatcacaagctgtattagctttgctgctatataggtgttatgtgtaaatgccacctattaatacgggactgaaaacgttagagacacactgcattgcagataaaatgcaggcagcacaatatggcctaaactgccatagttttagaatgtgaaaaaaatgcatgtttacttacctgtatacaccatatgcatgcactagaattattaactaacgaggtgaggtattgcaaatgttcaaaaaagctctcttgaatctaggtagcatgaacaaattataaaatttgtttaaaaaagcaaacttgcatgcattattgtgacttcaagtttaaaaaatcgtcttacatgtgtacaatatgcaaattagttttagattagagagtgcagccattttgtgatctggtcagtagtggaattcgattttatgcagactggatgtaatatttgtaatccctgtgcaattttgtgacgtgcggttctaattcatgtgcagtgatatagtatagataaaagaatgagtaaaagaaaatacaagaattctaaagaaagttggttttagcccctttgatagtccatggttaagacatcctttataaaccaaagatggccagcacactgctaaccagtcaccaaatgtaagacccataagaaacccatatttaaaaatctgaattttttagaagaatgcaaaactttagtaaaccctaagtaaagtcaaaatggagaaggggaaatatacagatggctagttgcataaaattaaattttacctttataagacaatggtgaaatctggcttgaacttgcttatgtgtttaacctataaatattggggtcttctgtctaaactggggtcactgttgcatggaacattgttcttaatagttgagaattgcttttttgaaaattttcatgaaggaattttggtaatgactttgcttgcaggttttttggggtgttttgagaaagtggcatggaaacatgcagtagttaatgagtttctcttggtactgaacactattagaatatcattagtgatattttttctctttagagcatttttaatgcaactagcccctatattttaatgtaagagttactctgcaatctaagcaaagcacccaacaatggtaaatgttttttaaaaatgcagaactaagatttttgactctaaagagagaaaattacaagggtgttgccttatagcaaacccttgggacaatccttcatgtgagcaaagtgttgatcttaatattggttgtctgtggtgtgcttttttgtactgtaaaaatatgtggttcatgtctaactctgctgttttattgtggttgtggttcaagtttttaatgtttaaagttgatgctgttttcagaagagctttttactaatttatttgtcagtgttccctatttgttacttaaccatgatcctccagattttttggagtattcttttctaaccttaaccctgccaaaccttgatccattttgacatttgttatgcactatttttatatctctgtgagagatttttccaacagtcagctattttatggcacactttttttgactgatgacatctcctttgctatacctcaatttttggaatttagagaagaaatcagtagttttgcaatgttaattatttagatatttaatttcgcagatttttaaactttattttcataatttctgcttaatgtttaaaattgaagagccttttcatgtattaaataatgaacacaaattatataattaaaataattggagatgttgaaaatcattttcccttcttaaacagaaataaatatttggaatgaaggggaatgtactagaacaccctttttgccacgggtaaaaataacagaaatgtatggtttgttttaccttcatttctgtacaagtaaagcttattagtctaatgttttgttcctttcccacctcacccctacctcttttgttttgttttgtttttgccctttatgtactacattcttattttctaacttttaaacactgtattggaggtttttttttaatttacagatcatatttattttactatttttgtagaaaattattaattttgattgtatttttgtattttaaaagcttcttcacttgtgttccctaaatattcatattgctgcccaaaagtatgactgtggaggaaaaaaaaatactttaaaaatccacactttttgttaagaaggaaacatttagcatttatatatttgtgtatggaaaacacttgatattttatccctgttgcatctggctgcacagagcctctcctcaaagatgctacaaaacttgaatataacacattttggaaggctgactaacctcgattctgtgttgtgatgtgcaatactgtttctaatgtttgtataaaaaaaaacagtgtaaacctttttaatgcaaatttatttttttcattgcatattttgcagattttatccacagtgtcattttttactgtcagaaaagataccccttttgtcattgcaactattttttaaatccagaaatctttgtactgatgtaaatgattgtagttattttggatagtgttttgctaacaaaaggagagacttttttcatgcatatttctattttgtttttttgggttttattttattttaatagtagtaaaatacttggaataatttttcatattcttgtcattaatattattttgtatttttatgtggaaatatataattttatgacactaattgctaaagtttattttatgttgaattatttttggagctgaaatctttgtaatattaaagcaactagtttctaattcccagtttctgtatagaatcgcacaagtggtttatggagtgtttggattgtaattataaatggttctttgatatgcaaattaatattttcagttgattttattttatattcctaatggggtgttaaagccgttttttatttttttctaaataaaaagagaacccatgcttttatggacactaggtaaacaccttcagcttaaatttttcgttaaatattttagtttattttattgttatcttccaggtgtctaaatctccagtctgtctgttgtactggtaatttaactctgtaatggaatagtttgctgccaactatttatattaagtaatttttaaatatttgtaatattgttgactgactaataaactattaagttattggc

SEQ ID NO: 484 - protein, 559 aa, Homo sapiens
MPPPSPDSENGFYPGLPSSMNPAFFPSFSPVSPHGCTGLSVPTSGGGGGGFGGPFSATAVPPPPPPAMNIPQQQPPPPAAPQQPQSRRSPVSPQLQQQHQAAAAAFLQQRNSYNHHQPLLKQSPWSNHQSSGWGTGSMSWGAMHGRDHRRTGNMGIPGTMNQISPLKKPFSGNVIAPPKFTRSTPSLTPKSWIEDNVFRTDNNSNTLLPLQDRSRMYDSLNMHSLENSLIDIMRAEHDPLKGRLSYPHPGTDNLLMLNGRSSLFPIDDGLLDDGHSDQVGVLNSPTCYSAHQNGERIERFSRKVFVGGLPPDIDEDEITASFRRFGPLVVDWPHKAESKSYFPPKGYAFLLFQEESSVQALIDACIEEDGKLYLCVSSPTIKDKPVQIRPWNLSDSDFVMDGSQPLDPRKTIFVGGVPRPLRAVELAMIMDRLYGGVCYAGIDTDPELKYPKGAGRVAFSNQQSYIAAISARFVQLQHGDIDKRVEVKPYVLDDQMCDECQGARCGGKFAPFFCANVTCLQYYCEFCWANIHSRAGREFHKPLVKEGADRPRQIHFRWN

SEQ ID NO: 485 - DNA, 2424 bp, Homo sapiens
acagaagaacttggtcaccacactgagaagccgtgttttctcacctccctgttactgttgtagctgtatctggcttctctagcattttaaaggaatttctgattgaggcgctaacagctaattccacaggagttgtaaggcagcctgtgcataaactgagacagaagtttctcctcagagactctctttttattattattattattattattggcaaagacttctggctctcctcagaggaataccttgttgcttaagatgagtggctgtagaaagcggtgtaaacgtgaaatactgaaatttgcccagtaccttctcagactattaacaggttctcttcatacagacagcgtggaagatgaactggagatggccaccgtcaggcatcggcctgaagcccttgagcttctggaagcccagagcaaatttaccaagaaagagcttcagatcctttacagaggatttaagaatgaatgccccagtggtgttgttaatgaagaaaccttcaaagagatttactcgcagttctttccacagggagactctacaacatatgcacattttctgttcaatgcatttgatacagaccacaatggagctgtgagtttcgaggatttcatcaaaggtctttccattttgctccgggggacagtacaagaaaaactcaattgggcatttaatctgtatgacataaataaagatggctacatcactaaagaggaaatgcttgatataatgaaagcaatatacgatatgatgggtaaatgtacatatcctgtcctcaaagaagatgctcccagacaacacgttgaaacattttttcagaaaatggacaaaaataaagatggggttgttaccatagatgagttcattgaaagctgccaaaaagatgaaaacataatgcgctccatgcagctctttgaaaatgtgatttaacttgtcaaatagatcctgaatccaacagacaaatgtgaactattctaccacccttaaagttggagctaccacttttagcatagattgctcagcttgacactgaagcatattatgcaaacaagctttgttttaatataaagcaatccccaaaagatttgagctttcagttataaatttgcatccttttcataatgccactgagttcaggggatggtctaactcatttcatactctgtgaatattcaaaagtaatagaatctggcatatagttttattggttccttagccatgggattattgaggctttcacatatcagtgattttaaaatatcagtgttttttgctactcatttgtatgtattcagtcctaggattttgaatggttttctaatatagtgacatctgcatttaatttccagaaattaaattaattttcatgtttgaatgctgtaattccatttaaattccatttatatactttaaggaaacaagattacaacaattaaaaaaacacatagttccagtttctatggccttcccaccttctgttagaaattagttttatctggcatttttaaacatttaaaaattattaaacatttaaaaattagtttattatcagatatcagcatatgcctaataaaacttattttaataagcatttaattttccataatatgttacagccaaggcctatataataattttggatttgttcaatctttcttacaggctgttttctattgtatcaatcattagtatcaatcattaagtggaagttgaagaaggcatcaaacaaaacaaggatgtttacagacatatgcaaagggtcaggatatctatcctccagtatatagtaatgcttaataacaagtaatcctaacagcattaaaggccaaatctgtcctctttcccctgacttccttacagcatgtttatttatattacaagccattcagggacaaagaaagaaaccttgactaccccactgtctactaagaacaaacagcaagcaaaattagcaagcaaaattcactttgaaagcaccagtggttccattacattgacaactactaccaagatttagtagaaaataagtgctcaacaactaatccagattacagtatgatttagctcatcataattcagattatttttaatcatcttagccaaaactgtaaagttgccacattactaaagccacacacatcgtccctgttttgtagaaatatcacaaagaccaagaggctacagaaggaggaaatttgcaactgtctttgcaacaataaatcaggtatctattctggtgtagagataggatgttgaaagctgccctgctatcaccagtgtagaaattaagagtagtacaatacatgtacactgaaatttgccatcacgtgtttgtgtaaactcaatgtgcacattttgtatttcaaaaagaaaaaataaaagcaaaataaaatgttaaaaaaaaaaaaaaaaaaaaaa

SEQ ID NO: 486 - protein, 225 aa, Homo sapiens
MSGCRKRCKREILKFAQYLLRLLTGSLHTDSVEDELEMATVRHRPEALELLEAQSKFTKKELQILYRGFKNECPSGVVNEETFKEIYSQFFPQGDSTTYAHFLFNAFDTDHNGAVSFEDFIKGLSILLRGTVQEKLNWAFNLYDINKDGYITKEEMLDIMKAIYDMMGKCTYPVLKEDAPRQHVETFFQKMDKNKDGVVTIDEFIESCQKDENIMRSMQLFENVI

SEQ ID NO: 487 - DNA, 2345 bp, Homo sapiens
aagatggaggctctgtgtgagaaggaatgcagggcagcctctggttgcagagagcagcacccggtttgacagctagcaatgcaattgtgacctcagacctacaatgtcaaggaattggcttctgccaacaaccagaatgagcatgaaagtggattagtccttggaacttccagataagagcccagccagctatacttggatttcagcctgtgagattctcagcagagaacccagtcaagtgtgtccagacgtccaacctacagaactacagcgtggaagatgaactggagatggccaccgtcaggcatcggcctgaagcccttgagcttctggaagcccagagcaaatttaccaagaaagagcttcagatcctttacagaggatttaagaatgaatgccccagtggtgttgttaatgaagaaaccttcaaagagatttactcgcagttctttccacagggagactctacaacatatgcacattttctgttcaatgcatttgatacagaccacaatggagctgtgagtttcgaggatttcatcaaaggtctttccattttgctccgggggacagtacaagaaaaactcaattgggcatttaatctgtatgacataaataaagatggctacatcactaaagaggaaatgcttgatataatgaaagcaatatacgatatgatgggtaaatgtacatatcctgtcctcaaagaagatgctcccagacaacacgttgaaacattttttcagaaaatggacaaaaataaagatggggttgttaccatagatgagttcattgaaagctgccaaaaagatgaaaacataatgcgctccatgcagctctttgaaaatgtgatttaacttgtcaaatagatcctgaatccaacagacaaatgtgaactattctaccacccttaaagttggagctaccacttttagcatagattgctcagcttgacactgaagcatattatgcaaacaagctttgttttaatataaagcaatccccaaaagatttgagctttcagttataaatttgcatccttttcataatgccactgagttcaggggatggtctaactcatttcatactctgtgaatattcaaaagtaatagaatctggcatatagttttattggttccttagccatgggattattgaggctttcacatatcagtgattttaaaatatcagtgttttttgctactcatttgtatgtattcagtcctaggattttgaatggttttctaatatagtgacatctgcatttaatttccagaaattaaattaattttcatgtttgaatgctgtaattccatttaaattccatttatatactttaaggaaacaagattacaacaattaaaaaaacacatagttccagtttctatggccttcccaccttctgttagaaattagttttatctggcatttttaaacatttaaaaattattaaacatttaaaaattagtttattatcagatatcagcatatgcctaataaaacttattttaataagcatttaattttccataatatgttacagccaaggcctatataataattttggatttgttcaatctttcttacaggctgttttctattgtatcaatcattagtatcaatcattaagtggaagttgaagaaggcatcaaacaaaacaaggatgtttacagacatatgcaaagggtcaggatatctatcctccagtatatagtaatgcttaataacaagtaatcctaacagcattaaaggccaaatctgtcctctttcccctgacttccttacagcatgtttatttatattacaagccattcagggacaaagaaagaaaccttgactaccccactgtctactaagaacaaacagcaagcaaaattagcaagcaaaattcactttgaaagcaccagtggttccattacattgacaactactaccaagatttagtagaaaataagtgctcaacaactaatccagattacagtatgatttagctcatcataattcagattatttttaatcatcttagccaaaactgtaaagttgccacattactaaagccacacacatcgtccctgttttgtagaaatatcacaaagaccaagaggctacagaaggaggaaatttgcaactgtctttgcaacaataaatcaggtatctattctggtgtagagataggatgttgaaagctgccctgctatcaccagtgtagaaattaagagtagtacaatacatgtacactgaaatttgccatcacgtgtttgtgtaaactcaatgtgcacattttgtatttcaaaaagaaaaaataaaagcaaaataaaatgttaaaaaaaaaaaaaaaaaaaaaa

SEQ ID NO: 488 - protein, 188 aa, Homo sapiens
MATVRHRPEALELLEAQSKFTKKELQILYRGFKNECPSGVVNEETFKEIYSQFFPQGDSTTYAHFLFNAFDTDHNGAVSFEDFIKGLSILLRGTVQEKLNWAFNLYDINKDGYITKEEMLDIMKAIYDMMGKCTYPVLKEDAPRQHVETFFQKMDKNKDGVVTIDEFIESCQKDENIMRSMQLFENVI

SEQ ID NO: 489 - DNA, 2361 bp, Homo sapiens
gctcccagcgccacggacgcccccgggccgagcggcggtgcgctcccgtgcagacccgtggacagacgcccctggccggtggactctcgagtctcgcttctgcaccctgcgtccctagacatgaatgtgaggagggtggaaagcatttcggctcagctggaggaggccagctctacaggcggtttcctgtacgctcagaacagcaccaagcgcagcattaaagagcggctcatgaagctcttgccctgctcagctgccaaaacgtcgtctcctgctattcaaaacagcgtggaagatgaactggagatggccaccgtcaggcatcggcctgaagcccttgagcttctggaagcccagagcaaatttaccaagaaagagcttcagatcctttacagaggatttaagaatgaatgccccagtggtgttgttaatgaagaaaccttcaaagagatttactcgcagttctttccacagggagactctacaacatatgcacattttctgttcaatgcatttgatacagaccacaatggagctgtgagtttcgaggatttcatcaaaggtctttccattttgctccgggggacagtacaagaaaaactcaattgggcatttaatctgtatgacataaataaagatggctacatcactaaagaggaaatgcttgatataatgaaagcaatatacgatatgatgggtaaatgtacatatcctgtcctcaaagaagatgctcccagacaacacgttgaaacattttttcagaaaatggacaaaaataaagatggggttgttaccatagatgagttcattgaaagctgccaaaaagatgaaaacataatgcgctccatgcagctctttgaaaatgtgatttaacttgtcaaatagatcctgaatccaacagacaaatgtgaactattctaccacccttaaagttggagctaccacttttagcatagattgctcagcttgacactgaagcatattatgcaaacaagctttgttttaatataaagcaatccccaaaagatttgagctttcagttataaatttgcatccttttcataatgccactgagttcaggggatggtctaactcatttcatactctgtgaatattcaaaagtaatagaatctggcatatagttttattggttccttagccatgggattattgaggctttcacatatcagtgattttaaaatatcagtgttttttgctactcatttgtatgtattcagtcctaggattttgaatggttttctaatatagtgacatctgcatttaatttccagaaattaaattaattttcatgtttgaatgctgtaattccatttaaattccatttatatactttaaggaaacaagattacaacaattaaaaaaacacatagttccagtttctatggccttcccaccttctgttagaaattagttttatctggcatttttaaacatttaaaaattattaaacatttaaaaattagtttattatcagatatcagcatatgcctaataaaacttattttaataagcatttaattttccataatatgttacagccaaggcctatataataattttggatttgttcaatctttcttacaggctgttttctattgtatcaatcattagtatcaatcattaagtggaagttgaagaaggcatcaaacaaaacaaggatgtttacagacatatgcaaagggtcaggatatctatcctccagtatatagtaatgcttaataacaagtaatcctaacagcattaaaggccaaatctgtcctctttcccctgacttccttacagcatgtttatttatattacaagccattcagggacaaagaaagaaaccttgactaccccactgtctactaagaacaaacagcaagcaaaattagcaagcaaaattcactttgaaagcaccagtggttccattacattgacaactactaccaagatttagtagaaaataagtgctcaacaactaatccagattacagtatgatttagctcatcataattcagattatttttaatcatcttagccaaaactgtaaagttgccacattactaaagccacacacatcgtccctgttttgtagaaatatcacaaagaccaagaggctacagaaggaggaaatttgcaactgtctttgcaacaataaatcaggtatctattctggtgtagagataggatgttgaaagctgccctgctatcaccagtgtagaaattaagagtagtacaatacatgtacactgaaatttgccatcacgtgtttgtgtaaactcaatgtgcacattttgtatttcaaaaagaaaaaataaaagcaaaataaaatgttaaaaaaaaaaaaaaaaaaaaaa

SEQ ID NO: 490 - protein, 250 aa, Homo sapiens
MNVRRVESISAQLEEASSTGGFLYAQNSTKRSIKERLMKLLPCSAAKTSSPAIQNSVEDELEMATVRHRPEALELLEAQSKFTKKELQILYRGFKNECPSGVVNEETFKEIYSQFFPQGDSTTYAHFLFNAFDTDHNGAVSFEDFIKGLSILLRGTVQEKLNWAFNLYDINKDGYITKEEMLDIMKAIYDMMGKCTYPVLKEDAPRQHVETFFQKMDKNKDGVVTIDEFIESCQKDENIMRSMQLFENVI

SEQ ID NO: 491 - DNA, 2259 bp, Homo sapiens
gctcccagcgccacggacgcccccgggccgagcggcggtgcgctcccgtgcagacccgtggacagacgcccctggccggtggactctcgagtctcgcttctgcaccctgcgtccctagacatgaatgtgaggagggtggaaagcatttcggctcagctggaggaggccagctctacaggcgacagcgtggaagatgaactggagatggccaccgtcaggcatcggcctgaagcccttgagcttctggaagcccagagcaaatttaccaagaaagagcttcagatcctttacagaggatttaagaatgaatgccccagtggtgttgttaatgaagaaaccttcaaagagatttactcgcagttctttccacagggagactctacaacatatgcacattttctgttcaatgcatttgatacagaccacaatggagctgtgagtttcgaggatttcatcaaaggtctttccattttgctccgggggacagtacaagaaaaactcaattgggcatttaatctgtatgacataaataaagatggctacatcactaaagaggaaatgcttgatataatgaaagcaatatacgatatgatgggtaaatgtacatatcctgtcctcaaagaagatgctcccagacaacacgttgaaacattttttcagaaaatggacaaaaataaagatggggttgttaccatagatgagttcattgaaagctgccaaaaagatgaaaacataatgcgctccatgcagctctttgaaaatgtgatttaacttgtcaaatagatcctgaatccaacagacaaatgtgaactattctaccacccttaaagttggagctaccacttttagcatagattgctcagcttgacactgaagcatattatgcaaacaagctttgttttaatataaagcaatccccaaaagatttgagctttcagttataaatttgcatccttttcataatgccactgagttcaggggatggtctaactcatttcatactctgtgaatattcaaaagtaatagaatctggcatatagttttattggttccttagccatgggattattgaggctttcacatatcagtgattttaaaatatcagtgttttttgctactcatttgtatgtattcagtcctaggattttgaatggttttctaatatagtgacatctgcatttaatttccagaaattaaattaattttcatgtttgaatgctgtaattccatttaaattccatttatatactttaaggaaacaagattacaacaattaaaaaaacacatagttccagtttctatggccttcccaccttctgttagaaattagttttatctggcatttttaaacatttaaaaattattaaacatttaaaaattagtttattatcagatatcagcatatgcctaataaaacttattttaataagcatttaattttccataatatgttacagccaaggcctatataataattttggatttgttcaatctttcttacaggctgttttctattgtatcaatcattagtatcaatcattaagtggaagttgaagaaggcatcaaacaaaacaaggatgtttacagacatatgcaaagggtcaggatatctatcctccagtatatagtaatgcttaataacaagtaatcctaacagcattaaaggccaaatctgtcctctttcccctgacttccttacagcatgtttatttatattacaagccattcagggacaaagaaagaaaccttgactaccccactgtctactaagaacaaacagcaagcaaaattagcaagcaaaattcactttgaaagcaccagtggttccattacattgacaactactaccaagatttagtagaaaataagtgctcaacaactaatccagattacagtatgatttagctcatcataattcagattatttttaatcatcttagccaaaactgtaaagttgccacattactaaagccacacacatcgtccctgttttgtagaaatatcacaaagaccaagaggctacagaaggaggaaatttgcaactgtctttgcaacaataaatcaggtatctattctggtgtagagataggatgttgaaagctgccctgctatcaccagtgtagaaattaagagtagtacaatacatgtacactgaaatttgccatcacgtgtttgtgtaaactcaatgtgcacattttgtatttcaaaaagaaaaaataaaagcaaaataaaatgttaaaaaaaaaaaaaaaaaaaaaa

SEQ ID NO: 492 - protein, 216 aa, Homo sapiens
MNVRRVESISAQLEEASSTGDSVEDELEMATVRHRPEALELLEAQSKFTKKELQILYRGFKNECPSGVVNEETFKEIYSQFFPQGDSTTYAHFLFNAFDTDHNGAVSFEDFIKGLSILLRGTVQEKLNWAFNLYDINKDGYITKEEMLDIMKAIYDMMGKCTYPVLKEDAPRQHVETFFQKMDKNKDGVVTIDEFIESCQKDENIMRSMQLFENVI

SEQ ID NO: 493 - DNA, 2371 bp, Homo sapiens
gctcccagcgccacggacgcccccgggccgagcggcggtgcgctcccgtgcagacccgtggacagacgcccctggccggtggactctcgagtctcgcttctgcaccctgcgtccctagacatgaatgtgaggagggtggaaagcatttcggctcagctggaggaggccagctctacaggcgaagcggttattgagcattcgctgtgtaccaagtgctgtccttgacaagaagacttacacccagtggtcccagagggagacttcggaagtgggagcacctgtcagatcatcatacagcgtggaagatgaactggagatggccaccgtcaggcatcggcctgaagcccttgagcttctggaagcccagagcaaatttaccaagaaagagcttcagatcctttacagaggatttaagaatgaatgccccagtggtgttgttaatgaagaaaccttcaaagagatttactcgcagttctttccacagggagactctacaacatatgcacattttctgttcaatgcatttgatacagaccacaatggagctgtgagtttcgaggatttcatcaaaggtctttccattttgctccgggggacagtacaagaaaaactcaattgggcatttaatctgtatgacataaataaagatggctacatcactaaagaggaaatgcttgatataatgaaagcaatatacgatatgatgggtaaatgtacatatcctgtcctcaaagaagatgctcccagacaacacgttgaaacattttttcagaaaatggacaaaaataaagatggggttgttaccatagatgagttcattgaaagctgccaaaaagatgaaaacataatgcgctccatgcagctctttgaaaatgtgatttaacttgtcaaatagatcctgaatccaacagacaaatgtgaactattctaccacccttaaagttggagctaccacttttagcatagattgctcagcttgacactgaagcatattatgcaaacaagctttgttttaatataaagcaatccccaaaagatttgagctttcagttataaatttgcatccttttcataatgccactgagttcaggggatggtctaactcatttcatactctgtgaatattcaaaagtaatagaatctggcatatagttttattggttccttagccatgggattattgaggctttcacatatcagtgattttaaaatatcagtgttttttgctactcatttgtatgtattcagtcctaggattttgaatggttttctaatatagtgacatctgcatttaatttccagaaattaaattaattttcatgtttgaatgctgtaattccatttaaattccatttatatactttaaggaaacaagattacaacaattaaaaaaacacatagttccagtttctatggccttcccaccttctgttagaaattagttttatctggcatttttaaacatttaaaaattattaaacatttaaaaattagtttattatcagatatcagcatatgcctaataaaacttattttaataagcatttaattttccataatatgttacagccaaggcctatataataattttggatttgttcaatctttcttacaggctgttttctattgtatcaatcattagtatcaatcattaagtggaagttgaagaaggcatcaaacaaaacaaggatgtttacagacatatgcaaagggtcaggatatctatcctccagtatatagtaatgcttaataacaagtaatcctaacagcattaaaggccaaatctgtcctctttcccctgacttccttacagcatgtttatttatattacaagccattcagggacaaagaaagaaaccttgactaccccactgtctactaagaacaaacagcaagcaaaattagcaagcaaaattcactttgaaagcaccagtggttccattacattgacaactactaccaagatttagtagaaaataagtgctcaacaactaatccagattacagtatgatttagctcatcataattcagattatttttaatcatcttagccaaaactgtaaagttgccacattactaaagccacacacatcgtccctgttttgtagaaatatcacaaagaccaagaggctacagaaggaggaaatttgcaactgtctttgcaacaataaatcaggtatctattctggtgtagagataggatgttgaaagctgccctgctatcaccagtgtagaaattaagagtagtacaatacatgtacactgaaatttgccatcacgtgtttgtgtaaactcaatgtgcacattttgtatttcaaaaagaaaaaataaaagcaaaataaaatgttaaaaaaaaaaaaaaaaaaaaaa

SEQ ID NO: 494 - protein, 188 aa, Homo sapiens; identical to SEQ ID NO: 488

SEQ ID NO: 495 - DNA, 2178 bp, Homo sapiens
atgaacttggaagggcttgaaatgatagcagttctgatcgtcattgtgctttttgttaaattattggaacagtttgggctgattgaagcaggtttagaagacagcgtggaagatgaactggagatggccaccgtcaggcatcggcctgaagcccttgagcttctggaagcccagagcaaatttaccaagaaagagcttcagatcctttacagaggatttaagaatgaatgccccagtggtgttgttaatgaagaaaccttcaaagagatttactcgcagttctttccacagggagactctacaacatatgcacattttctgttcaatgcatttgatacagaccacaatggagctgtgagtttcgaggatttcatcaaaggtctttccattttgctccgggggacagtacaagaaaaactcaattgggcatttaatctgtatgacataaataaagatggctacatcactaaagaggaaatgcttgatataatgaaagcaatatacgatatgatgggtaaatgtacatatcctgtcctcaaagaagatgctcccagacaacacgttgaaacattttttcagaaaatggacaaaaataaagatggggttgttaccatagatgagttcattgaaagctgccaaaaagatgaaaacataatgcgctccatgcagctctttgaaaatgtgatttaacttgtcaaatagatcctgaatccaacagacaaatgtgaactattctaccacccttaaagttggagctaccacttttagcatagattgctcagcttgacactgaagcatattatgcaaacaagctttgttttaatataaagcaatccccaaaagatttgagctttcagttataaatttgcatccttttcataatgccactgagttcaggggatggtctaactcatttcatactctgtgaatattcaaaagtaatagaatctggcatatagttttattggttccttagccatgggattattgaggctttcacatatcagtgattttaaaatatcagtgttttttgctactcatttgtatgtattcagtcctaggattttgaatggttttctaatatagtgacatctgcatttaatttccagaaattaaattaattttcatgtttgaatgctgtaattccatttaaattccatttatatactttaaggaaacaagattacaacaattaaaaaaacacatagttccagtttctatggccttcccaccttctgttagaaattagttttatctggcatttttaaacatttaaaaattattaaacatttaaaaattagtttattatcagatatcagcatatgcctaataaaacttattttaataagcatttaattttccataatatgttacagccaaggcctatataataattttggatttgttcaatctttcttacaggctgttttctattgtatcaatcattagtatcaatcattaagtggaagttgaagaaggcatcaaacaaaacaaggatgtttacagacatatgcaaagggtcaggatatctatcctccagtatatagtaatgcttaataacaagtaatcctaacagcattaaaggccaaatctgtcctctttcccctgacttccttacagcatgtttatttatattacaagccattcagggacaaagaaagaaaccttgactaccccactgtctactaagaacaaacagcaagcaaaattagcaagcaaaattcactttgaaagcaccagtggttccattacattgacaactactaccaagatttagtagaaaataagtgctcaacaactaatccagattacagtatgatttagctcatcataattcagattatttttaatcatcttagccaaaactgtaaagttgccacattactaaagccacacacatcgtccctgttttgtagaaatatcacaaagaccaagaggctacagaaggaggaaatttgcaactgtctttgcaacaataaatcaggtatctattctggtgtagagataggatgttgaaagctgccctgctatcaccagtgtagaaattaagagtagtacaatacatgtacactgaaatttgccatcacgtgtttgtgtaaactcaatgtgcacattttgtatttcaaaaagaaaaaataaaagcaaaataaaatgttaaaaaaaaaaaaaaaaaaaaaa

SEQ ID NO: 496 - protein, 229 aa, Homo sapiens
MNLEGLEMIAVLIVIVLFVKLLEQFGLIEAGLEDSVEDELEMATVRHRPEALELLEAQSKFTKKELQILYRGFKNECPSGVVNEETFKEIYSQFFPQGDSTTYAHFLFNAFDTDHNGAVSFEDFIKGLSILLRGTVQEKLNWAFNLYDINKDGYITKEEMLDIMKAIYDMMGKCTYPVLKEDAPRQHVETFFQKMDKNKDGVVTIDEFIESCQKDENIMRSMQLFENVI

SEQ ID NO: 497 - DNA, 4564 bp, Homo sapiens
agtggcggcggcggcgggtccggaggtggcggcaggtggccccgcgcgcggcggccggcccggccgggggcgggcgggaaggtggcgcctcgggcgggggccggtccctgcaccaggtgacctgttccggcccggatccgggcggcctcgccatgcagcggcgcggcgcggggctcgggtggccgcggcagcagcagcagcaacccccgccgctcgcggtcggcccccgggccgcagccatggtcccgagtggcggcgtcccccagggcctcggcggccgctctgcctgcgcgctgctcctgctctgctacctgaatgttgtaccatctttgggtaggcagacttccctgacgacatcagtgatacccaaagctgagcagagcgtggcttacaaagactttatttattttactgtctttgaaggaaacgttcgcaacgtttctgaagtctcggttgagtatttatgctctcagccttgtgttgtcaatttggaagcagttgtttcatctgagttcagaagtagcattcccgtgtacaaaaaaaggtggaagaatgagaaacatcttcacaccagcaggacacaaatagtacatgtgaaatttccaagcattatggtttacagagatgattatttcatcagacattccatctctgtatctgcagtgatagtacgcgcctggattactcacaaatacagtggcagagactggaatgttaaatgggaggaaaacttgctccatgctgtagcaaagaattataccctcctgcagaccatcccgccttttgaacgccctttcaaagatcatcaagtgtgccttgagtggaacatgggttatatttggaaccttcgggcaaacaggattccacagtgtcctctggaaaatgatgtggttgccctgcttggctttccttatgcctccagtggagaaaacacaggcattgtcaagaagttcccgaggtttcggaaccgagagctggaggccactcgacgccagaggatggattacccagtgtttactgtttcattgtggctttatttactccattattgcaaggccaacctctgtgggattctgtactttgttgactctaatgagatgtacggcacaccttctgtatttcttacggaagagggctatttgcatattcagatgcatcttgtcaaaggggaagaccttgctgtaaaaactaaattcatcatacctttgaaggagtggtttcgactggatatctcttttaacggaggccagatagtagtaaccactagcattggacaggatttgaaaagctaccacaatcagaccattagcttccgggaggatttccattataatgacacagctgggtacttcattattggagggagcaggtatgtggctggcattgaagggttttttggacccctgaagtactatcgccttcgcagtctgcaccccgcccagatttttaatcccctccttgagaagcaacttgctgaacaaatcaagttatattatgaaaggtgtgctgaggttcaagaaatagtatctgtgtatgcatctgcagcaaagcacgggggcgagagacaagaagcatgccacctccacaactcctacctggacctccagcgcaggtatgggagaccctcgatgtgcagagccttcccctgggagaaggagctgaaagacaaacaccccagcttgttccaggcattgctggagatggatctgctgaccgtgccaaggaaccaaaatgaatctgtatcagaaatcggtgggaagatatttgagaaggctgtaaagagactctctagcattgatggtcttcaccaaattagctctatcgtcccctttctgacggattccagctgctgtggataccataaagcatcctactaccttgcagtcttttatgagactggattaaatgttcctcgggatcagctgcagggcatgttgtatagtttggttggaggccaggggagtgagaggctgtcttcaatgaatcttgggtataaacactaccagggtattgacaactaccccctggactgggaactgtcgtatgcctactacagcaacattgccaccaagacaccccttgaccagcacacactgcaaggagatcaggcatatgttgaaacaattagactaaaagatgatgaaatactcaaggtacaaaccaaagaagatggagatgtctttatgtggttgaagcatgaagctacccgaggcaatgcagcagctcagcaacgattggcccagatgctgttctgggggcagcaaggtgtggccaagaatcccgaagcagcaattgagtggtacgccaagggcgccctggagacggaggatcctgcgttaatctatgactatgccattgtgctattcaagggtcaaggagtaaaaaagaacagacggcttgccttagagctgatgaagaaagcagcttccaagggattgcatcaggcagtcaatggcctgggatggtattaccacaaattcaagaaaaattacgccaaagcagcaaagtactggttaaaagcagaagaaatggggaacccagatgcgtcatacaatcttggagtcctgcatttggatggcatcttccctggagttcctggaaggaatcaaactttagctggtgaatatttccataaggctgcgcaaggtggacacatggaagggaccttgtggtgttctctctactatatcacaggcaacctggagacattccctagagatcctgagaaagctgttgtatgggcaaaacatgtagctgagaaaaatggctacttgggccatgtcatccgcaaaggcctcaatgcctacctggaaggttcatggcatgaagctttgctgtattatgttttagcagcagaaactggaattgaagtgtcacagacaaatttagcacacatctgtgaggagaggccagacctggccaggagatacttgggtgttaactgtgtttggagatactataatttctctgtttttcaaatcgatgctccttcctttgcatatttgaagatgggagacctttactactatggccaccaaaaccagtcacaagacctggagttgtctgtgcagatgtacgcccaagccgccctggatggagactcccagggattttttaacctggccctgctaatcgaggaaggtacgataatcccacaccatatcttggatttcttggaaattgactcaactctccattctaataacatctccattctccaggaactgtacgaaaggtgctggagccacagtaacgaggagtccttcagcccctgctccttggcctggctttacctgcacttgcggcttctctggggtgctatcctgcactcagccctgatctactttctgggaacctttctgctatccatattgatcgcctggactgtgcagtatttccagtctgtctcagcaagcgatccccctccaagaccatcccaggcctccccagacactgccacgtccactgcaagtccagctgtgactccagctgcagatgcctctgaccaagaccagcccacagtaactaataacccggagccacgtgggtgaactgtgcactccagttctctccagatgagagagaatcttttcaacagctggtattgggaagctggggccagggcatgatcctgataaacaccttaaatgtcttgtcaactggatgcaaattttgcaattggtgtcattttttttaaagtcaaattacaaggaagtacccagatcaggcagtggtaataccaaaggtcatcaaacacatacaaggaacatcttgatcatagggcatgtggggaagtttactgggccatcacagacttttgttctagtgattgtatgtattaggagtcatagcatgccctacggcagatctggattcttatacactaagatgtgtcttaagaatcacagtgcgtgcttcatccctttattgaagaacagaaaattatgactactctacaaggtggataatattttggtacctgtgcttgccacagccctgttcctcaaagctgaattgatagatttctctttgacttccaagacctagcagttataaggcaccttgaaataaattgtttgtgcctggaaatgcagggagggcaatagctttgtaaattggtttacatttttctccttgaatttttctagggtcctagtgcttccgaatcatttaatggcattgtcggatatcttttacatttcaattgcaatccatgaaattacatttagaagattcttagtacttaactgtagtcttctccatgaattacacgttagaatagactggcagcaacggaatatgcagcaagtaagcctctagcttatagtttcatccctacccctcatgcctgcgtgagtctgtacagggatatgtgtgtgtgtgtgtgtgtgtgtgtgttagagaggaagaggaagagcagaatgtctgtatactacatgctgctaaggtagtgaataaatcagtaatgcaatattgtgggtccaaactactctttgcactactttatttacagtagtaaataaaattatttttatacaattgactaccaaaaaaaaaaaaaaaa

SEQ ID NO: 498 - protein, 1132 aa, Homo sapiens
MQRRGAGLGWPRQQQQQPPPLAVGPRAAAMVPSGGVPQGLGGRSACALLLLCYLNVVPSLGRQTSLTTSVIPKAEQSVAYKDFIYFTVFEGNVRNVSEVSVEYLCSQPCVVNLEAVVSSEFRSSIPVYKKRWKNEKHLHTSRTQIVHVKFPSIMVYRDDYFIRHSISVSAVIVRAWITHKYSGRDWNVKWEENLLHAVAKNYTLLQTIPPFERPFKDHQVCLEWNMGYIWNLRANRIPQCPLENDVVALLGFPYASSGENTGIVKKFPRFRNRELEATRRQRMDYPVFTVSLWLYLLHYCKANLCGILYFVDSNEMYGTPSVFLTEEGYLHIQMHLVKGEDLAVKTKFIIPLKEWFRLDISFNGGQIVVTTSIGQDLKSYHNQTISFREDFHYNDTAGYFIIGGSRYVAGIEGFFGPLKYYRLRSLHPAQIFNPLLEKQLAEQIKLYYERCAEVQEIVSVYASAAKHGGERQEACHLHNSYLDLQRRYGRPSMCRAFPWEKELKDKHPSLFQALLEMDLLTVPRNQNESVSEIGGKIFEKAVKRLSSIDGLHQISSIVPFLTDSSCCGYHKASYYLAVFYETGLNVPRDQLQGMLYSLVGGQGSERLSSMNLGYKHYQGIDNYPLDWELSYAYYSNIATKTPLDQHTLQGDQAYVETIRLKDDEILKVQTKEDGDVFMWLKHEATRGNAAAQQRLAQMLFWGQQGVAKNPEAAIEWYAKGALETEDPALIYDYAIVLFKGQGVKKNRRLALELMKKAASKGLHQAVNGLGWYYHKFKKNYAKAAKYWLKAEEMGNPDASYNLGVLHLDGIFPGVPGRNQTLAGEYFHKAAQGGHMEGTLWCSLYYITGNLETFPRDPEKAVVWAKHVAEKNGYLGHVIRKGLNAYLEGSWHEALLYYVLAAETGIEVSQTNLAHICEERPDLARRYLGVNCVWRYYNFSVFQIDAPSFAYLKMGDLYYYGHQNQSQDLELSVQMYAQAALDGDSQGFFNLALLIEEGTIIPHHILDFLEIDSTLHSNNISILQELYERCWSHSNEESFSPCSLAWLYLHLRLLWGAILHSALIYFLGTFLLSILIAWTVQYFQSVSASDPPPRPSQASPDTATSTASPAVTPAADASDQDQPTVTNNPEPRG

SEQ ID NO: 499 - DNA, 4646 bp, Homo sapiens
gaatgcaggtgagaaaaggcacggactctgcggctgcgaacccaaacttgggcaccgcacggtgcgcactgctcagccttcgcccccgtgggcgaaaggctgctgcggtttcaggcggctgcttcgtgactaatgaccttgcgcagagttgttaagaaaaaagagaaacccgcgctctccggggtgagaagggactgactctgggcgtctctgaagatggctcgggcttctctttggcgcgccggggggaccctgacactgaccgctctgtgacgcgagtagtctcccctgcaccgtgcccgaagcgacgtgccgggggatttttcattctcgatctgttgactggctcccccgctgcatgagcagagtcggagttgagactggcttgttgctggccccagcgcctggtgcaggaagcgactcacgtttgtctgggtggccggagccggagcagagcctgggtttggagtgagtgcctggaacgtgaattggactcaactcgagtagcagcaaagaccagcgggctggcaggcgggggaggctgcaggctcattccccacctcttcccagccccactgcccgtctgccggagcggttctggccccttccgacagagcggggactagagccggggattctccgcccgctgaggggatgactctgggttgggggagcgccgaacccgcggcgcgcagtgtcccgtgaactgtgagtactgcgactgaacggcggcaggcgagcgggcgattagcacccattgcatgaattatgaaacaataactttcggaagaagcaggaggaaaaaaagaagcatctatcgctgccctcccacccccattcccggccaactctccacgccgcttttgccccctccctcccctccctctcgctccttcctttccgggagaggggagaggactcgggggagggcaggcggccggccccggaggaggggggcgccgagggggctgtggttagaaggagcagtagcagcagcagcaggagaagatgctgaggatgcggaccgcgggatgggcgcgcggctggtgcttgggctgctgcctcctcctgccgctctcgctcagcctggcggccgccaagcagctcctccggtaccggctggccgaggagggccccgccgacgtccgcatcggcaacgtggcttcagacctgggcatcgtgaccggatcgggtgaggtgactttcagcctggagtccggttccgagtacctgaagatcgacaacctcactggcgagctgagcacgagcgagcggcgcatcgaccgcgagaagctgccccagtgtcagatgatcttcgacgagaacgagtgcttcctggacttcgaggtgtcggtgatcgggccctcgcagagctgggtggacctgtttgagggtcaggtcatcgtgcttgacatcaacgacaacacgcccaccttcccgtcgcccgtgctcacgctcacggtggaggagaatcggccggtgggcacactttacctgctgcccacagccaccgaccgcgacttcggccgcaacggcatcgagcgctacgagctgctccaggagcccggaggcggcggcagcggcggcgagagccggcgcgccggggcggccgacagcgccccctaccccgggggcggcgggaacggcgcgagcggcggcggctcgggaggctccaagcggcggctggacgcatcagagggcggcggcggcaccaaccccggcggccgcagcagcgtgttcgagctgcaggtggcggacaccccggacggcgagaagcagccgcagctgatcgtgaagggggcgctggaccgcgagcagcgcgactcctacgagctgaccctgcgagtgcgcgacggcggcgacccgcctcgctcctcgcaggccatcctacgggtcctcatcaccgacgtgaacgacaacagcccccgcttcgagaagagcgtgtacgaggccgacttggctgagaacagcgccccggggacccccatcctgcaactgcgcgcagccgacttggacgtgggggtcaacgggcagatcgaatacgtgttcggggcggccaccgagtcggtgaggcggctgctgcgccttgacgagacgtccggctggctcagcgtcctgcaccggatcgaccgcgaggaggtgaaccagctgcgcttcacggtcatggcccgcgaccgcgggcagccccccaagaccgacaaggccaccgtggtccttaacatcaaagacgagaacgacaacgtgccgtccattgaaatccgcaagattgggcgcatccccctcaaggacggggtggccaacgtggccgaggacgttctggtcgacacccccatcgctctggtgcaggtgtccgaccgagaccaaggcgagaacggggtggtcacctgcaccgtggtgggcgacgtgcccttccagctcaagccagccagcgacaccgagggcgaccagaacaagaaaaagtacttcttgcacacctcgacccctctggactatgaggccacccgggagttcaacgtggtcatcgtggcggtggactcaggcagccccagcctctcgagcaacaactccctgattgtcaaggtgggagacaccaacgacaacccgcccatgttcggccagtcggtggtggaggtttacttccctgagaacaacatcccgggcgagagggtggccacggtgctggcgacagacgcagacagcggtaagaacgccgagatcgcctactcgctggactcctctgtgatggggatctttgccatcgatcccgattctggggacatcctggtcaataccgtgctggaccgcgagcagactgacaggtatgagtttaaagttaacgccaaagacaaaggcatccccgtgctgcagggcagcactacggtgattgtgcaggtggctgataaaaatgacaatgaccctaagtttatgcaggacgtcttcaccttttatgtgaaagaaaacttgcagcccaacagccctgtggggatggtcaccgtgatggatgctgacaaggggcggaatgcagagatgagcctgtacatagaggagaacaataacattttttctattgaaaatgacacggggaccatttactccacaatgtcttttgaccgggaacatcagaccacatacactttcagagtcaaggctgtggatgggggagatcctcccagatctgccacagctacagtctcgctttttgtgatggatgaaaatgacaatgctcccacagttacccttcccaaaaacatttcctacactttactgccaccttcgagtaatgtcaggacagtagtagctacagtgttggcaacagacagtgatgatggcatcaatgcagacctgaactacagcattgtgggaggaaatcccttcaagctgtttgaaattgatcccactagtggtgtggtttccttagtgggaaaactcacccaaaagcattatggcttgcacaggttggtggtgcaagtgaatgacagtgggcagccttcccagtccaccacgactctggtgcacgtgtttgtcaatgaaagtgtttctaatgcaactgcgattgactcccagatagctagaagtttgcacatcccactcacccaggatatagctggtgacccaagctatgaaattagcaaacagagactcagtattgtcattggcgtggttgctggcattatgacggtgattctaatcatcttaattgtagtgatggcaaggtactgcaggtccaaaaataaaaatggctatgaagccggcaaaaaagatcacgaagacttttttacaccccaacagcatgacaaatctaaaaagcctaaaaaggacaagaaaaacaaaaaatctaagcagcctctctacagcagcattgtcactgtggaggcttctaagccaaatggacagaggtatgatagtgtcaatgagaagctgtcagacagcccaagcatggggcgatacaggtccgttaatggtgggcccggcagtcctgacctggcaaggcattacaaatctagttccccattgcctactgttcagcttcatccccagtcaccaactgcaggaaaaaaacaccaggccgtacaagatctaccaccagccaacacatttgtgggagcaggagacaacatttcaattggatcagatcactgctctgagtacagctgtcaaaccaataacaagtacagcaaacagatgcgtctacatccatacattactgtgtttggctgaattccactctaatatgatgctccattatgcaccatactgtgatgacctttctactccgaaacctgctggagcctgcccttggccgtggggtgtcagccaatcactgcttgttccacttgttgtacattttatttttgagtctttttctttctcatatacagaaaaatagtatgaaaataaaataaatgtatgaaacagtattaatgcagaaatgtgctactaatggatgtctgagtcaccagaaattccattcttaaagaggcggttagcacctattagacgtaacagtgatgtcttttaaaaaatccaaaagcatattgcaacaataagtttgagactttgtgtgaacaaagggaaattcagcctcttatgtctttgtctttaatacattaaatactgattttgaataaaaatctaaattgatcaat

SEQ ID NO: 500 - protein, 1069 aa, Homo sapiens
MLRMRTAGWARGWCLGCCLLLPLSLSLAAAKQLLRYRLAEEGPADVRIGNVASDLGIVTGSGEVTFSLESGSEYLKIDNLTGELSTSERRIDREKLPQCQMIFDENECFLDFEVSVIGPSQSWVDLFEGQVIVLDINDNTPTFPSPVLTLTVEENRPVGTLYLLPTATDRDFGRNGIERYELLQEPGGGGSGGESRRAGAADSAPYPGGGGNGASGGGSGGSKRRLDASEGGGGTNPGGRSSVFELQVADTPDGEKQPQLIVKGALDREQRDSYELTLRVRDGGDPPRSSQAILRVLITDVNDNSPRFEKSVYEADLAENSAPGTPILQLRAADLDVGVNGQIEYVFGAATESVRRLLRLDETSGWLSVLHRIDREEVNQLRFTVMARDRGQPPKTDKATVVLNIKDENDNVPSIEIRKIGRIPLKDGVANVAEDVLVDTPIALVQVSDRDQGENGVVTCTVVGDVPFQLKPASDTEGDQNKKKYFLHTSTPLDYEATREFNVVIVAVDSGSPSLSSNNSLIVKVGDTNDNPPMFGQSVVEVYFPENNIPGERVATVLATDADSGKNAEIAYSLDSSVMGIFAIDPDSGDILVNTVLDREQTDRYEFKVNAKDKGIPVLQGSTTVIVQVADKNDNDPKFMQDVFTFYVKENLQPNSPVGMVTVMDADKGRNAEMSLYIEENNNIFSIENDTGTIYSTMSFDREHQTTYTFRVKAVDGGDPPRSATATVSLFVMDENDNAPTVTLPKNISYTLLPPSSNVRTVVATVLATDSDDGINADLNYSIVGGNPFKLFEIDPTSGVVSLVGKLTQKHYGLHRLVVQVNDSGQPSQSTTTLVHVFVNESVSNATAIDSQIARSLHIPLTQDIAGDPSYEISKQRLSIVIGVVAGIMTVILIILIVVMARYCRSKNKNGYEAGKKDHEDFFTPQQHDKSKKPKKDKKNKKSKQPLYSSIVTVEASKPNGQRYDSVNEKLSDSPSMGRYRSVNGGPGSPDLARHYKSSSPLPTVQLHPQSPTAGKKHQAVQDLPPANTFVGAGDNISIGSDHCSEYSCQTNNKYSKQMRLHPYITVFG

SEQ ID NO: 501 - DNA, 4921 bp, Homo sapiens
gaatgcaggtgagaaaaggcacggactctgcggctgcgaacccaaacttgggcaccgcacggtgcgcactgctcagccttcgcccccgtgggcgaaaggctgctgcggtttcaggcggctgcttcgtgactaatgaccttgcgcagagttgttaagaaaaaagagaaacccgcgctctccggggtgagaagggactgactctgggcgtctctgaagatggctcgggcttctctttggcgcgccggggggaccctgacactgaccgctctgtgacgcgagtagtctcccctgcaccgtgcccgaagcgacgtgccgggggatttttcattctcgatctgttgactggctcccccgctgcatgagcagagtcggagttgagactggcttgttgctggccccagcgcctggtgcaggaagcgactcacgtttgtctgggtggccggagccggagcagagcctgggtttggagtgagtgcctggaacgtgaattggactcaactcgagtagcagcaaagaccagcgggctggcaggcgggggaggctgcaggctcattccccacctcttcccagccccactgcccgtctgccggagcggttctggccccttccgacagagcggggactagagccggggattctccgcccgctgaggggatgactctgggttgggggagcgccgaacccgcggcgcgcagtgtcccgtgaactgtgagtactgcgactgaacggcggcaggcgagcgggcgattagcacccattgcatgaattatgaaacaataactttcggaagaagcaggaggaaaaaaagaagcatctatcgctgccctcccacccccattcccggccaactctccacgccgcttttgccccctccctcccctccctctcgctccttcctttccgggagaggggagaggactcgggggagggcaggcggccggccccggaggaggggggcgccgagggggctgtggttagaaggagcagtagcagcagcagcaggagaagatgctgaggatgcggaccgcgggatgggcgcgcggctggtgcttgggctgctgcctcctcctgccgctctcgctcagcctggcggccgccaagcagctcctccggtaccggctggccgaggagggccccgccgacgtccgcatcggcaacgtggcttcagacctgggcatcgtgaccggatcgggtgaggtgactttcagcctggagtccggttccgagtacctgaagatcgacaacctcactggcgagctgagcacgagcgagcggcgcatcgaccgcgagaagctgccccagtgtcagatgatcttcgacgagaacgagtgcttcctggacttcgaggtgtcggtgatcgggccctcgcagagctgggtggacctgtttgagggtcaggtcatcgtgcttgacatcaacgacaacacgcccaccttcccgtcgcccgtgctcacgctcacggtggaggagaatcggccggtgggcacactttacctgctgcccacagccaccgaccgcgacttcggccgcaacggcatcgagcgctacgagctgctccaggagcccggaggcggcggcagcggcggcgagagccggcgcgccggggcggccgacagcgccccctaccccgggggcggcgggaacggcgcgagcggcggcggctcgggaggctccaagcggcggctggacgcatcagagggcggcggcggcaccaaccccggcggccgcagcagcgtgttcgagctgcaggtggcggacaccccggacggcgagaagcagccgcagctgatcgtgaagggggcgctggaccgcgagcagcgcgactcctacgagctgaccctgcgagtgcgcgacggcggcgacccgcctcgctcctcgcaggccatcctacgggtcctcatcaccgacgtgaacgacaacagcccccgcttcgagaagagcgtgtacgaggccgacttggctgagaacagcgccccggggacccccatcctgcaactgcgcgcagccgacttggacgtgggggtcaacgggcagatcgaatacgtgttcggggcggccaccgagtcggtgaggcggctgctgcgccttgacgagacgtccggctggctcagcgtcctgcaccggatcgaccgcgaggaggtgaaccagctgcgcttcacggtcatggcccgcgaccgcgggcagccccccaagaccgacaaggccaccgtggtccttaacatcaaagacgagaacgacaacgtgccgtccattgaaatccgcaagattgggcgcatccccctcaaggacggggtggccaacgtggccgaggacgttctggtcgacacccccatcgctctggtgcaggtgtccgaccgagaccaaggcgagaacggggtggtcacctgcaccgtggtgggcgacgtgcccttccagctcaagccagccagcgacaccgagggcgaccagaacaagaaaaagtacttcttgcacacctcgacccctctggactatgaggccacccgggagttcaacgtggtcatcgtggcggtggactcaggcagccccagcctctcgagcaacaactccctgattgtcaaggtgggagacaccaacgacaacccgcccatgttcggccagtcggtggtggaggtttacttccctgagaacaacatcccgggcgagagggtggccacggtgctggcgacagacgcagacagcggtaagaacgccgagatcgcctactcgctggactcctctgtgatggggatctttgccatcgatcccgattctggggacatcctggtcaataccgtgctggaccgcgagcagactgacaggtatgagtttaaagttaacgccaaagacaaaggcatccccgtgctgcagggcagcactacggtgattgtgcaggtggctgataaaaatgacaatgaccctaagtttatgcaggacgtcttcaccttttatgtgaaagaaaacttgcagcccaacagccctgtggggatggtcaccgtgatggatgctgacaaggggcggaatgcagagatgagcctgtacatagaggagaacaataacattttttctattgaaaatgacacggggaccatttactccacaatgtcttttgaccgggaacatcagaccacatacactttcagagtcaaggctgtggatgggggagatcctcccagatctgccacagctacagtctcgctttttgtgatggatgaaaatgacaatgctcccacagttacccttcccaaaaacatttcctacactttactgccaccttcgagtaatgtcaggacagtagtagctacagtgttggcaacagacagtgatgatggcatcaatgcagacctgaactacagcattgtgggaggaaatcccttcaagctgtttgaaattgatcccactagtggtgtggtttccttagtgggaaaactcacccaaaagcattatggcttgcacaggttggtggtgcaagtgaatgacagtgggcagccttcccagtccaccacgactctggtgcacgtgtttgtcaatgaaagtgtttctaatgcaactgcgattgactcccagatagctagaagtttgcacatcccactcacccaggatatagctggtgacccaagctatgaaattagcaaacagagactcagtattgtcattggcgtggttgctggcattatgacggtgattctaatcatcttaattgtagtgatggcaaggtactgcaggtccaaaaataaaaatggctatgaagccggcaaaaaagatcacgaagacttttttacaccccaacagcatgacaaatctaaaaagcctaaaaaggacaagaaaaacaaaaaatctaagcagcctctctacagcagcattgtcactgtggaggcttctaagccaaatggacagaggtatgatagtgtcaatgagaagctgtcagacagcccaagcatggggcgatacaggtccgttaatggtgggcccggcagtcctgacctggcaaggcattacaaatctagttccccattgcctactgttcagcttcatccccagtcaccaactgcaggaaaaaaacaccaggccgtacaagatctaccaccagccaacacatttgtgggagcaggagacaacatttcaattggatcagatcactgctctgagtacagctgtcaaaccaataacaagtacagcaaacaggtaagatgtatcccaaatatatttaaatatcccagggagggctaataactctgagacagattatcttctgtaaagttttgtcttctcgtttttaaagttattaaaattttaacagtaggaatttaatgttaatttttgcaccattaatttagcaaaggccatctacaagaggtataccactgtattttgcaaattagaattaaggttcactaaactactgaaagaagtattcagagtaggcagtgtttggcagttctctttgcacttgacatccctaattcatactacatttttttgtttccagaataaatatgtgtgtattacttagatggttagttttcacctgaaattattttcttctgtggcaactaagtggataattacatccagagaaaaagtttctaaagttactactggtgtctatgcaaattggattccatagaagttttagctatgttatttacaatgcaggattttacagataaatagatgctgattcatgcagatgtagtactaagtctgagatattgaaatactgactactttgatgaaactgctggtttaaaaatatttactgatatgcaaatgtcatgcaaaactccactttcaatcttttatatctataataatcgatacctataacaattagtgttctataatgatatgcaattaccatttgcattctttctgtttggtattaaaagtttgcaaacaaaaatacattgcatgagccatttat

SEQ ID NO: 502 - protein, 1072 aa, Homo sapiens
MLRMRTAGWARGWCLGCCLLLPLSLSLAAAKQLLRYRLAEEGPADVRIGNVASDLGIVTGSGEVTFSLESGSEYLKIDNLTGELSTSERRIDREKLPQCQMIFDENECFLDFEVSVIGPSQSWVDLFEGQVIVLDINDNTPTFPSPVLTLTVEENRPVGTLYLLPTATDRDFGRNGIERYELLQEPGGGGSGGESRRAGAADSAPYPGGGGNGASGGGSGGSKRRLDASEGGGGTNPGGRSSVFELQVADTPDGEKQPQLIVKGALDREQRDSYELTLRVRDGGDPPRSSQAILRVLITDVNDNSPRFEKSVYEADLAENSAPGTPILQLRAADLDVGVNGQIEYVFGAATESVRRLLRLDETSGWLSVLHRIDREEVNQLRFTVMARDRGQPPKTDKATVVLNIKDENDNVPSIEIRKIGRIPLKDGVANVAEDVLVDTPIALVQVSDRDQGENGVVTCTVVGDVPFQLKPASDTEGDQNKKKYFLHTSTPLDYEATREFNVVIVAVDSGSPSLSSNNSLIVKVGDTNDNPPMFGQSVVEVYFPENNIPGERVATVLATDADSGKNAEIAYSLDSSVMGIFAIDPDSGDILVNTVLDREQTDRYEFKVNAKDKGIPVLQGSTTVIVQVADKNDNDPKFMQDVFTFYVKENLQPNSPVGMVTVMDADKGRNAEMSLYIEENNNIFSIENDTGTIYSTMSFDREHQTTYTFRVKAVDGGDPPRSATATVSLFVMDENDNAPTVTLPKNISYTLLPPSSNVRTVVATVLATDSDDGINADLNYSIVGGNPFKLFEIDPTSGVVSLVGKLTQKHYGLHRLVVQVNDSGQPSQSTTTLVHVFVNESVSNATAIDSQIARSLHIPLTQDIAGDPSYEISKQRLSIVIGVVAGIMTVILIILIVVMARYCRSKNKNGYEAGKKDHEDFFTPQQHDKSKKPKKDKKNKKSKQPLYSSIVTVEASKPNGQRYDSVNEKLSDSPSMGRYRSVNGGPGSPDLARHYKSSSPLPTVQLHPQSPTAGKKHQAVQDLPPANTFVGAGDNISIGSDHCSEYSCQTNNKYSKQVRCIPNIFKYPREG

SEQ ID NO: 503 - DNA, 8561 bp, Homo sapiens
gaatgcaggtgagaaaaggcacggactctgcggctgcgaacccaaacttgggcaccgcacggtgcgcactgctcagccttcgcccccgtgggcgaaaggctgctgcggtttcaggcggctgcttcgtgactaatgaccttgcgcagagttgttaagaaaaaagagaaacccgcgctctccggggtgagaagggactgactctgggcgtctctgaagatggctcgggcttctctttggcgcgccggggggaccctgacactgaccgctctgtgacgcgagtagtctcccctgcaccgtgcccgaagcgacgtgccgggggatttttcattctcgatctgttgactggctcccccgctgcatgagcagagtcggagttgagactggcttgttgctggccccagcgcctggtgcaggaagcgactcacgtttgtctgggtggccggagccggagcagagcctgggtttggagtgagtgcctggaacgtgaattggactcaactcgagtagcagcaaagaccagcgggctggcaggcgggggaggctgcaggctcattccccacctcttcccagccccactgcccgtctgccggagcggttctggccccttccgacagagcggggactagagccggggattctccgcccgctgaggggatgactctgggttgggggagcgccgaacccgcggcgcgcagtgtcccgtgaactgtgagtactgcgactgaacggcggcaggcgagcgggcgattagcacccattgcatgaattatgaaacaataactttcggaagaagcaggaggaaaaaaagaagcatctatcgctgccctcccacccccattcccggccaactctccacgccgcttttgccccctccctcccctccctctcgctccttcctttccgggagaggggagaggactcgggggagggcaggcggccggccccggaggaggggggcgccgagggggctgtggttagaaggagcagtagcagcagcagcaggagaagatgctgaggatgcggaccgcgggatgggcgcgcggctggtgcttgggctgctgcctcctcctgccgctctcgctcagcctggcggccgccaagcagctcctccggtaccggctggccgaggagggccccgccgacgtccgcatcggcaacgtggcttcagacctgggcatcgtgaccggatcgggtgaggtgactttcagcctggagtccggttccgagtacctgaagatcgacaacctcactggcgagctgagcacgagcgagcggcgcatcgaccgcgagaagctgccccagtgtcagatgatcttcgacgagaacgagtgcttcctggacttcgaggtgtcggtgatcgggccctcgcagagctgggtggacctgtttgagggtcaggtcatcgtgcttgacatcaacgacaacacgcccaccttcccgtcgcccgtgctcacgctcacggtggaggagaatcggccggtgggcacactttacctgctgcccacagccaccgaccgcgacttcggccgcaacggcatcgagcgctacgagctgctccaggagcccggaggcggcggcagcggcggcgagagccggcgcgccggggcggccgacagcgccccctaccccgggggcggcgggaacggcgcgagcggcggcggctcgggaggctccaagcggcggctggacgcatcagagggcggcggcggcaccaaccccggcggccgcagcagcgtgttcgagctgcaggtggcggacaccccggacggcgagaagcagccgcagctgatcgtgaagggcgtgtacgaggccgacttggctgagaacagcgccccggggacccccatcctgcaactgcgcgcagccgacttggacgtgggggtcaacgggcagatcgaatacgtgttcggggcggccaccgagtcggtgaggcggctgctgcgccttgacgagacgtccggctggctcagcgtcctgcaccggatcgaccgcgaggaggtgaaccagctgcgcttcacggtcatggcccgcgaccgcgggcagccccccaagaccgacaaggccaccgtggtccttaacatcaaagacgagaacgacaacgtgccgtccattgaaatccgcaagattgggcgcatccccctcaaggacggggtggccaacgtggccgaggacgttctggtcgacacccccatcgctctggtgcaggtgtccgaccgagaccaaggcgagaacggggtggtcacctgcaccgtggtgggcgacgtgcccttccagctcaagccagccagcgacaccgagggcgaccagaacaagaaaaagtacttcttgcacacctcgacccctctggactatgaggccacccgggagttcaacgtggtcatcgtggcggtggactcaggcagccccagcctctcgagcaacaactccctgattgtcaaggtgggagacaccaacgacaacccgcccatgttcggccagtcggtggtggaggtttacttccctgagaacaacatcccgggcgagagggtggccacggtgctggcgacagacgcagacagcggtaagaacgccgagatcgcctactcgctggactcctctgtgatggggatctttgccatcgatcccgattctggggacatcctggtcaataccgtgctggaccgcgagcagactgacaggtatgagtttaaagttaacgccaaagacaaaggcatccccgtgctgcagggcagcactacggtgattgtgcaggtggctgataaaaatgacaatgaccctaagtttatgcaggacgtcttcaccttttatgtgaaagaaaacttgcagcccaacagccctgtggggatggtcaccgtgatggatgctgacaaggggcggaatgcagagatgagcctgtacatagaggagaacaataacattttttctattgaaaatgacacggggaccatttactccacaatgtcttttgaccgggaacatcagaccacatacactttcagagtcaaggctgtggatgggggagatcctcccagatctgccacagctacagtctcgctttttgtgatggatgaaaatgacaatgctcccacagttacccttcccaaaaacatttcctacactttactgccaccttcgagtaatgtcaggacagtagtagctacagtgttggcaacagacagtgatgatggcatcaatgcagacctgaactacagcattgtgggaggaaatcccttcaagctgtttgaaattgatcccactagtggtgtggtttccttagtgggaaaactcacccaaaagcattatggcttgcacaggttggtggtgcaagtgaatgacagtgggcagccttcccagtccaccacgactctggtgcacgtgtttgtcaatgaaagtgtttctaatgcaactgcgattgactcccagatagctagaagtttgcacatcccactcacccaggatatagctggtgacccaagctatgaaattagcaaacagagactcagtattgtcattggcgtggttgctggcattatgacggtgattctaatcatcttaattgtagtgatggcaaggtactgcaggtccaaaaataaaaatggctatgaagccggcaaaaaagatcacgaagacttttttacaccccaacagcatgacaaatctaaaaagcctaaaaaggacaagaaaaacaaaaaatctaagcagcctctctacagcagcattgtcactgtggaggcttctaagccaaatggacagaggtatgatagtgtcaatgagaagctgtcagacagcccaagcatggggcgatacaggtccgttaatggtgggcccggcagtcctgacctggcaaggcattacaaatctagttccccattgcctactgttcagcttcatccccagtcaccaactgcaggaaaaaaacaccaggccgtacaagatctaccaccagccaacacatttgtgggagcaggagacaacatttcaattggatcagatcactgctctgagtacagctgtcaaaccaataacaagtacagcaaacagccatttcgtagagtgacgttttctgttgtgagtcagcctcaggacccacatcaggggtcactgcagagttgctatgacagcgggctggaggagtcagaaacaccaagcagtaagagttcatcagggccaagactgggtgcgcttccactcccagaggacaactatgaaaggaccacgccggatggcagtgttgattcaaggcctcttccagatgtagccctgactgggaagtgcactcgtgagtgtgatgagtatggccactcagactcctgctggatgccggtccgcacttctccggagaggaagaagagccagcctaaactgtccactttcatgcctgttgatgaacgaggaagccaggaaaagctggccaatggggaggccgccatcatgggtgaccgcaacagaaacctcctgaacaaaaagttgacctcatcctatgagaccttcagtgcagctagtttcagcaaaaatgaggaagccaaccctgaggatattccccttacaaaaacaggggaatataagccatctcctgtcaatactctcactagaagagaagtttacctgtaggctataaaggagcaacagcaaagttctttacatgtatgaaaaggagaataaggggcaaaaaccttacaaagcaaaacgtttaatcacaaagagggggctaccaaagagacaaagctttgcctgccacttctgcctccagatcaggcctttagtgatactgttagcctgattctactgtacaatgtagaaaccatccttgttacttgcatgtctaaccccttcactgattcccaacactcactttctcttccccacccctctccaaaaaaaaaaaaacaaaaagaaaagaaaaaaaaagggggatagttgcaagtttctttcacagtaactgtacgaagcctgattagcagaacacaacacaccctcattatccctaagctgaagcatgattttagtcactttgattttgttcgagtgtcatctggctggtcaaaaataagcaggacagataaaatgtatttcagacataccatcagaaaatggtttatcaccatcaaaggcaatcctttgaaagtgatagagtccctctaaaggtacagtccttagaaagagggactgtattaaaaagtattttgggaatatcaaagctttaatattccaacaaagactaagagaaaaacaatactcagtgggtgattgcagtcctaaattgtcatatgttgttattttcaggtcaagagcatcaacttcaattccatacattcaccaaatattctcagtatacacacagtcttgattacatgtatcaatttcaccagttatgacttctaaaaattatatatattttttcagaacaagaccactattattaactaacttgaacaattgtatcatccaaaggccaaagatcatatggcagatcagggaagtcatgaagttgatttggtcttgacgtggaaaaccattaaacaacaaaagcaactgaacccatgtatgcacagaaacaatcaaacactagttcattttatagtgcccaggaaaatgttccttcttttaaaatggattttatttgaaagcgcagaaaatgaaaactagtgagatatatttttggtattataataggcaattggttgaggttcaagtttagtttcaggtaatattatcagggaagattccatgttttaaaatagtatttatggatcatgggtaggttaagaaagatgcattggcatatagtcttgatagttaagtccacgattatcattttagaatccaggctatgcttgctgctctttttatccacattttaaattacaattgcattttttacttgttcagtgcacactttgatgcaccacaagtgcattaattttgaatcgtgtgcaatatagaaatattttgagactcacaacattgaaacaaggtgacaccctagttgactttatcactaatgtgatttgaacattatttaaacaaatctagactgaacatgaaagaaaggagttttgggcagtgacatttttcacagaatgtatatctcaaaggtgaaagcagagtttttccagtgcaataaaaagaaacagaatatgcagattttgagctactcactctatagaggataacctaacacggctgaaaattgagctgggacattcagacgaaagtgacaatccatggacagaatagggaataacaggtgtgaagagaacaaacttatcactgaatgtttgcaagctggttaaggcatagccttgatggctctctagcaaactgtagaaacaatgtagctttgggtagtttcatgctttgcagaatttcttagactataaagtgacacagcctggaatataggttgataattcactataggtcttcaaaatacttatctttgaaaaccgcttctctgtttggtggggtacaatttgggggtcatttccttatgctctttcttaaatggagttttcattttgatgttagtttatgtataataggtaggatgcaaaaagatatgtaattgaaacaaaaaacattggactaaaatatcagtaattgaacatgtttatgtttgattattatttacactatggaaagatgcaattctagtactttgttaggaaactgcattaaagcagttctgccttgtataatctgtaagtacctattaagacaaaatacttctaaagatacttatgaaatgtatacacattttttcttgcacgttacaaagaaaatactcaattgcataacacggatgtttgacaaacttttttttttttaatgcatttctttctttcatgagacattgaaaccactgatagctcatttcaccctatcttaaacccttctcttgtctataaaactaatacgggtcacaccggaccttcggattaattggatccacattccccaatgatgtttgcaccccattcaagatagccatgccattgtcatttaactcgtgaacctctctttaaaactaaaatggatgtgaaagaataaaattcagtgtactgtaagtattcacagtaattctagtagaattagctgtcataacatgtttattatataatgagctggcatgacacagaaatatattttgtgtttgtatgacttttattttaaataggttaaatctggtgccactccatatatagagtgcttttgaaaaaaaatcaataaaaagaaacaaaaaaaataaatgagtgaatgcaaaataagcaactgtgccttttatacctgttgttacggtaaaaaaacggttgttgggtttggacaatgaggggaaatgggctattcccaacttttttgatcctgtatatttgtccatgtttattttctgaacataataaataatatattaaaaatttgccttctgacaaactcagataatggaccagtcttaaatattgttatgtcataaagcaaagttaaggcattaatatgggctgcttaaatctgactagaagatgaaagcgtttattgtaagtgtaacacagagatactatcaggagtgaaatcagtccatttggcaaggtaaaatactgatttagagttttattctttatttcttttttgttgtgtttctttcagctatggtttcattttggttgtacagtatataaaccatatttgttttctgtacacaagactctcaagtgaattttgcatgcattatacattaggacacatttataaattaatgagtaactatataaatttatgtgtattaaaacgtctgtagcttcaatctaaaatctactgctctttctgaatctccagatatcatttctgtatggtttctgactggcctgctgcctgagtttcagaaaacaagggaggcattatttttatgggaggaggaactaagatggtactgaggatgtctgactgaaacactaccctaggaagctgtcttgtaggaaaatagaataaaacacacagaccagaagaaattgtcaagaagcaaacagccatccaaaaacagtcatgagaaatctaaagacctaaataatcttaggtatatgctctcagtgagaaataagaaaatgtgtccttaagcaaaaataaataaataaataaataaataaataaataataaaaagtgagcatgatcatgaatatagtaaatcttgtgagttgtgacctaggtgaaggtgtaatgataacatctggaggaagcatcatttgttcagctacctagggtttactttcagacttttcctacagtttaaagcacttgcgttcagtgtggtacgatctgtttgtaatgttaatcattgactattgttctgctacttggatgttgatagtgaagcagagaacaatttatcatcgtttattatgagtcactatgcacgcaactatgcttaacatggcgaaatgtattaaacactcgtccaactatttatgaaatactttgcataatttaatttgcttttgtacagttttatgtaaataaattgcttgtcatttttgtctctgcaaattaaaatataacatggtcaaatggt

SEQ ID NO: 504 - protein, 1200 aa, Homo sapiens
MLRMRTAGWARGWCLGCCLLLPLSLSLAAAKQLLRYRLAEEGPADVRIGNVASDLGIVTGSGEVTFSLESGSEYLKIDNLTGELSTSERRIDREKLPQCQMIFDENECFLDFEVSVIGPSQSWVDLFEGQVIVLDINDNTPTFPSPVLTLTVEENRPVGTLYLLPTATDRDFGRNGIERYELLQEPGGGGSGGESRRAGAADSAPYPGGGGNGASGGGSGGSKRRLDASEGGGGTNPGGRSSVFELQVADTPDGEKQPQLIVKGVYEADLAENSAPGTPILQLRAADLDVGVNGQIEYVFGAATESVRRLLRLDETSGWLSVLHRIDREEVNQLRFTVMARDRGQPPKTDKATVVLNIKDENDNVPSIEIRKIGRIPLKDGVANVAEDVLVDTPIALVQVSDRDQGENGVVTCTVVGDVPFQLKPASDTEGDQNKKKYFLHTSTPLDYEATREFNVVIVAVDSGSPSLSSNNSLIVKVGDTNDNPPMFGQSVVEVYFPENNIPGERVATVLATDADSGKNAEIAYSLDSSVMGIFAIDPDSGDILVNTVLDREQTDRYEFKVNAKDKGIPVLQGSTTVIVQVADKNDNDPKFMQDVFTFYVKENLQPNSPVGMVTVMDADKGRNAEMSLYIEENNNIFSIENDTGTIYSTMSFDREHQTTYTFRVKAVDGGDPPRSATATVSLFVMDENDNAPTVTLPKNISYTLLPPSSNVRTVVATVLATDSDDGINADLNYSIVGGNPFKLFEIDPTSGVVSLVGKLTQKHYGLHRLVVQVNDSGQPSQSTTTLVHVFVNESVSNATAIDSQIARSLHIPLTQDIAGDPSYEISKQRLSIVIGVVAGIMTVILIILIVVMARYCRSKNKNGYEAGKKDHEDFFTPQQHDKSKKPKKDKKNKKSKQPLYSSIVTVEASKPNGQRYDSVNEKLSDSPSMGRYRSVNGGPGSPDLARHYKSSSPLPTVQLHPQSPTAGKKHQAVQDLPPANTFVGAGDNISIGSDHCSEYSCQTNNKYSKQPFRRVTFSVVSQPQDPHQGSLQSCYDSGLEESETPSSKSSSGPRLGALPLPEDNYERTTPDGSVDSRPLPDVALTGKCTRECDEYGHSDSCWMPVRTSPERKKSQPKLSTFMPVDERGSQEKLANGEAAIMGDRNRNLLNKKLTSSYETFSAASFSKNEEANPEDIPLTKTGEYKPSPVNTLTRREVYL

SEQ ID NO: 505 - DNA, 7360 bp, Homo sapiens
gcggccgccgccaggcagcagaggcgactgcggacagccggcggggaccgggaaagaggaggcctggcgcctccggcagaggggcgaggaccgagcgcccaaggctgggagagacgccggcgctgagcttcccagcgccgcctcacctcgcttttcgaactccgcgacccgagcgcaaggcttaagcaggtaaagcagtcactgtgaagaaaataacattttaagaaacttttctgtcacaattgatagaggaaaagccagtagagaagtacatcttcttgtgtgtgtgtctcatcgtgccactttttgtaactcagcttagtaatgaagccaccattatgtcctcagtcagtgaagtaaatgtggatataaaagatttcctaatgagcattaatttggagcagtatctcttacatttccatgagtctggttttactactgtgaaggactgtgcagcaataaatgacagcctgctgcagaaaattggaatatcacctacaggtcaccgtaggaggatacttaaacagttacagataatcttgtcaaaaatgcaagatattccaatatatgcaaatgttcataaaactaagaagaatgatgacccttcaaaggattaccatgttccatcttctgatcagaatatctgcatagaactttccaattctggtagtgttcagacatctagcccaccgcagttggagactgttagaaaaaatcttgaagacagtgatgcaagtgtggaaagaagccagtatcctcaatcagatgataagctgtctcctcctaaacgcgacttccccactgcagaggaaccacacctgaatttgggttctttgaatgattctttatttggtagtgacaatattaaaatagaatcattgattacaaagaagactgtggatcacacagttgaagaacaacaaacagaaaaagttaaattgatcacagaaaatctcagtaagctccctaatgcagactctgaatgcctttcttttgttggctgttcaacatcaggaacaaattctggaaatggaacaaatggtttattagaaggatcaccaccatccccattctttaagtttcaaggagaaatgattgtaaatgacttgtatgttccatcatcaccaatcctagcacctgtgagaagtcgtagcaagttggtttcaagaccatctcgatcttttctgctaagacatcgacctgtaccagagattccagggtcaacaaaaggagtttctgggagctatttccgtgaaagaagaaatgttgctacctcaactgaaaaatctgtggcatggcaaaattcaaatgaggagaattcatcttccatctttccttatggagagacctttctcttccagagactagaaaattccaagaagcgatctataaagaatgaatttttgacccagggagaagcactcaaaggggaagcagctactgcaacaaactcttttatcatcaaatcaagcatatacgataacagaaaggagaaaataagcgaggacaaggtggaagatatttggatacctcgagaggacaaaaacaattttttgatagacactgcttctgaatcagaatactcaacagtagaagaatgctttcagagtttaagaagaaaaaattcaaaggcatctaaatctaggactcaaaaagccttgattttggactccgttaataggcacagttatccgttaagctcaacaagtggaaatgctgattcatcagccgtttcttcacaggcaatatctccctatgcctgcttttatggagcatctgcaaagaaggttaaatcaggatggctggataaactctctcctcaaggaaaacgcatgtttcaaaagagatgggtgaaatttgatggccttagcatttcttactacaataatgagaaggagatgtattcgaaaggaataattcccctttctgctatatcaacagtacgagttcaaggagacaacaaatttgaagttgttacaacacaaagaacttttgtttttagagtagaaaaagaagaggagagaaatgactggatcagcatactattaaatgcactgaaatcacaatcccttacctcgcagtctcaagctgttgttacacctgagaaatgtggatatcttgaattgagaggctataaggcaaaaatttttactgtgttaagtggaaacagtgtgtggctttgcaaaaacgaacaggattttaagagtggacttggtattaccataattcctatgaatgtagcaaatgtaaagcaagtggaccgaactgtgaaacaatcttttgaaataatcactccctacaggagtttcagctttacagccgagactgaaaaggagaaacaagactggattgaagctgtgcagcaatcaatagcagaaactctctctgattatgaagtagctgagaagatttggttcaatgaatccaacaggagctgtgcagattgtaaagccccagatcctgactgggcatccatcaatctctgtgttgtcatctgtaagaagtgtgcaggacagcatagatctttaggaccaaaagattccaaggttagaagtctaaaaatggatgctagcatttggagcaatgaactcatcgagctttttattgtcattggaaacaaaagagcaaatgacttttgggctggtaatcttcaaaaggatgaagaattacatatggactcaccagtagaaaagagaaaaaactttattactcagaaatataaagaaggaaaattcagaaaaactcttttggcatctctcaccaaagaagaattaaataaggctctatgtgctgctgtagtgaaaccggatgttctagaaacaatggctttgctgttcagtggagcagatgtcatgtgtgccaccggagaccccgtgcatagcaccccctatctgctagccaagaaagctgggcaaagtctgcaaatggaatttctctaccataacaaattctcagatttccctcaacatgatattcattccgagggtgtattaagtcaagagtcttcccagtccacattcctctgtgactttttatatcaagctccttctgctgcttctaaactctcttcagagaaaaaactgcttgaagagacaaataaaaaatggtgtgttttggaaggaggcttcttgagttactatgaaaatgataagtctaccacacctaatggcaccattaatatcaatgaagttatctgcctggctatacacaaagaggacttctatttaaatactgggcccatctttatctttgagatctacttaccctccgaacgtgtgtttttatttggagctgaaacatctcaagctcaaagaaaatggacagaggcaatagccaagcattttgttcccttatttgctgaaaacttaacagaagctgactatgatttgattggtcaactcttctacaaagactgccatgccctggatcagtggagaaaaggctggtttgctatggacaaatccagcttgcatttttgccttcaaatgcaagaagttcagggagatagaatgcacttaagaagactgcaagagctaacaatcagcacaatggttcaaaatggggaaaaactggatgttttactcttggtagaaaaagggagaacattatacatccatgggcataccaagttggatttcacagtctggcatactgcaattgaaaaagcagcaggtacagatggtaatgctttacaagatcagcagctcagcaaaaatgacgttcccattatagtgaacagctgtatagcatttgttacacagtatggtttaggatgcaaatatatctatcaaaagaatggtgatcctttgcatataagtgaactcctggagagtttcaaaaaggatgcaagaagctttaaattgagggctggaaaacatcagcttgaagatgtgacggctgtgttgaaaagttttctctctgacattgatgatgcactgcttactaaggagctctacccatattggatctctgctttagatacgcaagatgacaaggaaagaattaaaaaatatggagcatttatacgttctcttccaggggtcaaccgagcaacactagcagctatcattgaacacctgtatagggttcagaaatgctcagaaatcaatcacatgaatgcccataatttggccttggtcttttcatcctgtttgtttcaaacgaagggacaaactagtgaagaagtgaatgtaattgaggacctaattaataattatgtagaaatatttgaggttaaagaagatcaagtcaaacaaatggacatagaaaatagctttattaccaagtggaaagacacccaagtttcccaggctggagatttgttaattgaagtatatgtagaaaggaaggaacccgactgtagtattataattcggatatctcctgtgatggaagcagaagaattaactaatgatatattagcgataaaaaatattattcctacaaaaggtgatatttgggccacatttgaagtcattgaaaatgaagagctagagcgtcctcttcactacaaggaaaatgtactggagcaggtgcttcggtggagttcattagctgaacctggctctgcttacctggtggtgaagagattcttaaccgctgacacaattaaacactgcagtgaccggagtacactgggaagcatcaaagaaggaatcttgaaaatcaaagaagaaccatccaaaatactatctggaaataagtttcaagaccggtattttgttttacgagatgggtttctctttctttacaaggatgtgaagagtagtaaacatgacaagatgttttctctcagttccatgaagttttatcgtggagtgaaaaagaaaatgaagcctccaacaagctggggattgaccgcatattctgagaaacatcactggcacctgtgttgtgatagttcacgaactcagacggagtggatgaccagtatctttattgcccagcatgaatatgatatatggccaccagctggaaaggaacgaaaacgttcaataaccaaaaatcccaaaattggaggtttgcctctgattcctatacagcatgaggggaatgcaaccttggcccggaaaaatattgagagtgcaagagcagaacttgaaaggctgcggctcagtgaaaagtgtgataaagagtccgtggactctagcttaaaggagagagcttccatggtggcccactgcctggagcacaaggacgataaacttcgaaatcgaccccgaaaacatcggagtttcaactgcctggaggacacagagcctgaagccccacttgggcaaccaaaaggccataaaggcctaaagacattgaggaagactgaggacaggaatagcaaagctactttggactctgatcataagttaccatcaagggtaattgaagaacttaatgtggttctacaacggtcaagaacccttccaaaagaattacaggatgagcagattttgaagtaggaaataaaatgaattgctccccagattatttttttaatattgtatgcaatctttatgtgtaactccaaaactgaactataagataattcataagaatttgcctattgataggcaaatttgtctatgcttaggcatttaaggagcatttaaaaatatgtatatatgtgactgaatgtaagattaactttattttggtctgaacaaaccttgtaaagttccattgtattaacgtgtgtaagaagacattgggttacttaggtggtcagtccttttaaagtagttgtctgttaagtggtataatttatgagcagaaatctcaaactgtactgtattgtataaaatgctgtgtttaaatgaagcctaagaaactatctgtaacatattttgcactttgagaaaccttgtatattaaattaccatatgtttttaggtttacagaagttctaccttagggaaaagaaagggaagtaaattgaaaaaggggggagaatttattgtagtggctgcctaaaaaccactggagtttttaaaagaagcaaggagttaaatgtcctgcaaaacaaggaagtgagctaagattcattctagttcactaatgaccagaacttgtcaatgagaaaccacttgttaagaaaaagtccagtgtttatttctcaagagtaatattcggccaacagatgtaaataatagcactagccactcttattaatatttatagtgttagaaaaccagccacattacagattcactacgtttgagctcattgttggtggctgctaagaggaaacttacactgcattggagaggttgtgtacacaggacctggcctggatgctgattgcactgtcattgtatgcaagcattttgtcttttttcagaatttctgactatacttttggtacgaacaaaattcatcaccacagggtcctgttgttttgtttgatttttagatttttttaaattattattaaggttgtaatgtttttctccgagttgtcagaaataactggaagaatacaatatatggccattatggagccaggggctagttggtggtttactatacatttgggggctacctggtcacatttaatctaggtttttttttctttttttaagtaaaggtgtggtctcttccctgtacttatgaataaggacaaagccctatttttgtttccacataaagatcagctactgaattggtgaatttcctgacagacaatgctatctaaccatagttcatgttaggggaagcatttttccatcagtttctttaaaattggattgtctggtgagttttgatattaaacattatgtagctaagttttttttttttagcatttcttttttatttttcaatctatattcacaggcccatacttcagtcagtccaatcatagtacagtgatgtggtggtagatgctatgaatttcttcattgtaaaatacggatcatttgtattttggggtgataaaatagttcaccatgggtatgagatatttattctttaaatcaaagtaaattagaatttttaaaaagcacaaaactgcaggacagtttatgaaataggtggcactattagggaatcttcctttaaagcaagaaatcatgttatttagaaagaaaaactaatcttaaacatactatttctaataaatatttatatttttatgaaataaagaggtatgtggaaattaatatttggtgatgttggacagtggaaaagtatctagagtttttacctgccttatctgaattcttcttgaaacttgagcttaaactctaatagctgtttccctttctattctgaacaactgtctccatttttcaagtgtgagagataagggctaatgatgacatctcatttattttgagtaaacattaaaattgttttacaagtctacttg

SEQ ID NO: 506 - protein, 1704 aa, Homo sapiens
MSSVSEVNVDIKDFLMSINLEQYLLHFHESGFTTVKDCAAINDSLLQKIGISPTGHRRRILKQLQIILSKMQDIPIYANVHKTKKNDDPSKDYHVPSSDQNICIELSNSGSVQTSSPPQLETVRKNLEDSDASVERSQYPQSDDKLSPPKRDFPTAEEPHLNLGSLNDSLFGSDNIKIESLITKKTVDHTVEEQQTEKVKLITENLSKLPNADSECLSFVGCSTSGTNSGNGTNGLLEGSPPSPFFKFQGEMIVNDLYVPSSPILAPVRSRSKLVSRPSRSFLLRHRPVPEIPGSTKGVSGSYFRERRNVATSTEKSVAWQNSNEENSSSIFPYGETFLFQRLENSKKRSIKNEFLTQGEALKGEAATATNSFIIKSSIYDNRKEKISEDKVEDIWIPREDKNNFLIDTASESEYSTVEECFQSLRRKNSKASKSRTQKALILDSVNRHSYPLSSTSGNADSSAVSSQAISPYACFYGASAKKVKSGWLDKLSPQGKRMFQKRWVKFDGLSISYYNNEKEMYSKGIIPLSAISTVRVQGDNKFEVVTTQRTFVFRVEKEEERNDWISILLNALKSQSLTSQSQAVVTPEKCGYLELRGYKAKIFTVLSGNSVWLCKNEQDFKSGLGITIIPMNVANVKQVDRTVKQSFEIITPYRSFSFTAETEKEKQDWIEAVQQSIAETLSDYEVAEKIWFNESNRSCADCKAPDPDWASINLCVVICKKCAGQHRSLGPKDSKVRSLKMDASIWSNELIELFIVIGNKRANDFWAGNLQKDEELHMDSPVEKRKNFITQKYKEGKFRKTLLASLTKEELNKALCAAVVKPDVLETMALLFSGADVMCATGDPVHSTPYLLAKKAGQSLQMEFLYHNKFSDFPQHDIHSEGVLSQESSQSTFLCDFLYQAPSAASKLSSEKKLLEETNKKWCVLEGGFLSYYENDKSTTPNGTININEVICLAIHKEDFYLNTGPIFIFEIYLPSERVFLFGAETSQAQRKWTEAIAKHFVPLFAENLTEADYDLIGQLFYKDCHALDQWRKGWFAMDKSSLHFCLQMQEVQGDRMHLRRLQELTISTMVQNGEKLDVLLLVEKGRTLYIHGHTKLDFTVWHTAIEKAAGTDGNALQDQQLSKNDVPIIVNSCIAFVTQYGLGCKYIYQKNGDPLHISELLESFKKDARSFKLRAGKHQLEDVTAVLKSFLSDIDDALLTKELYPYWISALDTQDDKERIKKYGAFIRSLPGVNRATLAAIIEHLYRVQKCSEINHMNAHNLALVFSSCLFQTKGQTSEEVNVIEDLINNYVEIFEVKEDQVKQMDIENSFITKWKDTQVSQAGDLLIEVYVERKEPDCSIIIRISPVMEAEELTNDILAIKNIIPTKGDIWATFEVIENEELERPLHYKENVLEQVLRWSSLAEPGSAYLVVKRFLTADTIKHCSDRSTLGSIKEGILKIKEEPSKILSGNKFQDRYFVLRDGFLFLYKDVKSSKHDKMFSLSSMKFYRGVKKKMKPPTSWGLTAYSEKHHWHLCCDSSRTQTEWMTSIFIAQHEYDIWPPAGKERKRSITKNPKIGGLPLIPIQHEGNATLARKNIESARAELERLRLSEKCDKESVDSSLKERASMVAHCLEHKDDKLRNRPRKHRSFNCLEDTEPEAPLGQPKGHKGLKTLRKTEDRNSKATLDSDHKLPSRVIEELNVVLQRSRTLPKELQDEQILK

SEQ ID NO: 507 - DNA, 4816 bp, Homo sapiens
atcatagcaaccaaacaatgaattgagacctggaggtcttgggttgtaatttaaattcacataaaccaggccttttgtgcctattgcctaattcatggcataattattattagccgccttaggataaaaggaatacagactttatcccatacatgaaattatcagactttcactcattttaatagctagaatcttattttctttccttaagatgtatattttcttttaatgaccaggctctatgtgctgctgtagtgaaaccggatgttctagaaacaatggctttgctgttcagtggagcagatgtcatgtgtgccaccggagaccccgtgcatagcaccccctatctgctagccaagaaagctgggcaaagtctgcaaatggaatttctctaccataacaaattctcagatttccctcaacatgatattcattccgagggtgtattaagtcaagagtcttcccagtccacattcctctgtgactttttatatcaagctccttctgctgcttctaaactctcttcagagaaaaaactgcttgaagagacaaataaaaaatggtgtgttttggaaggaggcttcttgagttactatgaaaatgataagtctaccacacctaatggcaccattaatatcaatgaagttatctgcctggctatacacaaagaggacttctatttaaatactgggcccatctttatctttgagatctacttaccctccgaacgtgtgtttttatttggagctgaaacatctcaagctcaaagaaaatggacagaggcaatagccaagcattttgttcccttatttgctgaaaacttaacagaagctgactatgatttgattggtcaactcttctacaaagactgccatgccctggatcagtggagaaaaggctggtttgctatggacaaatccagcttgcatttttgccttcaaatgcaagaagttcagggagatagaatgcacttaagaagactgcaagagctaacaatcagcacaatggttcaaaatggggaaaaactggatgttttactcttggtagaaaaagggagaacattatacatccatgggcataccaagttggatttcacagtctggcatactgcaattgaaaaagcagcaggtacagatggtaatgctttacaagatcagcagctcagcaaaaatgacgttcccattatagtgaacagctgtatagcatttgttacacagtatggtttaggatgcaaatatatctatcaaaagaatggtgatcctttgcatataagtgaactcctggagagtttcaaaaaggatgcaagaagctttaaattgagggctggaaaacatcagcttgaagatgtgacggctgtgttgaaaagttttctctctgacattgatgatgcactgcttactaaggagctctacccatattggatctctgctttagatacgcaagatgacaaggaaagaattaaaaaatatggagcatttatacgttctcttccaggggtcaaccgagcaacactagcagctatcattgaacacctgtatagggttcagaaatgctcagaaatcaatcacatgaatgcccataatttggccttggtcttttcatcctgtttgtttcaaacgaagggacaaactagtgaagaagtgaatgtaattgaggacctaattaataattatgtagaaatatttgaggttaaagaagatcaagtcaaacaaatggacatagaaaatagctttattaccaagtggaaagacacccaagtttcccaggctggagatttgttaattgaagtatatgtagaaaggaaggaacccgactgtagtattataattcggatatctcctgtgatggaagcagaagaattaactaatgatatattagcgataaaaaatattattcctacaaaaggtgatatttgggccacatttgaagtcattgaaaatgaagagctagagcgtcctcttcactacaaggaaaatgtactggagcaggtgcttcggtggagttcattagctgaacctggctctgcttacctggtggtgaagagattcttaaccgctgacacaattaaacactgcagtgaccggagtacactgggaagcatcaaagaaggaatcttgaaaatcaaagaagaaccatccaaaatactatctggaaataagtttcaagaccggtattttgttttacgagatgggtttctctttctttacaaggatgtgaagagtagtaaacatgacaagatgttttctctcagttccatgaagttttatcgtggagtgaaaaagaaaatgaagcctccaacaagctggggattgaccgcatattctgagaaacatcactggcacctgtgttgtgatagttcacgaactcagacggagtggatgaccagtatctttattgcccagcatgaatatgatatatggccaccagctggaaaggaacgaaaacgttcaataaccaaaaatcccaaaattggaggtttgcctctgattcctatacagcatgaggggaatgcaaccttggcccggaaaaatattgagagtgcaagagcagaacttgaaaggctgcggctcagtgaaaagtgtgataaagagtccgtggactctagcttaaaggagagagcttccatggtggcccactgcctggagcacaaggacgataaacttcgaaatcgaccccgaaaacatcggagtttcaactgcctggaggacacagagcctgaagccccacttgggcaaccaaaaggccataaaggcctaaagacattgaggaagactgaggacaggaatagcaaagctactttggactctgatcataagttaccatcaagggtaattgaagaacttaatgtggttctacaacggtcaagaacccttccaaaagaattacaggatgagcagattttgaagtaggaaataaaatgaattgctccccagattatttttttaatattgtatgcaatctttatgtgtaactccaaaactgaactataagataattcataagaatttgcctattgataggcaaatttgtctatgcttaggcatttaaggagcatttaaaaatatgtatatatgtgactgaatgtaagattaactttattttggtctgaacaaaccttgtaaagttccattgtattaacgtgtgtaagaagacattgggttacttaggtggtcagtccttttaaagtagttgtctgttaagtggtataatttatgagcagaaatctcaaactgtactgtattgtataaaatgctgtgtttaaatgaagcctaagaaactatctgtaacatattttgcactttgagaaaccttgtatattaaattaccatatgtttttaggtttacagaagttctaccttagggaaaagaaagggaagtaaattgaaaaaggggggagaatttattgtagtggctgcctaaaaaccactggagtttttaaaagaagcaaggagttaaatgtcctgcaaaacaaggaagtgagctaagattcattctagttcactaatgaccagaacttgtcaatgagaaaccacttgttaagaaaaagtccagtgtttatttctcaagagtaatattcggccaacagatgtaaataatagcactagccactcttattaatatttatagtgttagaaaaccagccacattacagattcactacgtttgagctcattgttggtggctgctaagaggaaacttacactgcattggagaggttgtgtacacaggacctggcctggatgctgattgcactgtcattgtatgcaagcattttgtcttttttcagaatttctgactatacttttggtacgaacaaaattcatcaccacagggtcctgttgttttgtttgatttttagatttttttaaattattattaaggttgtaatgtttttctccgagttgtcagaaataactggaagaatacaatatatggccattatggagccaggggctagttggtggtttactatacatttgggggctacctggtcacatttaatctaggtttttttttctttttttaagtaaaggtgtggtctcttccctgtacttatgaataaggacaaagccctatttttgtttccacataaagatcagctactgaattggtgaatttcctgacagacaatgctatctaaccatagttcatgttaggggaagcatttttccatcagtttctttaaaattggattgtctggtgagttttgatattaaacattatgtagctaagttttttttttttagcatttcttttttatttttcaatctatattcacaggcccatacttcagtcagtccaatcatagtacagtgatgtggtggtagatgctatgaatttcttcattgtaaaatacggatcatttgtattttggggtgataaaatagttcaccatgggtatgagatatttattctttaaatcaaagtaaattagaatttttaaaaagcacaaaactgcaggacagtttatgaaataggtggcactattagggaatcttcctttaaagcaagaaatcatgttatttagaaagaaaaactaatcttaaacatactatttctaataaatatttatatttttatgaaataaagaggtatgtggaaattaatatttggtgatgttggacagtggaaaagtatctagagtttttacctgccttatctgaattcttcttgaaacttgagcttaaactctaatagctgtttccctttctattctgaacaactgtctccatttttcaagtgtgagagataagggctaatgatgacatctcatttattttgagtaaacattaaaattgttttacaagtctacttg

SEQ ID NO: 508 - protein, 876 aa, Homo sapiens
MALLFSGADVMCATGDPVHSTPYLLAKKAGQSLQMEFLYHNKFSDFPQHDIHSEGVLSQESSQSTFLCDFLYQAPSAASKLSSEKKLLEETNKKWCVLEGGFLSYYENDKSTTPNGTININEVICLAIHKEDFYLNTGPIFIFEIYLPSERVFLFGAETSQAQRKWTEAIAKHFVPLFAENLTEADYDLIGQLFYKDCHALDQWRKGWFAMDKSSLHFCLQMQEVQGDRMHLRRLQELTISTMVQNGEKLDVLLLVEKGRTLYIHGHTKLDFTVWHTAIEKAAGTDGNALQDQQLSKNDVPIIVNSCIAFVTQYGLGCKYIYQKNGDPLHISELLESFKKDARSFKLRAGKHQLEDVTAVLKSFLSDIDDALLTKELYPYWISALDTQDDKERIKKYGAFIRSLPGVNRATLAAIIEHLYRVQKCSEINHMNAHNLALVFSSCLFQTKGQTSEEVNVIEDLINNYVEIFEVKEDQVKQMDIENSFITKWKDTQVSQAGDLLIEVYVERKEPDCSIIIRISPVMEAEELTNDILAIKNIIPTKGDIWATFEVIENEELERPLHYKENVLEQVLRWSSLAEPGSAYLVVKRFLTADTIKHCSDRSTLGSIKEGILKIKEEPSKILSGNKFQDRYFVLRDGFLFLYKDVKSSKHDKMFSLSSMKFYRGVKKKMKPPTSWGLTAYSEKHHWHLCCDSSRTQTEWMTSIFIAQHEYDIWPPAGKERKRSITKNPKIGGLPLIPIQHEGNATLARKNIESARAELERLRLSEKCDKESVDSSLKERASMVAHCLEHKDDKLRNRPRKHRSFNCLEDTEPEAPLGQPKGHKGLKTLRKTEDRNSKATLDSDHKLPSRVIEELNVVLQRSRTLPKELQDEQILK

SEQ ID NO: 509 - DNA, 5632 bp, Homo sapiens
tacttaccccgccagccccgggaggctcgcagagcgagcggcgccggcgtcatgtgactgcccggagttggtgccaggagccagaggggagccaggagcggagccgcgcggagccggggcccgagccggagcgcagcgagagcgcccgccgcacgcgcgcccgtccccgtcccctgcggccgccaacgccgcccggactggagccctgacattgctgcgctcggggggctccaggcagcccgtatcggggcctttatttctcgtcggcggcgccctgcaccgcgcctcgcaaagccaaacaccagagcaccctagaaggtttaactaaaagaatgctcatgtttgacccagttcctgtcaagcaagaggccatggaccctgtctcagtgtcatacccatctaattacatggaatccatgaagcctaacaagtatggggtcatctactccacaccattgcctgagaagttctttcagaccccagaaggtctgtcgcacggaatacagatggagccagtggacctcacggtgaacaagcggagttcacccccttcggctgggaattcgccctcctctctgaagttcccgtcctcacaccggagagcctcgcctgggttgagcatgccttcttccagcccaccgataaaaaaatactcacccccttctccaggcgtgcagcccttcggcgtgccgctgtccatgccaccagtgatggcagctgccctctcgcggcatggaatacggagcccggggatcctgcccgtcatccagccggtggtggtgcagcccgtcccctttatgtacacaagtcacctccagcagcctctcatggtctccttatcggaggagatggaaaattccagtagtagcatgcaagtacctgtaattgaatcatatgagaagcctatatcacagaaaaaaattaaaatagaacctgggatcgaaccacagaggacagattattatcctgaagaaatgtcaccccccttaatgaactcagtgtcccccccgcaagcattgttgcaagagaatcacccttcggtcatcgtgcagcctgggaagagacctttacctgtggaatccccggatactcaaaggaagcggaggatacacagatgtgattatgatggatgcaacaaagtgtacactaaaagctcccacttgaaagcacacagaagaacacacacaggagaaaaaccctacaaatgtacatgggaagggtgcacatggaagtttgctcggtctgatgaactaacaagacatttccgaaaacatactggaatcaaacctttccagtgcccggactgtgaccgcagcttctcccgttctgaccatcttgccctccataggaaacgccacatgctagtctgattgcctctgtgtcctgcctcagcgtgactccccactcacctggctctctctctgtcctgcctcccattatctaacacattttttacatgtacattttaatttgattcagctggtctgaatctctgaatttatatcatccaaaacttccatatggtcagtagtagatgttctctaatcctccctctccttaccacgggtcagacctaaagaatgtgaacacttttttttttttttctggggatgctaagcaaacccttcttacagatacgtttaatgtaataagaacaagggaacatgtaaactaacataaccaattgtcagttctccatgtattcctcaaaagaatgtcagagtaaatgtattagaaatacagtatccagactgctagtccttgccagagacattcttacctctgccctgtgataatattttatgcttgacagtgaaaacaagtgtggccccttgcaccggttagctagaagtacagccagatttcaagctagtgcagtcacctcttccgtcattcttcacaaatcttgtcaacctggatcttagacttcatctgaatcgagttctttgccctcctttgtgcctgcagctcatatggaggtctttgccaccaatgggagatgagcccaaactttcgatctaggtgggtgatgtgtagcagttcaagggaagggtgctgtgttttcatagcatggagtcggaggagagggccatttagcagggggagcagaagaggcaattcctcctgggctaggggttgtcagtgaggtttcaacattttgttagctgtgtgcagcattcccagagcttcagtctctgtgcatactcagctttgtagaaccatgctgcaaagccatataccgatggggttatccatgcaactatctccattcctacaatgtccttaatatgagatcatcaaacattgatagtagggactccatggaatatttgcccagtaatggtaagaaatctttcgggtaagagtatggatggttcttcttttacccaatctgcttatagctttttttgtaaacagggaaatgttgagtggtacttgtattcccttatcaaattaatcacatagcttttatacagaaactcttcctgtgtgagctgttaaggtgccaaattggctgtcatttgtattcatgacacataccataaagcatctgctaatgctttaatggattgattcaattaagacctgagtgacactatttgtaaatataactagttgtgaagcacacatacctttattttgggaatttatgagaaaatatagaaaaccacagatcagggattcatatatgtagctcaaaaattcccaaaagtttactgttagagttggcaatttcctatcactatttcagtgtcagaacaaactgaaaataatggctcgtgtttatgttgaagataaatagcaccattattgggggaagttattcaaaagcaggcttttgagcaccatagtctaaatgccaataaaaataattcatacatagaaatgtcattggtcctgaatttgaagaaagtgagcaacagtagttaaatgtgggtgcatataaccaaattccccttcatcaagaatggaggagaagagagaagaatgaaatcctgaagattcatcccagccgcaactcaggatccaacacaactttaactgggaggaatacattgtttgatcatttttaaaacatctgtgaatgagtgattccggaggcctgtgaattgtgtggggagcttgctttgatggcactgtgttaataaaagttgtagggactgtgcacctaagaggctaagaggtcccactcatccgccctgtgaaccagctgtaaagaaatgtagttaagaaatgcaaagaaatgtgttatcttggcacttgggtttgattttcctttttttaaagcactgcaaaacttctttaggatactaaaacatcctaattgggctgtttttttgttttgttttgtttttcagctaaaggcaaagataatttttttttcagctgaagtttttcttttttgcaactatgacatgaattgagtgataaaatggctctttgaaaagtagatattgtctgtattgtaaatgcttagtcatattcatggcaaagtgttcatttcttgagatggttctttcacaacacacaagaatcaagatggaacgcaaggaaaatctttttgttttgaccgaggtaaccagtttatgtgtgttccaatccatagagaagtgggggaaagggcgagaaaggatcagattgatctgggatcagctttgagcctgagttcagtgaatagcctcatgggcatctcatggaattgatgcatttgctgtggcatatttaaattttgttcaaaagatttgaagcaagaccttgcaaagactcttaacattactgttcagcttgcttagattgtgttaacagttcatttaacaaagatccgttttaactctgaacaaaagcaacccagagcggccattctctattcccatgctggtcaatacgctttcattaccaattggcccttaccaaacttttcttatatatatatttgtattttactatgatagttgagaaatttagcctcttagtcatttttagctgttattgtggaagacctcaaatacaagattagatgcccttgaacatgttttaatgatgtgtgtcatgttactatcaatggtgatttcaatcgcaatattttaaattgatgagaatgatttgtaaacatgaagttactattacgtaaattctgtttgttatagagtttcttcagttgttacccaagtgtcatcctagagaagtcagaagaatcagaatccatcgtattttagagttatgtgaatctacatcataaatgggcattaacattctaaattgcttggtttggagaatgtgttagcagcatagctatattcaactagggagatgctaaatacacagaagtttcaagagccttggaacagaattacaggggaactatatatgtatatgtatattttattaaacacccatctgcactatcagtattgcactaatgtggaatttgaaagactattttgctgatactgtatatatgcgcatcattcctgattagattgttgtaaagacaatctgaaagatctaaggttttaaaataatttggtttgaaaatatacagttgtcttgaaggaattgctgtcatacatgaagttgctccgagctgtctttattctcttcttggtcaaggttaacaattgctaaatgatcgcaaattcacctaaacaatacatttacaaagccatctttacatgcattaaacgagggctacaacaatattgttttacaaatactagcacttttttttctgttatgtacttagtgttagagggtcaaaataatctttctgcttagcatctcttaaaccatacctgcaaatatagcaggattattacatttacagtactttaatacttgtataaactatgcagaaatttttaataaagtgtaatatattttataagctaataagactgaatgggtaaaggtttttagcatgcattagtatacttgcagatactgaaacattttggtaatctttcttactaaagatgtgaatgtttaatgtaccttctctgtttctactctgtagtccaatgggaattcagtaatgacattttgtcatgtcaaactgtgaacataaatttgtactgtacagtcctcatatactatatacagtatgcaatatatattatatacttgttaataaaaccatcagaatattaaatgtgatcatgtgattacttcatatgcagtgatcactagagcaaaacttacagagcaatgtaagaacccttgcttagaacattacttactctgatgggcagttattgttgatggagggacagaaaaatagatctaactggaagatgaactaccggaattaactcagccctcaagctatgtccctggttttctgaaaacagccaacaggaagtctcctaggctgaaatcataaaactgcagacaatccagcaaaaatctacaaactcacctagttcattcttgaaatacttcttgtatttgttatttatgaacccctgcctgcttccaaaaagaacttgcagcattttgtattaaaagacgcatgtgtataatactttaaacttttagagtaaaatatcaagactctcatgttggggagtggggaacgaggaacagaacaataacgcattaaagtaaataactctggaaaaaaaaaaaaaaaaaa

SEQ ID NO: 510 - protein, 345 aa, Homo sapiens
MLMFDPVPVKQEAMDPVSVSYPSNYMESMKPNKYGVIYSTPLPEKFFQTPEGLSHGIQMEPVDLTVNKRSSPPSAGNSPSSLKFPSSHRRASPGLSMPSSSPPIKKYSPPSPGVQPFGVPLSMPPVMAAALSRHGIRSPGILPVIQPVVVQPVPFMYTSHLQQPLMVSLSEEMENSSSSMQVPVIESYEKPISQKKIKIEPGIEPQRTDYYPEEMSPPLMNSVSPPQALLQENHPSVIVQPGKRPLPVESPDTQRKRRIHRCDYDGCNKVYTKSSHLKAHRRTHTGEKPYKCTWEGCTWKFARSDELTRHFRKHTGIKPFQCPDCDRSFSRSDHLALHRKRHMLV

SEQ ID NO: 511 - DNA, 843 bp, Homo sapiens
atgaactccgatcatgttttaaaaatgactctggagcttggagtgggtctggtagtgcatcctgaagtcctgccaggggacaagcacaatgaaaaactcctgactgtgggtctggaagtggcctacacctgtacatctattcaacagccagctgctgagacactgccctccttcacagatgggggctctgagctgctggacaacactgcgttctggatgttcaaggacaaagttgcagccaacagacctgccatcactggcttattgcttcccccaaccaccccacacttcatgaatcttctctttgcctcctcctattggaagctgctggatctcagcaccaccacctccaccaccatcaccaccacctctaccaccaccatcaccactgccaccaccaccatcaccaccagctccaccaccaccaccagcaacaacatcatcaacaccaccaacaccaccaacaccatcaccgctaccaccacaaccaccaggatcaccactaccaccaccatcaacaccatcaccaccaccaccatcaacaccatcaccaccacgaccagcaccatcactatcaccaccactaccaccaccaccatcaccaccaccgccaccactgcctccaccaccatcaccactaccaccagtaccaccaccatcaccactaacaccacagcctccaccaccatcaccaccaacaccaccatcccaccattaccaccaccatcatcaccaccaccatcaccatcaccaccaccatcaccatcatcaacaccactaccaccaccaccaccatcacctccctttctgagctgtgccctgctgaacttccaaatttcttga

SEQ ID NO: 512 - protein, 280 aa, Homo sapiens
MNSDHVLKMTLELGVGLVVHPEVLPGDKHNEKLLTVGLEVAYTCTSIQQPAAETLPSFTDGGSELLDNTAFWMFKDKVAANRPAITGLLLPPTTPHFMNLLFASSYWKLLDLSTTTSTTITTTSTTTITTATTTITTSSTTTTSNNIINTTNTTNTITATTTTTRITTTTTINTITTTTINTITTTTSTITITTTTTTTITTTATTASTTITTTTSTTTITTNTTASTTITTNTTIPPLPPPSSPPPSPSPPPSPSSTPLPPPPPSPPFLSCALLNFQIS

SEQ ID NO: 513 - DNA, 3088 bp, Homo sapiens
gaatcatccacgcacctgcagctctgctgagagagtgcaagccgtgggggttttgagctcatcttcatcattcatatgaggaaataagtggtaaaatccttggaaatacaatgagactcatcagaaacatttacatattttgtagtattgttatgacagcagagggtgatgctccagagctgccagaagaaagggaactgatgaccaactgctccaacatgtctctaagaaaggttcccgcagacttgaccccagccacaacgacactggatttatcctataacctcctttttcaactccagagttcagattttcattctgtctccaaactgagagttttgattctatgccataacagaattcaacagctggatctcaaaacctttgaattcaacaaggagttaagatatttagatttgtctaataacagactgaagagtgtaacttggtatttactggcaggtctcaggtatttagatctttcttttaatgactttgacaccatgcctatctgtgaggaagctggcaacatgtcacacctggaaatcctaggtttgagtggggcaaaaatacaaaaatcagatttccagaaaattgctcatctgcatctaaatactgtcttcttaggattcagaactcttcctcattatgaagaaggtagcctgcccatcttaaacacaacaaaactgcacattgttttaccaatggacacaaatttctgggttcttttgcgtgatggaatcaagacttcaaaaatattagaaatgacaaatatagatggcaaaagccaatttgtaagttatgaaatgcaacgaaatcttagtttagaaaatgctaagacatcggttctattgcttaataaagttgatttactctgggacgaccttttccttatcttacaatttgtttggcatacatcagtggaacactttcagatccgaaatgtgacttttggtggtaaggcttatcttgaccacaattcatttgactactcaaatactgtaatgagaactataaaattggagcatgtacatttcagagtgttttacattcaacaggataaaatctatttgcttttgaccaaaatggacatagaaaacctgacaatatcaaatgcacaaatgccacacatgcttttcccgaattatcctacgaaattccaatatttaaattttgccaataatatcttaacagacgagttgtttaaaagaactatccaactgcctcacttgaaaactctcattttgaatggcaataaactggagacactttctttagtaagttgctttgctaacaacacacccttggaacacttggatctgagtcaaaatctattacaacataaaaatgatgaaaattgctcatggccagaaactgtggtcaatatgaatctgtcatacaataaattgtctgattctgtcttcaggtgcttgcccaaaagtattcaaatacttgacctaaataataaccaaatccaaactgtacctaaagagactattcatctgatggccttacgagaactaaatattgcatttaattttctaactgatctccctggatgcagtcatttcagtagactttcagttctgaacattgaaatgaacttcattctcagcccatctctggattttgttcagagctgccaggaagttaaaactctaaatgcgggaagaaatccattccggtgtacctgtgaattaaaaaatttcattcagcttgaaacatattcagaggtcatgatggttggatggtcagattcatacacctgtgaataccctttaaacctaaggggaactaggttaaaagacgttcatctccacgaattatcttgcaacacagctctgttgattgtcaccattgtggttattatgctagttctggggttggctgtggccttctgctgtctccactttgatctgccctggtatctcaggatgctaggtcaatgcacacaaacatggcacagggttaggaaaacaacccaagaacaactcaagagaaatgtccgattccacgcatttatttcatacagtgaacatgattctctgtgggtgaagaatgaattgatccccaatctagagaaggaagatggttctatcttgatttgcctttatgaaagctactttgaccctggcaaaagcattagtgaaaatattgtaagcttcattgagaaaagctataagtccatctttgttttgtctcccaactttgtccagaatgagtggtgccattatgaattctactttgcccaccacaatctcttccatgaaaattctgatcatataattcttatcttactggaacccattccattctattgcattcccaccaggtatcataaactgaaagctctcctggaaaaaaaagcatacttggaatggcccaaggataggcgtaaatgtgggcttttctgggcaaaccttcgagctgctattaatgttaatgtattagccaccagagaaatgtatgaactgcagacattcacagagttaaatgaagagtctcgaggttctacaatctctctgatgagaacagattgtctataaaatcccacagtccttgggaagttggggaccacatacactgttgggatgtacattgatacaacctttatgatggcaatttgacaatatttattaaaataaaaaatggttattcccttcatatcagtttctagaaggatttctaagaatgtatcctatagaaacaccttcacaagtttataagggcttatggaaaaaggtgttcatcccaggattgtttataatcatgaaaaatgtggccaggtgcagtggctcactcttgtaatcccagcactatgggaggccaaggtgggtgacccacgaggtcaagagatggagaccatcctggccaacatggtgaaaccctgtctctactaaaaatacaaaaattagctgggcgtgatggtgcacgcctgtagtcccagctacttgggaggctgaggcaggagaatcgcttgaacccgggaggtggcagttgcagtgagctgagatcgagccactgcactccagcctggtgacagagcgagactccatctcaaaaaaaagaaaaaaaaaaaagaaaaaaa

SEQ ID NO: 514 - protein, 811 aa, Homo sapiens
MRLIRNIYIFCSIVMTAEGDAPELPEERELMTNCSNMSLRKVPADLTPATTTLDLSYNLLFQLQSSDFHSVSKLRVLILCHNRIQQLDLKTFEFNKELRYLDLSNNRLKSVTWYLLAGLRYLDLSFNDFDTMPICEEAGNMSHLEILGLSGAKIQKSDFQKIAHLHLNTVFLGFRTLPHYEEGSLPILNTTKLHIVLPMDTNFWVLLRDGIKTSKILEMTNIDGKSQFVSYEMQRNLSLENAKTSVLLLNKVDLLWDDLFLILQFVWHTSVEHFQIRNVTFGGKAYLDHNSFDYSNTVMRTIKLEHVHFRVFYIQQDKIYLLLTKMDIENLTISNAQMPHMLFPNYPTKFQYLNFANNILTDELFKRTIQLPHLKTLILNGNKLETLSLVSCFANNTPLEHLDLSQNLLQHKNDENCSWPETVVNMNLSYNKLSDSVFRCLPKSIQILDLNNNQIQTVPKETIHLMALRELNIAFNFLTDLPGCSHFSRLSVLNIEMNFILSPSLDFVQSCQEVKTLNAGRNPFRCTCELKNFIQLETYSEVMMVGWSDSYTCEYPLNLRGTRLKDVHLHELSCNTALLIVTIVVIMLVLGLAVAFCCLHFDLPWYLRMLGQCTQTWHRVRKTTQEQLKRNVRFHAFISYSEHDSLWVKNELIPNLEKEDGSILICLYESYFDPGKSISENIVSFIEKSYKSIFVLSPNFVQNEWCHYEFYFAHHNLFHENSDHIILILLEPIPFYCIPTRYHKLKALLEKKAYLEWPKDRRKCGLFWANLRAAINVNVLATREMYELQTFTELNEESRGSTISLMRTDCL

SEQ ID NO: 515 - DNA, 3594 bp, Homo sapiens
gaatcatccacgcacctgcagctctgctgagagagtgcaagccgtgggaattcagcagctgaatatcaagacctttgaattcaacaagaagttaagacatttatagttgtctaacaacagactgaagattgtggcttggtattcactggcaggtttcagacatttagatctttcttttaatgactaacaccatgcctatctgtggagaagctggcaacatgtcacacctggaaattgtttttcaacattaatactattatttggcagtaatccagattgcttttgccaccaacctgaagacatatagaggcagaaggacaggaataattctatttgtttcctgttttgaaacttccatctgtaaggctatcaaaaggagatgtgagagagggtattgagtctggcctgacaatgcagttcttaaaccaaaggtccattatgcttctcctctctgagaatcctgacttacctcaacaacggagacatggcacagtagccagcttggagacttctcagccaatgctctgagatcaagtcgaagacccaatatacagggttttgagctcatcttcatcattcatatgaggaaataagtggtaaaatccttggaaatacaatgagactcatcagaaacatttacatattttgtagtattgttatgacagcagagggtgatgctccagagctgccagaagaaagggaactgatgaccaactgctccaacatgtctctaagaaaggttcccgcagacttgaccccagccacaacgacactggatttatcctataacctcctttttcaactccagagttcagattttcattctgtctccaaactgagagttttgattctatgccataacagaattcaacagctggatctcaaaacctttgaattcaacaaggagttaagatatttagatttgtctaataacagactgaagagtgtaacttggtatttactggcaggtctcaggtatttagatctttcttttaatgactttgacaccatgcctatctgtgaggaagctggcaacatgtcacacctggaaatcctaggtttgagtggggcaaaaatacaaaaatcagatttccagaaaattgctcatctgcatctaaatactgtcttcttaggattcagaactcttcctcattatgaagaaggtagcctgcccatcttaaacacaacaaaactgcacattgttttaccaatggacacaaatttctgggttcttttgcgtgatggaatcaagacttcaaaaatattagaaatgacaaatatagatggcaaaagccaatttgtaagttatgaaatgcaacgaaatcttagtttagaaaatgctaagacatcggttctattgcttaataaagttgatttactctgggacgaccttttccttatcttacaatttgtttggcatacatcagtggaacactttcagatccgaaatgtgacttttggtggtaaggcttatcttgaccacaattcatttgactactcaaatactgtaatgagaactataaaattggagcatgtacatttcagagtgttttacattcaacaggataaaatctatttgcttttgaccaaaatggacatagaaaacctgacaatatcaaatgcacaaatgccacacatgcttttcccgaattatcctacgaaattccaatatttaaattttgccaataatatcttaacagacgagttgtttaaaagaactatccaactgcctcacttgaaaactctcattttgaatggcaataaactggagacactttctttagtaagttgctttgctaacaacacacccttggaacacttggatctgagtcaaaatctattacaacataaaaatgatgaaaattgctcatggccagaaactgtggtcaatatgaatctgtcatacaataaattgtctgattctgtcttcaggtgcttgcccaaaagtattcaaatacttgacctaaataataaccaaatccaaactgtacctaaagagactattcatctgatggccttacgagaactaaatattgcatttaattttctaactgatctccctggatgcagtcatttcagtagactttcagttctgaacattgaaatgaacttcattctcagcccatctctggattttgttcagagctgccaggaagttaaaactctaaatgcgggaagaaatccattccggtgtacctgtgaattaaaaaatttcattcagcttgaaacatattcagaggtcatgatggttggatggtcagattcatacacctgtgaataccctttaaacctaaggggaactaggttaaaagacgttcatctccacgaattatcttgcaacacagctctgttgattgtcaccattgtggttattatgctagttctggggttggctgtggccttctgctgtctccactttgatctgccctggtatctcaggatgctaggtcaatgcacacaaacatggcacagggttaggaaaacaacccaagaacaactcaagagaaatgtccgattccacgcatttatttcatacagtgaacatgattctctgtgggtgaagaatgaattgatccccaatctagagaaggaagatggttctatcttgatttgcctttatgaaagctactttgaccctggcaaaagcattagtgaaaatattgtaagcttcattgagaaaagctataagtccatctttgttttgtctcccaactttgtccagaatgagtggtgccattatgaattctactttgcccaccacaatctcttccatgaaaattctgatcatataattcttatcttactggaacccattccattctattgcattcccaccaggtatcataaactgaaagctctcctggaaaaaaaagcatacttggaatggcccaaggataggcgtaaatgtgggcttttctgggcaaaccttcgagctgctattaatgttaatgtattagccaccagagaaatgtatgaactgcagacattcacagagttaaatgaagagtctcgaggttctacaatctctctgatgagaacagattgtctataaaatcccacagtccttgggaagttggggaccacatacactgttgggatgtacattgatacaacctttatgatggcaatttgacaatatttattaaaataaaaaatggttattcccttcatatcagtttctagaaggatttctaagaatgtatcctatagaaacaccttcacaagtttataagggcttatggaaaaaggtgttcatcccaggattgtttataatcatgaaaaatgtggccaggtgcagtggctcactcttgtaatcccagcactatgggaggccaaggtgggtgacccacgaggtcaagagatggagaccatcctggccaacatggtgaaaccctgtctctactaaaaatacaaaaattagctgggcgtgatggtgcacgcctgtagtcccagctacttgggaggctgaggcaggagaatcgcttgaacccgggaggtggcagttgcagtgagctgagatcgagccactgcactccagcctggtgacagagcgagactccatctcaaaaaaaagaaaaaaaaaaaagaaaaaaa

SEQ ID NO: 516 - protein, 811 aa, Homo sapiens; identical to SEQ ID NO: 514

SEQ ID NO: 517 - DNA, 2867 bp, Homo sapiens
acagactgccaaatggaacagacaagcaggttgtcttgtgttaaagaaaatgagatataagtcagttactcccggaggcaatgctgctgttcagctcttctgtttttgtggccagggtcttcatgaacactaataggggtaccaggccctcttcctcgttagaagaaatcaggataacaaaggcatattgggcacccctacaaaaggaatctgtatctgtatcaagatgatctgaagaacagcttctacctttaggaatgtctagtgttccaaaatgactagcatcttccattttgccattatcttcatgttaatacttcagatcagaatacaattatctgaagaaagtgaatttttagttgataggtcaaaaaacggtctcatccacgttcctaaagacctatcccagaaaacaacaatcttaaatatatcgcaaaattatatatctgagctttggacttctgacatcttatcactgtcaaaactgaggattttgataatttctcataatagaatccagtatcttgatatcagtgttttcaaattcaaccaggaattggaatacttggatttgtcccacaacaagttggtgaagatttcttgccaccctactgtgaacctcaagcacttggacctgtcatttaatgcatttgatgccctgcctatatgcaaagagtttggcaatatgtctcaactaaaatttctggggttgagcaccacacacttagaaaaatctagtgtgctgccaattgctcatttgaatatcagcaaggtcttgctggtcttaggagagacttatggggaaaaagaagaccctgagggccttcaagactttaacactgagagtctgcacattgtgttccccacaaacaaagaattccattttattttggatgtgtcagtcaagactgtagcaaatctggaactatctaatatcaaatgtgtgctagaagataacaaatgttcttacttcctaagtattctggcgaaacttcaaacaaatccaaagttatcaaatcttaccttaaacaacattgaaacaacttggaattctttcattaggatcctccagctggtttggcatacaactgtatggtatttctcaatttcaaacgtgaagctacagggtcagctggacttcagagattttgattattctggcacttccttgaaggccttgtctatacaccaagttgtcagcgatgtgttcggttttccgcaaagttatatctatgaaatcttttcgaatatgaacatcaaaaatttcacagtgtctggtacacgcatggtccacatgctttgcccatccaaaattagcccgttcctgcatttggatttttccaataatctcttaacagacacggtttttgaaaattgtgggcaccttactgagttggagacacttattttacaaatgaatcaattaaaagaactttcaaaaatagctgaaatgactacacagatgaagtctctgcaacaattggatattagccagaattctgtaagctatgatgaaaagaaaggagactgttcttggactaaaagtttattaagtttaaatatgtcttcaaatatacttactgacactattttcagatgtttacctcccaggatcaaggtacttgatcttcacagcaataaaataaagagcattcctaaacaagtcgtaaaactggaagctttgcaagaactcaatgttgctttcaattctttaactgaccttcctggatgtggcagctttagcagcctttctgtattgatcattgatcacaattcagtttcccacccatcggctgatttcttccagagctgccagaagatgaggtcaataaaagcaggggacaatccattccaatgtacctgtgagctaggagaatttgtcaaaaatatagaccaagtatcaagtgaagtgttagagggctggcctgattcttataagtgtgactacccggaaagttatagaggaaccctactaaaggactttcacatgtctgaattatcctgcaacataactctgctgatcgtcaccatcgttgccaccatgctggtgttggctgtgactgtgacctccctctgcagctacttggatctgccctggtatctcaggatggtgtgccagtggacccagacccggcgcagggccaggaacatacccttagaagaactccaaagaaatctccagtttcatgcatttatttcatatagtgggcacgattctttctgggtgaagaatgaattattgccaaacctagagaaagaaggtatgcagatttgccttcatgagagaaactttgttcctggcaagagcattgtggaaaatatcatcacctgcattgagaagagttacaagtccatctttgttttgtctcccaactttgtccagagtgaatggtgccattatgaactctactttgcccatcacaatctctttcatgaaggatctaatagcttaatcctgatcttgctggaacccattccgcagtactccattcctagcagttatcacaagctcaaaagtctcatggccaggaggacttatttggaatggcccaaggaaaagagcaaacgtggccttttttgggctaacttaagggcagccattaatattaagctgacagagcaagcaaagaaatagattacacatcaagtgaaaaatattcctcctgttgatattgctgcttttggaagttccaacaatgactttattttgcatcagcatagatgtaaacacaattgtgagtgtatgatgtaggtaaaaatatataccttcgggtcgcagttcaccatttatatgtggtattaaaaattaatgaaatgatataactttgatttaaacagttctgacacataaaaaaaaaaaaaaaaaa

SEQ ID NO: 518 - protein, 786 aa, Homo sapiens
MTSIFHFAIIFMLILQIRIQLSEESEFLVDRSKNGLIHVPKDLSQKTTILNISQNYISELWTSDILSLSKLRILIISHNRIQYLDISVFKFNQELEYLDLSHNKLVKISCHPTVNLKHLDLSFNAFDALPICKEFGNMSQLKFLGLSTTHLEKSSVLPIAHLNISKVLLVLGETYGEKEDPEGLQDFNTESLHIVFPTNKEFHFILDVSVKTVANLELSNIKCVLEDNKCSYFLSILAKLQTNPKLSNLTLNNIETTWNSFIRILQLVWHTTVWYFSISNVKLQGQLDFRDFDYSGTSLKALSIHQVVSDVFGFPQSYIYEIFSNMNIKNFTVSGTRMVHMLCPSKISPFLHLDFSNNLLTDTVFENCGHLTELETLILQMNQLKELSKIAEMTTQMKSLQQLDISQNSVSYDEKKGDCSWTKSLLSLNMSSNILTDTIFRCLPPRIKVLDLHSNKIKSIPKQVVKLEALQELNVAFNSLTDLPGCGSFSSLSVLIIDHNSVSHPSADFFQSCQKMRSIKAGDNPFQCTCELGEFVKNIDQVSSEVLEGWPDSYKCDYPESYRGTLLKDFHMSELSCNITLLIVTIVATMLVLAVTVTSLCSYLDLPWYLRMVCQWTQTRRRARNIPLEELQRNLQFHAFISYSGHDSFWVKNELLPNLEKEGMQICLHERNFVPGKSIVENIITCIEKSYKSIFVLSPNFVQSEWCHYELYFAHHNLFHEGSNSLILILLEPIPQYSIPSSYHKLKSLMARRTYLEWPKEKSKRGLFWANLRAAINIKLTEQAKK

SEQ ID NO: 519 - DNA, 2753 bp, Homo sapiens
agaatttggactcatatcaagatgctctgaagaagaacaaccctttaggatagccactgcaacatcatgaccaaagacaaagaacctattgttaaaagcttccattttgtttgccttatgatcataatagttggaaccagaatccagttctccgacggaaatgaatttgcagtagacaagtcaaaaagaggtcttattcatgttccaaaagacctaccgctgaaaaccaaagtcttagatatgtctcagaactacatcgctgagcttcaggtctctgacatgagctttctatcagagttgacagttttgagactttcccataacagaatccagctacttgatttaagtgttttcaagttcaaccaggatttagaatatttggatttatctcataatcagttgcaaaagatatcctgccatcctattgtgagtttcaggcatttagatctctcattcaatgatttcaaggccctgcccatctgtaaggaatttggcaacttatcacaactgaatttcttgggattgagtgctatgaagctgcaaaaattagatttgctgccaattgctcacttgcatctaagttatatccttctggatttaagaaattattatataaaagaaaatgagacagaaagtctacaaattctgaatgcaaaaacccttcaccttgtttttcacccaactagtttattcgctatccaagtgaacatatcagttaatactttagggtgcttacaactgactaatattaaattgaatgatgacaactgtcaagttttcattaaatttttatcagaactcaccagaggttcaaccttactgaattttaccctcaaccacatagaaacgacttggaaatgcctggtcagagtctttcaatttctttggcccaaacctgtggaatatctcaatatttacaatttaacaataattgaaagcattcgtgaagaagattttacttattctaaaacgacattgaaagcattgacaatagaacatatcacgaaccaagtttttctgttttcacagacagctttgtacaccgtgttttctgagatgaacattatgatgttaaccatttcagatacaccttttatacacatgctgtgtcctcatgcaccaagcacattcaagtttttgaactttacccagaacgttttcacagatagtatttttgaaaaatgttccacgttagttaaattggagacacttatcttacaaaaaaatggattaaaagaccttttcaaagtaggtctcatgacgaaggatatgccttctttggaaatactggatgttagctggaattctttggaatctggtagacataaagaaaactgcacttgggttgagagtatagtggtgttaaatttgtcttcaaatatgcttactgactctgttttcagatgtttacctcccaggatcaaggtacttgatcttcacagcaataaaataaagagcgttcctaaacaagtcgtaaaactggaagctttgcaagaactcaatgttgctttcaattctttaactgaccttcctggatgtggcagctttagcagcctttctgtattgatcattgatcacaattcagtttcccacccatcggctgatttcttccagagctgccagaagatgaggtcaataaaagcaggggacaatccattccaatgtacctgtgagctaagagaatttgtcaaaaatatagaccaagtatcaagtgaagtgttagagggctggcctgattcttataagtgtgactacccagaaagttatagaggaagcccactaaaggactttcacatgtctgaattatcctgcaacataactctgctgatcgtcaccatcggtgccaccatgctggtgttggctgtgactgtgacctccctctgcatctacttggatctgccctggtatctcaggatggtgtgccagtggacccagactcggcgcagggccaggaacatacccttagaagaactccaaagaaacctccagtttcatgcttttatttcatatagtgaacatgattctgcctgggtgaaaagtgaattggtaccttacctagaaaaagaagatatacagatttgtcttcatgagaggaactttgtccctggcaagagcattgtggaaaatatcatcaactgcattgagaagagttacaagtccatctttgttttgtctcccaactttgtccagagtgagtggtgccattacgaactctattttgcccatcacaatctctttcatgaaggatctaataacttaatcctcatcttactggaacccattccacagaacagcattcccaacaagtaccacaagctgaaggctctcatgacgcagcggacttatttgcagtggcccaaggagaaaagcaaacgtgggctcttttgggctaacattagagccgcttttaatatgaaattaacactagtcactgaaaacaatgatgtgaaatcttaaaaaaatttaggaaattcaacttaagaaaccattatttacttggatgatggtgaatagtacagtcgtaagtaactgtctggaggtgcctccattatcctcatgccttcaggaaagacttaacaaaaacaatgtttcatctggggaactgagctaggcggtgaggttagcctgccagttagagacagcccagtctcttctggtttaatcattatgtttcaaattgaaacagtctcttttgagtaaatgctcagtttttcagctcctctccactctgctttcccaaatggattctgttg

SEQ ID NO: 520 - protein, 796 aa, Homo sapiens
MTKDKEPIVKSFHFVCLMIIIVGTRIQFSDGNEFAVDKSKRGLIHVPKDLPLKTKVLDMSQNYIAELQVSDMSFLSELTVLRLSHNRIQLLDLSVFKFNQDLEYLDLSHNQLQKISCHPIVSFRHLDLSFNDFKALPICKEFGNLSQLNFLGLSAMKLQKLDLLPIAHLHLSYILLDLRNYYIKENETESLQILNAKTLHLVFHPTSLFAIQVNISVNTLGCLQLTNIKLNDDNCQVFIKFLSELTRGSTLLNFTLNHIETTWKCLVRVFQFLWPKPVEYLNIYNLTIIESIREEDFTYSKTTLKALTIEHITNQVFLFSQTALYTVFSEMNIMMLTISDTPFIHMLCPHAPSTFKFLNFTQNVFTDSIFEKCSTLVKLETLILQKNGLKDLFKVGLMTKDMPSLEILDVSWNSLESGRHKENCTWVESIVVLNLSSNMLTDSVFRCLPPRIKVLDLHSNKIKSVPKQVVKLEALQELNVAFNSLTDLPGCGSFSSLSVLIIDHNSVSHPSADFFQSCQKMRSIKAGDNPFQCTCELREFVKNIDQVSSEVLEGWPDSYKCDYPESYRGSPLKDFHMSELSCNITLLIVTIGATMLVLAVTVTSLCIYLDLPWYLRMVCQWTQTRRRARNIPLEELQRNLQFHAFISYSEHDSAWVKSELVPYLEKEDIQICLHERNFVPGKSIVENIINCIEKSYKSIFVLSPNFVQSEWCHYELYFAHHNLFHEGSNNLILILLEPIPQNSIPNKYHKLKALMTQRTYLQWPKEKSKRGLFWANIRAAFNMKLTLVTENNDVKS

SEQ ID NO: 521 - DNA, 2129 bp, Homo sapiens
gtactcggccgcctgagcgccgacccacgccctgcctgctcttccagtccagccaacactctaagcaggcaccgcctccactcgcagcccccgggatgggtcccactccctaccgcagatccccaggccccctccacccagtcggctagccctcgcctctgccatccgatactaaaatgtctgatgatgctggtgacaccttagccactggagacaaagcagaagttactgagatgcctaatagtgattctttacctgaggatgcagaagtgcattgtgattcagctgcagtttcacatgagccaacaccagctgaccccagaggggaggggcatgaaaatgcagctgtgcagggtgcaggggctgccgccattgggccccctgtgcagcctcaggatgccaacgccctggagccccctctcaatagagacgtgactgaggatacacttgctgaatgtattgattccgtcagccttgaggcagaacccagatccgaaatacccctgcaagaacagaattatccggctgtggattcccctccaagtggaggaggatgggcaggctggggatcctggggcaaatctctgctgtcgtcagcatctgccacagtaggtcatggattgacggcagtcaaggaaaaagcaggagccactctacggattcatggtgtaaattctggatcttctgaaggagcccaaccaaatactgaaaacggagtccctgaaataacagatgcagccacagatcagggccctgcagaaagcccacccacttccccttcatcagcctctcggggtatgctgtctgccatcaccaatgtggttcaaaacacaggtaaaagtgtcttaactggaggccttgatgcgttggaattcatcggcaagaaaaccatgaatgtccttgcagaaagtgacccgggctttaagcggaccaagacgctcatggagagaactgtttccttgtctcagatgttaagggaagctaaggagaaggagaagcagagactggcacagcagctcacgatggagagaaccgcgcactacgggatgctgtttgatgaatatcaaggcttgtcacacctggaagccctggaaattctgtccaatgaaagcgaaagcaaggttcagtcatttttagcatcacttgatggagagaagctggaactcttaaaaaatgacctaatttccattaaagacatctttgcagccaaagaattagagaatgaagaaaatcaagaagaacaaggcttagaagaaaagggagaagaatttgctcgcatgcttacagagcttctctttgaattacatgtggcggccacacctgacaaactcaataaggccatgaagagggctcatgactgggtggaagaggatcaaaccgtggtgtcagtagatgtggcaaaagtgtccgaagaagaaacaaagaaggaagaaaaggaagagaaatctcaagaccctcaagaagacaaaaaggaggaaaagaaaactaagaccatagaggaagtatacatgtcgtccattgaaagtctggcggaggtaacagcgcgctgtattgagcagcttcataaagtagcagaattaattcttcatggacaagaagaggaaaaaccagctcaggaccaagcaaaagttctaataaaattaactactgcaatgtgcaatgaagtggcctctttatcaaagaagtttacgaattctttaaccactgttgggagcaacaagaaggccgaggtccttaaccccatgatcagtagtgtattgttagagggctgcaacagtacaacgtacatacaggatgccttccagctgctgctgcctgttctgcaggtctcacatatccagaccagttgtttgaaagcacagccgtgacctggccagactccatctagttaaaggagacagctggccgccttgcctcaatatgtaccatttaaggggatgttctctgtgcgcctggccacagacatccatttgaggacactacaagcaattttgcacagacaatattgagaatgcaaatttagagagagttatcatttctctcaatgtgtataattgtttttacaaacaattgtgttttctttatgttaatttaaacttacacagcttatattgaaaaaaaaaaaaaaa

SEQ ID NO: 522 - protein, 563 aa, Homo sapiens
MSDDAGDTLATGDKAEVTEMPNSDSLPEDAEVHCDSAAVSHEPTPADPRGEGHENAAVQGAGAAAIGPPVQPQDANALEPPLNRDVTEDTLAECIDSVSLEAEPRSEIPLQEQNYPAVDSPPSGGGWAGWGSWGKSLLSSASATVGHGLTAVKEKAGATLRIHGVNSGSSEGAQPNTENGVPEITDAATDQGPAESPPTSPSSASRGMLSAITNVVQNTGKSVLTGGLDALEFIGKKTMNVLAESDPGFKRTKTLMERTVSLSQMLREAKEKEKQRLAQQLTMERTAHYGMLFDEYQGLSHLEALEILSNESESKVQSFLASLDGEKLELLKNDLISIKDIFAAKELENEENQEEQGLEEKGEEFARMLTELLFELHVAATPDKLNKAMKRAHDWVEEDQTVVSVDVAKVSEEETKKEEKEEKSQDPQEDKKEEKKTKTIEEVYMSSIESLAEVTARCIEQLHKVAELILHGQEEEKPAQDQAKVLIKLTTAMCNEVASLSKKFTNSLTTVGSNKKAEVLNPMISSVLLEGCNSTTYIQDAFQLLLPVLQVSHIQTSCLKAQP

SEQ ID NO: 523 - DNA, 429 bp, Homo sapiens
atgcacacacccacacgcccacactcagggtctgccccctcggcctgcgtgaacctccgcggagcctgcctggatctcccaaagtatccagtcctggcaccaagcaagtctggaaaagtgcccccaatggctcggggccaagtcagaggtgggctgcagggtcccccagcccgggcacgaagggagcaggtccctgtaagacagaggcctcgtcccagggtgcgcctgccctcggccttggcacagggagctcaggccttgacctccccgctcccctcgccttactcctcccccaacagccgacccacgccctgcctgctcttccagtccagccaacactctaagcaggcaccgcctccactcgcagcccccgggatgggtcccactccctaccgcagatccccaggccccctccacccagtcggctag

SEQ ID NO: 524 - protein, 142 aa, Homo sapiens
MHTPTRPHSGSAPSACVNLRGACLDLPKYPVLAPSKSGKVPPMARGQVRGGLQGPPARARREQVPVRQRPRPRVRLPSALAQGAQALTSPLPSPYSSPNSRPTPCLLFQSSQHSKQAPPPLAAPGMGPTPYRRSPGPLHPVG

SEQ ID NO: 525 - DNA, 1925 bp, Homo sapiens
ggtccattcgggaattactgcccagcagccgactaagttgcattccttgaatcttcgcagaaaagacaattcttttaatcagagttagtaatgtggacagtacaaaatcgagagagtctggggcttctctctttccctgtgatgattaccatggtctgttgtgcacacagcaccaatgaacccagcaacatgccatacgtgaaagagacagtggacagattgctcaaaggatatgacattcgcttgcggccggacttcggagggccccccgtcgacgttgggatgcggatcgatgtcgccagcatagacatggtctccgaagtgaatatggattatacactcaccatgtatttccagcagtcttggaaagacaaaaggctttcttattctggaatcccactgaacctcaccctagacaatagggtagctgaccaactctgggtaccagacacctactttctgaatgacaagaaatcatttgtgcatggggtcacagtgaaaaatcgaatgattcgactgcatcctgatggaacagttctctatggactccgaatcacaaccacagctgcatgtatgatggatcttcgaagatatccactggatgagcagaactgcaccctggagatcgaaagttatggctataccactgatgacattgaattttactggaatggaggagaaggggcagtcactggtgttaataaaatcgaacttcctcaattttcaattgttgactacaagatggtgtctaagaaggtggagttcacaacaggagcgtatccacgactgtcactaagttttcgtctaaagagaaacattggttacttcattttgcaaacctacatgccttctacactgattacaattctgtcctgggtgtctttttggatcaactatgatgcatctgcagccagagtcgcactaggaatcacgacggtgcttacaatgacaaccatcagcacccacctcagggagaccctgccaaagatcccttatgtcaaagcgattgatatttatctgatgggttgctttgtgtttgtgttcctggctctgctggagtatgcctttgtaaattacatcttctttgggaaaggccctcagaaaaagggagctagcaaacaagaccagagtgccaatgagaagaataaactggagatgaataaagtccaggtcgacgcccacggtaacattctcctcagcaccctggaaatccggaatgagacgagtggctcggaagtgctcacgagcgtgagcgaccccaaggccaccatgtactcctatgacagcgccagcatccagtaccgcaagcccctgagcagccgcgaggcctacgggcgcgccctggaccggcacggggtacccagcaaggggcgcatccgcaggcgtgcctcccagctcaaagtcaagatccccgacttgactgatgtgaattccatagacaagtggtcccgaatgtttttccccatcaccttttctctttttaatgtcgtctattggctttactatgtacactgaggtctgttctaatggttccatttagactactttcctcttctattgttttttaaccttacaggtccccaacagcgatactgctgtttctcgaggtaagagattcagccatccaattggttttaggtcttgcatatcagttttattactgcaccatgtttacttcaaaaagacaaaacaaaaaaaaaattatttttccagtctaccgtggtccaggttatcagctctttaagagctctattaattgccatgtttacaaacaaacacaaagagagaagttagacaggtagatctttagcagtcttttctagtttccctggatttcactgatttattttttagggaaaatgaaaagaggaccttgctgtccgcctgcactgcttcctggtaaactataacaaacttatgctgcc

SEQ ID NO: 526 - protein, 474 aa, Homo sapiens
MWTVQNRESLGLLSFPVMITMVCCAHSTNEPSNMPYVKETVDRLLKGYDIRLRPDFGGPPVDVGMRIDVASIDMVSEVNMDYTLTMYFQQSWKDKRLSYSGIPLNLTLDNRVADQLWVPDTYFLNDKKSFVHGVTVKNRMIRLHPDGTVLYGLRITTTAACMMDLRRYPLDEQNCTLEIESYGYTTDDIEFYWNGGEGAVTGVNKIELPQFSIVDYKMVSKKVEFTTGAYPRLSLSFRLKRNIGYFILQTYMPSTLITILSWVSFWINYDASAARVALGITTVLTMTTISTHLRETLPKIPYVKAIDIYLMGCFVFVFLALLEYAFVNYIFFGKGPQKKGASKQDQSANEKNKLEMNKVQVDAHGNILLSTLEIRNETSGSEVLTSVSDPKATMYSYDSASIQYRKPLSSREAYGRALDRHGVPSKGRIRRRASQLKVKIPDLTDVNSIDKWSRMFFPITFSLFNVVYWLYYVH

SEQ ID NO: 527 - DNA, 3349 bp, Homo sapiens
ggtggactgagccgctcgggacagcggcaccggaggaggctcggagaagatgcggggctcggggccccggggtgcgggacaccggcggcccccaagcggcggcggcgacacccccatcaccccagcgtccctggccggctgctactctgcacctcgacgggctcccctctggacgtgccttctcctgtgcgccgcactccggaccctcctggccagccccagcaacgaagtgaatttattggattcacgcactgtcatgggggacctgggatggattgcttttccaaaaaatgggtgggaagagattggtgaagtggatgaaaattatgcccctatccacacataccaagtatgcaaagtgatggaacagaatcagaataactggcttttgaccagttggatctccaatgaaggtgcttccagaatcttcatagaactcaaatttaccctgcgggactgcaacagccttcctggaggactggggacctgtaaggaaacctttaatatgtattactttgagtcagatgatcagaatgggagaaacatcaaggaaaaccaatacatcaaaattgataccattgctgccgatgaaagctttacagaacttgatcttggtgaccgtgttatgaaactgaatacagaggtcagagatgtaggacctctaagcaaaaagggattttatcttgcttttcaagatgttggtgcttgcattgctctggtttctgtgcgtgtatactataaaaaatgcccttctgtggtacgacacttggctgtcttccctgacaccatcactggagctgattcttcccaattgctcgaagtgtcaggctcctgtgtcaaccattctgtgaccgatgaacctcccaaaatgcactgcagcgccgaaggggagtggctggtgcccatcgggaaatgcatgtgcaaggcaggatatgaagagaaaaatggcacctgtcaagtgtgcagacctgggttcttcaaagcctcacctcacatccagagctgcggcaaatgtccacctcacagttatacccatgaggaagcttcaacctcttgtgtctgtgaaaaggattatttcaggagagagtctgatccacccacaatggcatgcacaagacccccctctgctcctcggaatgccatctcaaatgttaatgaaactagtgtctttctggaatggattccgcctgctgacactggtggaaggaaagacgtgtcatattatattgcatgcaagaagtgcaactcccatgcaggtgtgtgtgaggagtgtggcggtcatgtcaggtaccttccccggcaaagcggcctgaaaaacacctctgtcatgatggtggatctactcgctcacacaaactatacctttgagattgaggcagtgaatggagtgtccgacttgagcccaggagcccggcagtatgtgtctgtaaatgtaaccacaaatcaagcagctccatctccagtcaccaatgtgaaaaaagggaaaattgcaaaaaacagcatctctttgtcttggcaagaaccagatcgtcccaatggaatcatcctagagtatgaaatcaagtattttgaaaaggaccaagagaccagctacacgattatcaaatctaaagagacaactattactgcagagggcttgaaaccagcttcagtttatgtcttccaaattcgagcacgtacagcagcaggctatggtgtcttcagtcgaagatttgagtttgaaaccaccccagtgtttgcagcatccagcgatcaaagccagattcctgtaattgctgtgtctgtgacagtgggagtcattttgttggcagtggttatcggcgtcctcctcagtggaagttgctgcgaatgtggctgtgggagggcttcttccctgtgcgctgttgcccatccaagcctaatatggcggtgtggctacagcaaagcaaaacaagatccagaagaggaaaagatgcattttcataatgggcacattaaactgccaggagtaagaacttacattgatccacatacctatgaggatcccaatcaagctgtccacgaatttgctaaggagatagaagcatcatgtatcaccattgagagagttattggagcaggtgaatttggtgaagtttgtagtggacgtttgaaactaccaggaaaaagagaattacctgtggctatcaaaacccttaaagtaggctatactgaaaagcaacgcagagatttcctaggtgaagcaagtatcatgggacagtttgatcatcctaacatcatccatttagaaggtgtggtgaccaaaagtaaaccagtgatgatcgtgacagagtatatggagaatggctctttagatacatttttgaagaaaaacgatgggcagttcactgtgattcagcttgttggcatgctgagaggtatctctgcaggaatgaagtacctttctgacatgggctatgtgcatagagatcttgctgccagaaacatcttaatcaacagtaaccttgtgtgcaaagtgtctgactttggactttcccgggtactggaagatgatcccgaggcagcctacaccacaaggggaggaaaaattccaatcagatggactgccccagaagcaatagctttccgaaagtttacttctgccagtgatgtctggagttatggaatagtaatgtgggaagttgtgtcttatggagagagaccctactgggagatgaccaatcaagatgtgattaaagcggtagaggaaggctatcgtctgccaagccccatggattgtcctgctgctctctatcagttaatgctggattgctggcagaaagagcgaaatagcaggcccaagtttgatgaaatagtcaacatgttggacaagctgatacgtaacccaagtagtctgaagacgctggttaatgcatcctgcagagtatctaatttattggcagaacatagcccactaggatctggggcctacagatcagtaggtgaatggctagaggcaatcaagatgggccggtatacagagattttcatggaaaatggatacagttcaatggacgctgtggctcaggtgaccttggaggatttgagacggcttggagtgactcttgtcggtcaccagaagaagatcatgaacagccttcaagaaatgaaggtgcagctggtaaacggaatggtgccattgtaacttcatgtaaatgtcgcttcttcaagtgaatgattctgcactttgtaaacagcactgagatttattttaacaaaaaaagggggaaaagggaaaacagtgatttctaaaccttagaaaacatttgcctcagccacagaatttgtaatcatggttttactgaagtatccagttcttagtccttagtct

SEQ ID NO: 528 - protein, 1037 aa, Homo sapiens
MRGSGPRGAGHRRPPSGGGDTPITPASLAGCYSAPRRAPLWTCLLLCAALRTLLASPSNEVNLLDSRTVMGDLGWIAFPKNGWEEIGEVDENYAPIHTYQVCKVMEQNQNNWLLTSWISNEGASRIFIELKFTLRDCNSLPGGLGTCKETFNMYYFESDDQNGRNIKENQYIKIDTIAADESFTELDLGDRVMKLNTEVRDVGPLSKKGFYLAFQDVGACIALVSVRVYYKKCPSVVRHLAVFPDTITGADSSQLLEVSGSCVNHSVTDEPPKMHCSAEGEWLVPIGKCMCKAGYEEKNGTCQVCRPGFFKASPHIQSCGKCPPHSYTHEEASTSCVCEKDYFRRESDPPTMACTRPPSAPRNAISNVNETSVFLEWIPPADTGGRKDVSYYIACKKCNSHAGVCEECGGHVRYLPRQSGLKNTSVMMVDLLAHTNYTFEIEAVNGVSDLSPGARQYVSVNVTTNQAAPSPVTNVKKGKIAKNSISLSWQEPDRPNGIILEYEIKYFEKDQETSYTIIKSKETTITAEGLKPASVYVFQIRARTAAGYGVFSRRFEFETTPVFAASSDQSQIPVIAVSVTVGVILLAVVIGVLLSGSCCECGCGRASSLCAVAHPSLIWRCGYSKAKQDPEEEKMHFHNGHIKLPGVRTYIDPHTYEDPNQAVHEFAKEIEASCITIERVIGAGEFGEVCSGRLKLPGKRELPVAIKTLKVGYTEKQRRDFLGEASIMGQFDHPNIIHLEGVVTKSKPVMIVTEYMENGSLDTFLKKNDGQFTVIQLVGMLRGISAGMKYLSDMGYVHRDLAARNILINSNLVCKVSDFGLSRVLEDDPEAAYTTRGGKIPIRWTAPEAIAFRKFTSASDVWSYGIVMWEVVSYGERPYWEMTNQDVIKAVEEGYRLPSPMDCPAALYQLMLDCWQKERNSRPKFDEIVNMLDKLIRNPSSLKTLVNASCRVSNLLAEHSPLGSGAYRSVGEWLEAIKMGRYTEIFMENGYSSMDAVAQVTLEDLRRLGVTLVGHQKKIMNSLQEMKVQLVNGMVPL

SEQ ID NO: 529 - DNA, 3283 bp, Homo sapiens
ggtggactgagccgctcgggacagcggcaccggaggaggctcggagaagatgcggggctcggggccccggggtgcgggacaccggcggcccccaagcggcggcggcgacacccccatcaccccagcgtccctggccggctgctactctgcacctcgacgggctcccctctggacgtgccttctcctgtgcgccgcactccggaccctcctggccagccccagcaacgaagtgaatttattggattcacgcactgtcatgggggacctgggatggattgcttttccaaaaaatgggtgggaagagattggtgaagtggatgaaaattatgcccctatccacacataccaagtatgcaaagtgatggaacagaatcagaataactggcttttgaccagttggatctccaatgaaggtgcttccagaatcttcatagaactcaaatttaccctgcgggactgcaacagccttcctggaggactggggacctgtaaggaaacctttaatatgtattactttgagtcagatgatcagaatgggagaaacatcaaggaaaaccaatacatcaaaattgataccattgctgccgatgaaagctttacagaacttgatcttggtgaccgtgttatgaaactgaatacagaggtcagagatgtaggacctctaagcaaaaagggattttatcttgcttttcaagatgttggtgcttgcattgctctggtttctgtgcgtgtatactataaagaatgcccttctgtggtacgacacttggctgtcttccctgacaccatcactggagctgattcttcccaattgctcgaagtgtcaggctcctgtgtcaaccattctgtgaccgatgaacctcccaaaatgcactgcagcgccgaaggggagtggctggtgcccatcgggaaatgcatgtgcaaggcaggatatgaagagaaaaatggcacctgtcaagtgtgcagacctgggttcttcaaagcctcacctcacatccagagctgcggcaaatgtccacctcacagttatacccatgaggaagcttcaacctcttgtgtctgtgaaaaggattatttcaggagagagtctgatccacccacaatggcatgcacaagacccccctctgctcctcggaatgccatctcaaatgttaatgaaactagtgtctttctggaatggattccgcctgctgacactggtggaaggaaagacgtgtcatattatattgcatgcaagaagtgcaactcccatgcaggtgtgtgtgaggagtgtggcggtcatgtcaggtaccttccccggcaaagcggcctgaaaaacacctctgtcatgatggtggatctactcgctcacacaaactatacctttgagattgaggcagtgaatggagtgtccgacttgagcccaggagcccggcagtatgtgtctgtaaatgtaaccacaaatcaagcagctccatctccagtcaccaatgtgaaaaaagggaaaattgcaaaaaacagcatctctttgtcttggcaagaaccagatcgtcccaatggaatcatcctagagtatgaaatcaagtattttgaaaaggaccaagagaccagctacacgattatcaaatctaaagagacaactattactgcagagggcttgaaaccagcttcagtttatgtcttccaaattcgagcacgtacagcagcaggctatggtgtcttcagtcgaagatttgagtttgaaaccaccccagtgtttgcagcatccagcgatcaaagccagattcctgtaattgctgtgtctgtgacagtgggagtcattttgttggcagtggttatcggcgtcctcctcagtggaaggcggtgtggctacagcaaagcaaaacaagatccagaagaggaaaagatgcattttcataatgggcacattaaactgccaggagtaagaacttacattgatccacatacctatgaggatcccaatcaagctgtccacgaatttgctaaggagatagaagcatcatgtatcaccattgagagagttattggagcaggtgaatttggtgaagtttgtagtggacgtttgaaactaccaggaaaaagagaattacctgtggctatcaaaacccttaaagtaggctatactgaaaagcaacgcagagatttcctaggtgaagcaagtatcatgggacagtttgatcatcctaacatcatccatttagaaggtgtggtgaccaaaagtaaaccagtgatgatcgtgacagagtatatggagaatggctctttagatacatttttgaagaaaaacgatgggcagttcactgtgattcagcttgttggcatgctgagaggtatctctgcaggaatgaagtacctttctgacatgggctatgtgcatagagatcttgctgccagaaacatcttaatcaacagtaaccttgtgtgcaaagtgtctgactttggactttcccgggtactggaagatgatcccgaggcagcctacaccacaaggggaggaaaaattccaatcagatggactgccccagaagcaatagctttccgaaagtttacttctgccagtgatgtctggagttatggaatagtaatgtgggaagttgtgtcttatggagagagaccctactgggagatgaccaatcaagatgtgattaaagcggtagaggaaggctatcgtctgccaagccccatggattgtcctgctgctctctatcagttaatgctggattgctggcagaaagagcgaaatagcaggcccaagtttgatgaaatagtcaacatgttggacaagctgatacgtaacccaagtagtctgaagacgctggttaatgcatcctgcagagtatctaatttattggcagaacatagcccactaggatctggggcctacagatcagtaggtgaatggctagaggcaatcaagatgggccggtatacagagattttcatggaaaatggatacagttcaatggacgctgtggctcaggtgaccttggaggatttgagacggcttggagtgactcttgtcggtcaccagaagaagatcatgaacagccttcaagaaatgaaggtgcagctggtaaacggaatggtgccattgtaacttcatgtaaatgtcgcttcttcaagtgaatgattctgcactttgtaaacagcactgagatttattttaacaaaaaaagggggaaaagggaaaacagtgatttctaaaccttagaaaacatttgcctcagccacagaatttgtaatcatggttttactgaagtatccagttcttagtccttagtct

SEQ ID NO: 530 - protein, 1015 aa, Homo sapiens
MRGSGPRGAGHRRPPSGGGDTPITPASLAGCYSAPRRAPLWTCLLLCAALRTLLASPSNEVNLLDSRTVMGDLGWIAFPKNGWEEIGEVDENYAPIHTYQVCKVMEQNQNNWLLTSWISNEGASRIFIELKFTLRDCNSLPGGLGTCKETFNMYYFESDDQNGRNIKENQYIKIDTIAADESFTELDLGDRVMKLNTEVRDVGPLSKKGFYLAFQDVGACIALVSVRVYYKECPSVVRHLAVFPDTITGADSSQLLEVSGSCVNHSVTDEPPKMHCSAEGEWLVPIGKCMCKAGYEEKNGTCQVCRPGFFKASPHIQSCGKCPPHSYTHEEASTSCVCEKDYFRRESDPPTMACTRPPSAPRNAISNVNETSVFLEWIPPADTGGRKDVSYYIACKKCNSHAGVCEECGGHVRYLPRQSGLKNTSVMMVDLLAHTNYTFEIEAVNGVSDLSPGARQYVSVNVTTNQAAPSPVTNVKKGKIAKNSISLSWQEPDRPNGIILEYEIKYFEKDQETSYTIIKSKETTITAEGLKPASVYVFQIRARTAAGYGVFSRRFEFETTPVFAASSDQSQIPVIAVSVTVGVILLAVVIGVLLSGRRCGYSKAKQDPEEEKMHFHNGHIKLPGVRTYIDPHTYEDPNQAVHEFAKEIEASCITIERVIGAGEFGEVCSGRLKLPGKRELPVAIKTLKVGYTEKQRRDFLGEASIMGQFDHPNIIHLEGVVTKSKPVMIVTEYMENGSLDTFLKKNDGQFTVIQLVGMLRGISAGMKYLSDMGYVHRDLAARNILINSNLVCKVSDFGLSRVLEDDPEAAYTTRGGKIPIRWTAPEAIAFRKFTSASDVWSYGIVMWEVVSYGERPYWEMTNQDVIKAVEEGYRLPSPMDCPAALYQLMLDCWQKERNSRPKFDEIVNMLDKLIRNPSSLKTLVNASCRVSNLLAEHSPLGSGAYRSVGEWLEAIKMGRYTEIFMENGYSSMDAVAQVTLEDLRRLGVTLVGHQKKIMNSLQEMKVQLVNGMVPL

SEQ ID NO: 531 - DNA, 1007 bp, Homo sapiens
atgtctaagtcagcatctcccaaagagcctgaacaggtgcagagagctttcaaacaaccgatgagagtctgagcagccattcagaaaaatggggaatgctcatggactgtgtggtaatgagagaccaaaacaccaagtgctccaggggctttgggtttgtcacatggaggaggtggatgcagccatggatgcaaggctacataaagtggatgagagttgtaaaaccaaagagagctgtctcaagagaagattctcaaagaccaggtgcctacttaactgtgaaaaagatatttgttggtggcattaaagaagacactgaagaacatcacctaagagattattttgaacagtatgggaaaattgaagtgattgaaatcatgactgaccaaggcagtggcaagaaaaggggctttgcctttgtaacctttgacaaccatgactccgtggataagactgtcattcagaaatagcacactgtgaatggccacaactgtgaaactaggaaagccctgtcaaagcaagagatggctagtgcttcctccagccagaggttgaagtggatctggaaactttggtggtggtcgtggggtggttatggtgggaatgacaactttgttcatggaggaaacgtcagtggtcatgatggctttggtggcagccatggtggtggtggatatggtggctgtggggatggctataatggatttggtaatgatggaagcaattttggaggtggtggaagcaacaacaattttggcaattacaacaatctgtcttcagattttggacccacaaagggaggaaactttggaggcagaagctctggcccctaacgtgggggaggccaatactttgccaaaccacgaaaccaaggtggctatggtagttctggtagcagcactagctatagcagtggcagatttcaattcctgccaggaaagaaaatttcacaggagaggagagccagagaagtgacggggaagctacaggtcacagcagatttgtga

SEQ ID NO: 532 - DNA, 5582 bp, Homo sapiens
ggcgtggggggagcagatgccgctggctgccagcgggacgccggcgagcagagcgcagccgcgagggaggcgcgagggaggcgagccggagcccgagcactagcagcagccggagtcggcgtaaagcacccgggcgcagccggagccggtgccgcagctgcgatggccgtggccgtggggagaccgtctaatgaagagcttcgaaacttgtctttgtctggccatgtgggatttgacagcctccctgaccagctggtcaacaagtctacttctcaaggattctgtttcaacatcctttgtgttggtgagacaggcattggcaaatccacgttaatggacactttgttcaacaccaaatttgaaagtgacccagctactcacaatgaaccaggtgttcggttaaaagccagaagttatgagcttcaggaaagcaatgtacggctgaagttaaccattgttgacaccgtgggatttggagaccagataaataaagatgacagctataagccgatagtagaatatattgatgcccagttcgaggcctacctgcaagaggaattgaagattaaacgttctctcttcaactaccatgacacgaggatccatgcctgcctctactttattgcccctactggacattcactaaagtccctggatctggtcaccatgaaaaagctggacagtaaggtgaacatcattccaataattgcaaaagctgacaccattgccaagaatgaactgcacaaattcaagagtaagatcatgagtgaactggtcagcaatggggtccagatatatcagtttcccactgatgaagaaacggtggcagagattaacgcaacaatgagtgtccatctcccatttgcagtggttggcagcaccgaagaggtgaagattggcaacaagatggcaaaggccaggcagtacccctggggtgtggtgcaggttgagaatgaaaatcattgcgattttgtgaaacttcgagagatgctgatccgcgtgaacatggaggacttgcgagagcagactcacacccgccactatgaattgtaccgacgctgtaagcttgaagagatggggttcaaggacactgaccctgacagcaaacccttcagtcttcaggagacatatgaagcaaaaaggaatgaattcctgggagaactgcagaagaaagaagaagaaatgagacaaatgtttgttatgagagtgaaggagaaagaagctgaacttaaggaggcagagaaagagcttcacgagaagtttgaccttctaaagcggacacaccaagaagaaaagaagaaagtggaagacaagaagaaggagcttgaggaggaggtgaacaacttccagaagaagaaagcagcggctcagttactacagtcccaggcccagcaatctggggcccagcaaaccaagaaagacaaggataagaaaaatgcaagcttcacataaagcctggcaagccaaggatgttcccgcattcacctgcttttgcagtaatatcgtatctctgccatgtgtgttctttagttttattttattttattttatttttttacccttcctcaaacaccagtaactattattaactcgttttgctgaatgttgttgggtggtagaaaatgatagaacaagggaataaccgcgaatgctctgtgcagctggactctgtttccggaaagtaaatgatttgctttttatgcctgttctgaatggcagcacgaagcaggcctgttacttgtatgtcgctttggacagaggaaagtggggtaaaatgctacctgtacgtctgacatgaaaacttctcaccgcctcagcagctgaactaaaaacctgaatagccatgacaagagtttgcattttcttgatgattcatctccatgagtgcacaatccctgaactcactgtcttttctccacacttgtcctaagccaaggtagatttgtacgtagacagactggtgagcaagcattatattttatttttacccttgcatgacattttcattttaatcaataacattatttggcctgagcttgtgggtctgttcagactgtctcctctcatggtttgaaactgcatctgaatgcctgccttcaatcctggccaagttggagtagactggtatgagaaaactatgattagttcacatttactggtgcatccttgatcctctcacagatagaggtcttaaaggttggatcatgtaacattgcttagtagaagaatcttcttctaaggatgatgggctttctacagcctgcttaccactaacagtaaggaatctttcataaacacacctcagtttgttcccagtgggcttagagggaggacctgatgactgattccaggatacttgtacttctaataacatttttcatgaatcatgagaaaatttccacagatacttcccttagaaaatttgctataaactctgtatcattggtagcacaaatttgagcgaggccttgtcaattttaaggtggaaataggaaggaccacaacatgacccgtaagtcaagaaggtagacatttcatatccagcttccttgcttagtctcctttcagtatttggcaataaaagaaagaagaaatagaacagctgaagtctcaaatcattgtctggaattttcctcaccttggctagctccacctgctctttgtctaaggcccttgcctcatcagggattagaactggcccatatgccagaacctgtactaaatgcctaatttgtatggaagagtgcatatttaatctcttttctatactgctcctttctgatgcttatcctttcatctgtgtgattgttttttcccctctactaacaagatcctcccagctttctctctacatgtagaaaggataacatttctcatgaacccactgcccctctgcattttcctcactggttagagattaagtaaataggatagaatatgctgcgtctcccctgacacacactttcttttttgaatgagcaagtctccattttgatttcagcaaagattttttctccttttctttgtcctcaaccatacttagaggaaagaaggaatggtcttccatgaactgattatgcttaattaagcaaagtaaggaaattagtttcatggaagcctaaacaaagctggaatagaaactacacactagacacagcagtagtcatagtcttcacaggtttaggagctactggaccaacattcttgtttttgcttttgtttttttaaataattctagtctggagctaactgtggagcagccaaatagtagctggcatgttgattcaaaccatgggctgaatttgctcataggctgtgcatcagacaaaagcttgaatatttgtgttgtatgcttgttccaaccaccgcttgtgtgagcatttttgtggcttgtacagaaagtacacttttaaattgtctcttgcatcactaaaatttttttaaaatgagcataacaacgaaaggcatccagctgactttttgattccaagattattgattggattgacttttttgcattaaatttttcccagcaaaataaatcatatggcgagtcagggaataaaaagtcaaaagaaacaaatagaagcttttttttttaaaaaatgtattgcttctgaacttttttctgccactgctccctagccctgtttagtttgttattgctgcttttcttttttctttctgtatctatgcctttttttcacagtagtccttggctctgcacggaataaatgataccctcaaatctaattggatgtgctttcgcctttgcatgtaagtacggtagtaagaaacctttgagatctttctgacttttcaaaattagagaaagcaaatgggatggatagattttttttttcttttcaaggggggcaggaaggtaatggtttgagtagcctttgtttaaaaaaaagactaaatatatttaaaaggccacatttatatttttttcacaagaaccacataataaattccacttcttgacctgaatttggaaatccgaaattactaatccaggccaggtgtggtggctcatgcctgtaatcccagcactttgagaggccgaggtgggcagatcacttgaggcctggagttcaagaccaccttggcgaacacggtgaaaccccgtctctacaaaaaatacaaaaattagccaggcgtggtggcacgtgcctgtagtcccagctacttgggaggctaagtcaggagaattgcttgaacttgggagatggaggttgcagtgagccaagattgcaccactgcattccaacctgggtgatgaagtgagactctccaaaaaaaaaaaagaaattattaatccctgcctgtgctctacatagcctcatgggcatcattggatagctcagagggcccttgattctggcaaggcaaataaagccagaatgagaaattaccatcttctactagagaaaaccaagagaaaaatttttatgctaggatgcctttatgaccacttaattttttaatcttagtttaatggtctctccctggtgctaactgctgacagtggccacctcttttttggggattgaggggcctacataactagctggccttaccccatatcttttgttcaaacataataccatctttttgcttcttctgaactttagatctccataacacatgtactgtagaatgtgatggaaaagcattgatgagaatttattggcagttcagattgtgttttcccaacttaggctctttattaattggttaaggttttctccaaaaagggcatttcaacaatgggaattatttaatgtaacagtgggcacagattacttatcttccttctctgctttgtgactcaccagcagtaacacacacaatccacatcttgtgcacctcaaatgaacagacttggtttccttgctttcttgacatttccatgactgtttcacatacaaactattgggtgaggtttttcagctgttaccgacccacgtcctgctgtctctgtgtggtcctacaaaaactgtccattcccacccctttgctttgccatttgcaagagtctggaattgtcaggtctcagcttcgaaaagtcctggttccactgacaggacacattctttagtgggaattaagacctacaaagtctagtttgtatgtaggtatgaagggaattttttaaataaattgaaaagctgtgaacagcattagaactttgtctatttcttaattttaaaatatgctgatatgccttaaactgtagttgtagatccttgtcattttgctgtttgaaaataaccaatgtgttttctaaaactgtcgtgtaatctactttcattgttaatgcagaattgtcatatatgtaagctgcatgttagacatttgtcttttttaaactaaagtaattgtattgatgtgaagcatatcattttttcaaatatgaaagtgatcacttagcaacatgcttggtaatttggcatctgttaaggtaggagagtggtgaacagataatctatgcatatatcactagtgccaagacataaagcgggggaaaatatatttttacccaaacattaaaaaaaaaaaaaaaaaaaaaaaaaaaa

SEQ ID NO: 533 - protein, 429 aa, Homo sapiens
MAVAVGRPSNEELRNLSLSGHVGFDSLPDQLVNKSTSQGFCFNILCVGETGIGKSTLMDTLFNTKFESDPATHNEPGVRLKARSYELQESNVRLKLTIVDTVGFGDQINKDDSYKPIVEYIDAQFEAYLQEELKIKRSLFNYHDTRIHACLYFIAPTGHSLKSLDLVTMKKLDSKVNIIPIIAKADTIAKNELHKFKSKIMSELVSNGVQIYQFPTDEETVAEINATMSVHLPFAVVGSTEEVKIGNKMAKARQYPWGVVQVENENHCDFVKLREMLIRVNMEDLREQTHTRHYELYRRCKLEEMGFKDTDPDSKPFSLQETYEAKRNEFLGELQKKEEEMRQMFVMRVKEKEAELKEAEKELHEKFDLLKRTHQEEKKKVEDKKKELEEEVNNFQKKKAAAQLLQSQAQQSGAQQTKKDKDKKNASFT

SEQ ID NO: 534 - DNA, 1890 bp, Homo sapiens
cccgcgagcggacgcggcagcgcctctgtctcgctttttcttatttttcccccctttcccctttctttttttttttttcttttcttttctcccctccccccctttcaccatttcccctcggaggcgctttccccgggcaggggcagagccggtctcaccccccgcctctccccggcccccgccgccctatggcgagagggagccccctcccaacccgggctcgagcggcggcggcctcaggccgggggtcatcatggaactaattcgctgaccgacccagcggccgcagccgtgcgtcccgctcgagcgccagcgcccgcgcccgcgccccccgatccgcttcccctttctccctcctcagttggccgagtcgtcccgcgcgcaccgcctccgcgcgcctatgagaatgaggtggtaacgggcccccggatgaccccgcgtcaccactgtgaggcctacagctctgccggggaggaggaggaggaggaagaggaggagaaggtagctacagcaagctgggtagcaggcagatccaaaggatatcatgaagtttccagggcctttggaaaaccagagattgtctttcctgttggaaaaggcaatcactagggaagcacagatgtggaaagtgaatgtgcggaaaatgccttcaaatcagaatgtttctccatcccagagagatgaagtaattcaatggctggccaaactcaagtaccaattcaacctttacccagaaacatttgctctggctagcagtcttttggataggtttttagctaccgtaaaggctcatccaaaatacttgagttgtattgcaatcagctgttttttcctagctgccaagactgttgaggaagatgagagaattccagtactaaaggtattggcaagagacagtttctgtggatgttcctcatctgaaattttgagaatggagagaattattctggataagttgaattgggatcttcacacagccacaccattggattttcttcatattttccatgccattgcagtgtcaactaggcctcagttacttttcagtttgcccaaattgagcccatctcaacatttggcagtccttaccaagcaactacttcactgtatggcctgcaaccaacttctgcaattcagaggatccatgcttgctctggccatggttagtctggaaatggagaaactcattcctgattggctttctcttacaattgaactgcttcagaaagcacagatggatagctcccagttgatccattgtcgggagcttgtggcacatcacctttctactctgcagtcttccctgcctctgaattccgtttatgtctaccgtcccctcaagcacaccctggtgacctgtgacaaaggagtgttcagattacatccctcctctgtcccaggcccagacttctccaaggacaacagcaagccagaagtgccagtcagaggtacagcagccttttaccatcatctcccagctgccagtgggtgcaagcagacctctactaaacgcaaagtagaggaaatggaagtggatgacttctatgatggaatcaaacggctctataatgaagataatgtctcagaaaatgtgggttctgtgtgtggcactgatttatcaagacaagagggacatgcttccccttgtccacctttgcagcctgtttctgtcatgtagtttcaacaagtgctacctttgagtgtaaactaaggtagactactttgggaatgagaacatgcaaaatcaggaaaggctgtagaaggaaatataccttaacaggctgatttggagtgagccagaaaaaaaaaataaaactctcattatttgtgtggctaattataattcagcgttatttaagcacataaagaccaaaaaaaaaaaaaaaaaaa

SEQ ID NO: 535 - protein, 377 aa, Homo sapiens
MKFPGPLENQRLSFLLEKAITREAQMWKVNVRKMPSNQNVSPSQRDEVIQWLAKLKYQFNLYPETFALASSLLDRFLATVKAHPKYLSCIAISCFFLAAKTVEEDERIPVLKVLARDSFCGCSSSEILRMERIILDKLNWDLHTATPLDFLHIFHAIAVSTRPQLLFSLPKLSPSQHLAVLTKQLLHCMACNQLLQFRGSMLALAMVSLEMEKLIPDWLSLTIELLQKAQMDSSQLIHCRELVAHHLSTLQSSLPLNSVYVYRPLKHTLVTCDKGVFRLHPSSVPGPDFSKDNSKPEVPVRGTAAFYHHLPAASGCKQTSTKRKVEEMEVDDFYDGIKRLYNEDNVSENVGSVCGTDLSRQEGHASPCPPLQPVSVM

SEQ ID NO: 536 - DNA, 1600 bp, Homo sapiens
atgtctctatggtcaagtaaacagagtgagtgctgtcttccccatgtggtggggttgtgccagatcagtagctgctacactagaaagacggtggatcaagggcaaagaaaaatccctttggttccagaaaatctcctgaaaaaggtgaaggcttatcaagccctcaaagccacccaggcaaagcaggcacttttggcaaagaaggagcaaaggaaaagagctcaggtttaagcgactggaatcattccaacatgattcctggtggcagaaacatgacaagctgcttctcagacaactagaagtgaaacctcatgccttggaattgccagatgaacattccttggcctttgttgtgtgcatcaaaaggattgatggtgtgagtttactggggcagagaaccattgcaagacttcgcctaaagaaaatttttaatggtgtctttgtaaaagccacccccaagaacctaaaaatgctgcgtatagtggaaccttatgtgacctagggatttccaaatctgaagtctgtccaggaattttgaattttgaaacgtggacaagccaaggtcaagaataagaccatctctctgacagaaaacacagtgattgaggagcacctggggaagtttggtgtcatttgcttggaagacctcattcatgaaactgccttcccagggaagcatttccaggagagctcatggttcttgtgccctttccaccactcagtggcccgtcatgctaccaaaaatagagtgggcttcctcaaggagatgggcacagctggctatcagggtgaatgcatcaatcagctcatccgccagctgaaccagacccaggtgccaaatggcaccacgagaaaacgtcctccctccttccatcctagtgccaacgacttccccagcccgtctcctttcggccgcacttctctgtactttcgttggaccgggaaggcggcggggaggaacaggaagggtgaaagaccaagtccgcgtagtttacaaggagtgggcgagtctaggaatcggggcagagccggtctcaccccccgcctctccccggcccccgccgccctatggcgagagggagccccctcccaacccgggctcgagcggcggcggcctcaggccgggggtcatcatggaactaattcgctgaccgacccagcggccgcagccgtgcgtcccgctcgagcgccagcgcccgcgcccgcgccccccgatccgcttcccctttctccctcctcagttggccgagtcgtcccgcgcgcaccgcctccgcgcgcctatgagaatgaggtggtaacgggcccccggatgaccccgcgtcaccactgtgaggcctacagctctgccggggaggaggaggaggaggaagaggaggagaaggtgaggggcgggggcgggggcgggggctcgacgcgtctccgcggccggcgtcgacgcgctggggccccgctgctccccccgcgccgcccccgtggcagcgcccttggccgcgcgctgctcgccggagacccaccctcccgcatcccccagcccggggaacctcggggccgccctcttcgtcctctccggcccagacagacccgtcacctgcccacttga

SEQ ID NO: 537 - DNA, 1045 bp, Homo sapiens
atgggagataacaaagttgacatggtttttatgttccataatccatatggaggacacaagcccaagggaactaaaatctggtacacaatcatcatggcagcggccggggccccggatggcatggaggaacctggcatggacaccgaagctaagaccgtggcgaccgaggcgctggcacggcccctcaactgcttggaggccgaagccacggcaggagcgggggcagggacggtggccgaggactccggcaccgcgcgaggcagcctgcagcctgcagccggccccagcccaggcccctggagaccccgtgtcccaggcttctgtcagcaacggcgaagactcgggcggcagcgcagacagcgagctggtggacctgaggatcatctggaacaagaccaagcacgacgtgaagttccccctggacagcacaggctccgaactgaaacagaagatccactgattacaggtctcccgcctgccatacagaaagtcatgtataagggactcgtccctgaggataagacattgagagaaataaaagtgaccagtggggccaagatcatggtggttggctccaccatcaatgatgttttagcagtaaacacacccaaagatgctgcgcagcaggatgcaaaggccaaagacaacaagaaggagcctctctgcaggcagaaacaacacaggaaagcgttggataaaggaaaacccgaagatgtgatgccatctgttaagggggcccaggagcacctacaaaaggtacccctgcccagcatgtacaataagtccggaggaaaagtgagattcaccttgaagttagaacaacaccgactgtggattggcagtaaagagcggactgagaaattgcccatgggatccataaaaaatgtggtcagtgaacatatggaaggacatgaagactaccacatgatgggtttcagttgggccccacgaaagcctcttactactgactaatgggtgtactgggttccaactcaatatgtggatgcaatcaaagactgtgctggggaaatggcagtatttttga

SEQ ID NO: 538 - DNA, 7318 bp, Homo sapiens
gagcccattagccgcacaaattcgcagcaggcggctggggcggcggctggggcagcggctgcagcagcggcggacgctctgcattacccagtcttgcgtcctcggcaggcgcccgaagctgagtgcgcatcctctaccgcacccaagcttcgtctgtctcgtcaagctcttcatgctgcccaactaaaaggaaaacatgggcacaggggattttatctgcatttccatgactggaggggcgccctgggggttcagattgcaaggtggcaaggagcagaagcagcccttacaagttgcaaagattcgaaatcagagcaaagcctctgggtctgggctctgtgagggagatgaagtggtttccatcaatggcaacccttgtgcagatctcacctaccctgaagtcatcaagctcatggaaagcataacagactctctccaaatgctcatcaaaagaccatccagtggaataagtgaggctttgatatctgaaaatgaaaacaaaaacctcgagcatctcacacatgggggttatgtggaaagtaccaccctgcagattcgaccggccacaaagacccagtgcacagaattcttcctcgcccctgtcaagactgaagttcccctagctgagaaccaaagaagtggtcccgactgtgcaggcagcttgaaagaagaaacaggcccgagctaccaaagggctccccaaatgcctgactcccaaagaggacgcgtggcagaagagctgatcttaagggagaaggtagaagcggtacagcctgggcctgtggttgagctgcaactgtccctttcacaggagagacataagggcgctagtggccctttagtggctctcccgggagctgaaaaatctaagtctcctgacccagaccctaacttgtcacatgacaggattgtccacataaattcgatccctactaatgagaaagcagaccctttcctgaggtccagcaagataatccagatctccagtggcagagagttgagagtgatccaggaaagtgaagcaggagatgcgggactgccccgggtggaagtgatcctcgactgctctgacaggcagaagacagaagggtgcaggcttcaggcaggaaaggagtgtgtggattctccagtggaaggagggcagtcagaagcacctccttctctggtatcctttgccgtctcatcagaaggcacagagcagggagaagatccacgctcggaaaaagatcacagcagacctcacaagcaccgagcgcggcatgcacggctcaggaggagtgaaagcctgtcagaaaaacaagtgaaggaagcaaaatctaaatgcaaaagcattgcccttcttctaacggatgctcccagccccaactccaagggggtgttgatgtttaagaagcgacgtcggagggccaggaaatacaccctagttagctacggtactggcgagcttgagcgagaggcggacgaggaggaagaaggtgacaaggaggatacatgtgaagtagcatttcttggtgcaagcgaatcagaggtggatgaagagttattgtctgacgttgacgacaacacacaagttgtgaactttgactgggattctggactggtggacattgaaaagaaactgaacagaggggacaagatggagatgttaccagacaccacaggcaagggagccctcatgtttgccaagaggagggagagaatggatcagatcacagcccaaaaagaagaggacaaggtaggtggaacgccaagcagagaacaagatgctgcccagaccgatggcctgagaaccacgacttcttaccaaagaaaggaggaagagtcggtaagaacgcagagctctgtgagcaaaagctacatcgaggtgagtcatggtcttggccatgttccccaacagaatggcttcagtggggcatctgagacagcaaacatccagaggatggtccccatgaatagaacggccaaacccttcccagggtctgtgaatcagccagctacccccttctcgccaacccgaaacatgacgagtcccattgctgactttcctgcacctccaccttactctgcagtcactcctccccctgacgccttctccagaggggtttcaagtccgattgctggcccagcacagccccctccatggccccagcctgccccgtggtcccagccagccttttacgattcgtctgagcgaatagcttcccgagatgagaggatctcagtgccagcaaaaagaacaggaatattgcaggaggccaaaaggagaagcacgacaaaacccatgtttacttttaaagagcccaaagtaagcccaaatcctgaactcttgtcactccttcaaaattcagaaggcaaacggggcactggagctggaggtgattccggaccggaagaagactacctcagcttgggggcagaggcttgtaatttcatgcaaagctcctctgccaaacaaaagacccctcctcctgttgctccaaaacctgcagtcaagtcctcatcctcccaaccagtaactccagtttccccagtctggtctccaggagtggctcccacccaacctcctgccttccccacatccaacccatcaaagggcaccgttgtctcctccatcaaaatagcccagccttcttaccctcctgcccggcctgcaagtactttgaacgtggctggtcccttcaaaggaccacaagcagcagtagccagtcagaattacacacccaaaccaacagtttccacaccaacagtcaatgctgttcagcctggtgcagtgggaccatccaatgagcttccaggaatgagtgggagaggagctcagctctttgctaaaaggcagtcgagaatggagaagtatgtggtcgattcagacacggtgcaggcccacgctgctcgagctcagtctcccactccatctctcccggccagttggaagtactcctccaatgtccgagcacctcctcctgtggcctataatcctatccactcgccgtcttacccactggctgctctcaagtctcagccatcagctgcacagccctccaaaatgggcaagaaaaagggaaagaaacccctcaatgcattagatgtcatgaagcaccaaccgtatcagctcaatgcatccttgtttactttccaacctccagatgcaaaggatggcctcccccagaagtcatcagtcaaggtcaattcagccctggccatgaagcaagctcttcctccccggccagtgaatgctgcctcacctacgaatgtgcaggcttcgtcagtgtactcggtaccagcctatacctctcctccttccttctttgcagaggcctcctcaccagtcagtgcatccccagtgcctgtgggcattcccacctcgccaaagcaagaatcagcctcatcatcttattttgtggcaccaaggccaaagttctcagccaagaaaagtggtgtcacaattcaggagagtgggcgctccctttctcttcctggaagatcagtcccaccccccatttctacatctccttgggtataccagcctacttatagttactctagtaaaccaaccgatggactagagaaagcaaacaagagaccaactccttgggaagcagcagcaaagtctcctctcggtctagtggatgatgctttccaacccagaaacatccaggaatccattgtgacaaatgtggtttcagcagctcggaggaaggtgcttccagggcctccagaggattggaatgaaagactgtcctatattcctcaaacccagaaggcctatatgggctcatgtggaaggcaagagtataatgtcacagccaataataatatgtccaccacctcccaatatggttcacagttgccatatgcatattataggcaggcttcaagaaatgattctgcaatcatgtccatggaaaccaggtctgattactgtcttccagtagctgattacaactacaacccacacccaaggggatggagacgccaaacatgaaagttagaagaacggatcatgtgccaactgtagttttttaaaaaaacgctcctttgtagggttttaaacttttctaatagatttagattcacttttggtcttggcttgttctcataagtcatttatctaagtttgtgtttctgtgtgtgtgtatgtgtgtgtatgtatgtgaatatacacacacacacacacaggtaagtgtgaatacttccttgttggctgatccatagagcattactttgaagaaaatttcactatttgcattgatgtgctggcatttatatgtaattcataattttgattccattaataggtagtctatgcaactaaactctactcaattaaagtaaaactaagtatttcttcattgtaccttagtccaggaagaaattaatggaatatggtgtgctaattatcactacctataacatgaggaatataacattgcagaaatttctcataggggcatgccagtgagcaattactttataaaaatattttccttggtgttaagtatttctctgcaacttttttttttttttgagatggagtcttgctctgtcccacccagtctggagtgcaatggtgcgatcttggctcactgcaacctgcgcctcctgggttcaagcaattctcctgcctcagcctcctgaatagctgggattacaggcatgcatcaccacacctggctaatttttgtatttttagtagacacaaagtttcaccatgttggtcagactggtcttgaactcctgacctcgtgatctacccacctcagcctcccaaagtgctgggattacaggcgtgagccaccacacctggcctttctgcaacatttttttaaaaaaatctaataaatcttagatttttaaaaaagaattaaaatgtgggagttctcagaaagaaataaacacatgagaataagattattacacattttggaaggacttttgaggaatgatgtgatgtgtagagaatagaaagatttagatatatgcctgtgacaggaatagattctgggttcaggtgtccccatctgtcaaatgagaagattggattatctaatcttttagatccttaacaactctgatattctgagattctctcatttgtagaatgcccgctgatgcattgtttattttttttgctcataatataaatatcagattatgtttaggagtggattaggtaattagtgtcactacatgtatcgttaaaggtcctaaaaggaattgttaggcggcaggctttgtgttacgtgttacatggagtgagggtagatgtgaagatttaaaacgattgatggatttaaggaagtggtacataaatatgtctgttattatgcaatcgtaggtcatgataatttattcagttatagaaaacatgccacagaagccgatgtaacaagtggtgcttctttagaaagctgtcattaggatgttctgaggaagttaagcagctgcttcatcaatcccatgacacatgccttgttagcatgcccatcaaataatcagatcaaacacctgctccttattgccatacccacgaactgttaaatacaaaaaaattcaaagtatttgacatcttaagcaaatatccagaatatttttaagtaaaaaaccatcttaagtattcaaaatttccttggctttttaaaggtgataattttgctttgtgttacttttttgctcttgaatgtatcgttatgatggtctcttataatcatggtatctttcacagaataaaaattaaaaataatgccagggtgcaagtgaccaaggccttatcttgaaagttaaaaaaaaaaagtaaagaaatcacagtaagttctattagtgatgatagaaccagatataaaattgttcagtgatggagaaaagaaacgataaatactttccaaggttatattgctaaattatcttaaattatcaaggtgtaaggtgtaatgatcccaagagtttttatagaatcctaaaaaataatgcctgatgtatagattagttagcaaattctcagaaatcccccacataaaagccttactttgttcaaaatttattatagtggtttaatcattttagatttgaatgttttaagataggagagacttagcagaaaatacttggcttgccagggccacgttctacttcattgctttcttttataagtgcaaggagttatttccatcagttgacgtagatattattcactaaaattttcagcagactcaaaatagagaggagactttaaacttacatgttagtataaaacagacttctctctcattgcatgcactagatcaatattatcatctgtattaagctatctgaatttattcgagacattaagaaaaagacagtacatggtgggaaagctgcacatttctcacaaggaaaaaaacattctatatttgtagcagaaatcagtggtttgaaaagtcatactttgcagatatgaacctgaaaatcaaagtgccattgttaaatcatcctaaagtgtactgtgggtattcttctccagcatacttgaaaatgaataaagttagattgctcacattgaagctaatggttgagacaagacacccgccagagtgaagtttgattcctatgggtgagaagatgtagatgactattgttctcactaaagttctaaaataatagcaagtgtagagaagagccgttgctttgaaaatacataccacatttgttataaagcatttgtttgttagtagcaatcacataggtagaaagagtttgagttttactgtggattaaaaagccttccctaaaaagagagcatgccagtcatagagacactaatttggcacttttcctccttcttaggtttaaatgttataccaatgcatgtgtttgaaatatctattaagatgatttaaaatttgtcttgtattttgagtttcttaaatgcgtggattcttgttcatttatctctgaatatgtctcttttatattttggcacaattatacacattggaaagggccaacctattagggctcaagtatgtatatgcaaaaaaaaaagttatatcaaacaggcacagttattacaactagagagaaattccagaaatatttgtttttttaagagaaagtaaattttcacattagatttctattcaaagtactaatatctacatggtccacacttttctattttaaaaaattgtgttctcttgttaaatagattaacatttccacttctgtttatcacaaaagactgtatttgaaatatgcatacggaaaattgaaattatattagtaataaatgtaacttgaaaaatcaaaaaaaaaaaaaaaaaagaaaaaaaaaaaaaaaaaa

SEQ ID NO: 539 - protein, 1261 aa, Homo sapiens
MGTGDFICISMTGGAPWGFRLQGGKEQKQPLQVAKIRNQSKASGSGLCEGDEVVSINGNPCADLTYPEVIKLMESITDSLQMLIKRPSSGISEALISENENKNLEHLTHGGYVESTTLQIRPATKTQCTEFFLAPVKTEVPLAENQRSGPDCAGSLKEETGPSYQRAPQMPDSQRGRVAEELILREKVEAVQPGPVVELQLSLSQERHKGASGPLVALPGAEKSKSPDPDPNLSHDRIVHINSIPTNEKADPFLRSSKIIQISSGRELRVIQESEAGDAGLPRVEVILDCSDRQKTEGCRLQAGKECVDSPVEGGQSEAPPSLVSFAVSSEGTEQGEDPRSEKDHSRPHKHRARHARLRRSESLSEKQVKEAKSKCKSIALLLTDAPSPNSKGVLMFKKRRRRARKYTLVSYGTGELEREADEEEEGDKEDTCEVAFLGASESEVDEELLSDVDDNTQVVNFDWDSGLVDIEKKLNRGDKMEMLPDTTGKGALMFAKRRERMDQITAQKEEDKVGGTPSREQDAAQTDGLRTTTSYQRKEEESVRTQSSVSKSYIEVSHGLGHVPQQNGFSGASETANIQRMVPMNRTAKPFPGSVNQPATPFSPTRNMTSPIADFPAPPPYSAVTPPPDAFSRGVSSPIAGPAQPPPWPQPAPWSQPAFYDSSERIASRDERISVPAKRTGILQEAKRRSTTKPMFTFKEPKVSPNPELLSLLQNSEGKRGTGAGGDSGPEEDYLSLGAEACNFMQSSSAKQKTPPPVAPKPAVKSSSSQPVTPVSPVWSPGVAPTQPPAFPTSNPSKGTVVSSIKIAQPSYPPARPASTLNVAGPFKGPQAAVASQNYTPKPTVSTPTVNAVQPGAVGPSNELPGMSGRGAQLFAKRQSRMEKYVVDSDTVQAHAARAQSPTPSLPASWKYSSNVRAPPPVAYNPIHSPSYPLAALKSQPSAAQPSKMGKKKGKKPLNALDVMKHQPYQLNASLFTFQPPDAKDGLPQKSSVKVNSALAMKQALPPRPVNAASPTNVQASSVYSVPAYTSPPSFFAEASSPVSASPVPVGIPTSPKQESASSSYFVAPRPKFSAKKSGVTIQESGRSLSLPGRSVPPPISTSPWVYQPTYSYSSKPTDGLEKANKRPTPWEAAAKSPLGLVDDAFQPRNIQESIVTNVVSAARRKVLPGPPEDWNERLSYIPQTQKAYMGSCGRQEYNVTANNNMSTTSQYGSQLPYAYYRQASRNDSAIMSMETRSDYCLPVADYNYNPHPRGWRRQT

SEQ ID NO: 540 - DNA, 7763 bp, Homo sapiens
aaaatttaggaaaagtgttgctgagctgtggaatcaggcgtttctccctcagttcaacaactaatacatagactgctgatcaagaataaggaaccaaataaagtcatgcacgttctgttgacagaggaactctgtggctgttgaattttactgtaactagttactctgtcttcagagtcaacttaatatacaagttatgtcataatggatggaaagacctgtgttgatgtatccagactctagcaaatgaagataaaaaacccgttatgactaatccttgggaagagaaagtctgcaaaatggctcaaaccagtttactgcaagggaagcagttttactgtagggagtgggttttccacaagcttcagcattgcctccaggagaaaagtaactgctgcaatagtgctgtcaatgcaccatcacttgtaatgaattctgggaataatgctagtggtgtctctggaaagggagctgcctggggtgtgttgttggtaggagggcctggcagtggcaagacggccctatgtactgaactcttatggccaagttcacctgcaagtttgcagagaggtttacatcgccaagctttggcctttcatttctgcaaagcccaggactctgatactttgtgtgttggagggtttattagaggtctagtagcccagatctgccgcagtggactactccaaggatatgaggacaagctaagggatccagcagtccaaagcctcttacagcctggggagtgcgagagaaacccagccgaagcatttaaaaggtgtgttctactccctcttctgggaatgaagcctccccagcaaagcctatacctgcttgttgattctgttgatgaagggtgtaacattactgaaggtgaacaaacgtctaccagcttatctgggactgttgcagcacttttagctggtcaccatgagttctttccaccatggctattgcttctctgttctgcccgaaagcagagtaaggctgttactaaaatgtttactggttttcgaaaaataagtttagatgaccttcggaaggcatatatcgtcaaggatgttcagcagtacattcttcatcgtttagatcaagaagaagctttgcgacaacacctcacaaaagaaactgcagagatgttaaatcaactgcacattaaaagcagtggatgctttctttacctagaacgagttttagatggagttgtagaaaattttattatgttaagagaaattcgtgacatcccaggaactctaaatggtttatatctctggctgtgccaaagactttttgtaagaaaacaatttgcaaaggttcagcctattttgaatgtgattcttgcagcctgccgacctttgaccataacggaattatatcacgcagtatggaccaaaaacatgtcgttaactttggaagattttcaacgcaagttagatatcctctccaaacttcttgttgatggactaggaaatacaaaaatactgtttcattatagttttgccgagtggcttctggatgtgaaacactgtactcagaagtatttatgtaatgcagcagaaggacacagaatgttggctatgagttatacctgtcaagccaagaatttaacaccattggaagcacaagaatttgcattgcacttaattaactcaaacttacaattagagacagcggagttagctctgtggatgatatggaatggtacacctgtcagagattccctttctactttgatacccaaggaacaagaagtgctacagctgttggttaaagctggggctcatgtcaacagtgaagacgatcgcacatcatgcatagttcgacaagccttagaaagagaggattccattcggacattattagataatggagcttcagtaaatcagtgtgattcaaatgggagaacattattggctaatgctgcatatagtggcagtcttgatgtagtcaatttacttgtctctaggggagcagatttagagatagaagatgctcatggacatacaccactcactctagcggctagacagggacataccaaggtggttaattgtttgattgggtgtggagcaaatattaatcatactgatcaagatggttggacagcattaagatctgctgcttggggtggccatactgaggtagtttctgcactactttatgctggcgtaaaagtggattgtgcagatgctgatagccgaacagctttgagagcagcagcatggggaggacacgaggatattgtactgaatttgctacaacatggcgctgaagtgaacaaagctgataatgaaggtagaactgctttgatagcagcagcatacatgggacatagagagattgtggaacacctactggaccatggagcagaagtaaatcatgaggatgttgatggcaggactgcactctctgtagctgcactttgtgtgcctgcaagtaaagggcacgcatcagttgttagccttttaattgatcgaggtgctgaagtagatcattgtgataaagatggcatgactccactgctggtagctgcctatgaaggacatgttgatgtggttgacttgcttctagaagggggagcagatgtagatcacacagataacaatggccgtacacccctcttagcagcagcgtctatgggtcatgcatcagttgtaaatacacttttgttttggggtgcagctgtggatagtattgatagtgaaggtaggacagtcctcagtatagcttcagcacaaggaaatgttgaggtggtacgtactctactggatagagggttagatgaaaatcacagagatgatgctggatggacacctttgcacatggcagcttttgaagggcacagattgatatgtgaagcacttattgaacaaggtgctagaacaaatgagattgacaatgatggacgaatccctttcatattagcttcacaagagggtcattatgattgtgttcaaatattactggaaaacaaatccaacattgatcaaagaggttatgatggaagaaatgcactgcgggttgctgcattagaagggcacagggacattgttgaattgctttttagccatggtgctgatgttaactgcaaagatgctgatggtcggcctacactttatatcttggccttagaaaatcagcttacaatggccgaatattttttagaaaatggtgcaaacgtagaagcaagtgatgctgaaggaaggacagcacttcatgtgtcttgttggcaaggccatatggaaatggtgcaggtcctgatagcataccatgctgacgtcaatgctgcagacaatgaaaagcgctctgctttgcagtctgcagcctggcagggccatgtaaaagtggttcagcttctgattgagcatggtgctgtagttgaccatacatgtaaccaaggtgcaactgcactctgtattgcagcccaggaagggcacattgatgttgttcaggtcttattagagcatggtgctgatccaaaccatgctgatcaatttggacgcactgctatgcgtgttgcagccaaaaatggacattctcagataattaaattattagaaaaatatggtgcatctagtttgaatggctgttccccatctcctgttcacacaatggagcaaaaacctctacagtcattgtcttcaaaagtgcagtcattaacaattaaatcaaatagctctggtagtactggtggaggggatatgcagccttcgttacgtggtttacctaatgggcctactcatgcttttagttctccttcagaatctccagattctacagttgaccggcagaagtcatcactgtcaaataattccctgaaaagctcaaaaaattcatctttgagaactacttcatctacagcaacggctcaaacagtgccaattgatagctttcataacttgtcatttacagaacaaattcagcagcattcattgccacgcagtagaagtcgacagtcaattgtttccccatcttccacaacacagtccttaggacagagtcataattcaccaagtagtgaatttgagtggagtcaagtaaagcccagtttgaagtcaactaaagcaagtaaaggggggaaatcagaaaattctgccaagtctggatcagctgggaaaaaagcgaaacaaagtaattcttcacagccaaaggttttagaatatgaaatgactcagtttgatagaagaggacctatagccaaatccgggactgctgcaccacctaaacaaatgccagcagaatctcaatgcaaaattatgataccttcagctcagcaggaaattggtcgatctcaacagcagtttcttattcaccaacaaagtggggaacagaagaagagaaatggaataatgacaaatccaaattatcatcttcagagcaaccaggtttttcttggtagggtttcagtcccacgaacaatgcaagatagagggcatcaggaagtgttggagggatacccttcctcagagacagaattaagccttaaacaagctctgaagcttcagattgaaggttctgaccctagcttcaactataaaaaggaaacaccattataaaagtttcctattctgtgaaacagaagacattgtgatggagtggttcttcagctactggatggaaacatatgcctgttgatttgctgaaaaaacaaaaaaaatgaagaatgtgatctctgcagtacagttaccttaattactgtaatgtgcctaaatagtaaggctgccttctcaatgtaaccctctgtgcttaaaaaatttcattttgtgtgctttgtattcactacacaggaataagcactttttaaaaatgcagatacatactgcagttccctgataaaagctgaaaagaaaatttgagtattttaagttaagatgtgataaaaaatgtgcatgtgccataatcaaatatatatgaaaaggcagtgttccttgtatttatttttttttctttttgtggcaaaagaaacttaaacatactgtttcagtcacattgcattgtagtgtatggcctgtttcttgtatctttaaagacgttgctcaataaaacaaatcttgcaactgttctatgttcactacaccttcagcattggataaaaatcattttctatataaatatcacattgaaatgaaaaaatgatttcttggcagtttaaaaaaaatattttatagtagtttagggagctgctttaagtagtttaaatctggattttcccagtagaattcttctcatctctggctaaacatgtcagaacaaacaaccaaccagtctgtaggcagaacaaagtcctatttcatccgctgggatacaatttcatcttccattcactttgtcattccacctctaagaagacagactatcattcctgaggcatgaaaattctcagggacaaagccatgcctcagtcacatgtgtgtgcagagagaaatgcacctgtctatctaagggtagatttttgatccctgaataattcattgactaaactgacctcttcctcctggctaaataaattaattttgctggcttctctctcagcggtttctattttgtaaattgctgcatgaccaaaatagccccactcaaaatcaattggattaattttaatggtttggttggatgaatattctggatgaatataaaatgtgctgcccttcacagatgacaccactcccctgtcaatcatagcacatgtgtactttttattgttacttaatagtgatggatttgcacttttctatcctcatactctttcctgttttcttctttgtacaattgcatgcaggagggctggatgccagggttaagagagaaattcatgacaaggaaggtaaaattggttcaaatgagcatgtgtcccacagccttagtctccttactcttaaatcagtggagctgtagcttagatgggtcgtttatatgtctggaaaagttgtcataacagtttagaagccaaggttgtggatttgatcttagaatgggcctgttaatcttatagaacccagaaattctgttcttttcatgtactgttgatgaggaatgaggaaagagaatttggagattcagcacaaaaccattgctacttctagaacaaaatctttagaatatgtcctaataacaaaggtcagtaatgtcatcttcatatatgaaggacacatgtgatacattgttcgtggaaatagaaatgtataattatgataaatgtttcacttgaatcttattgtaaggcttttcttgcttttattttttaaagtcagcaaaactcattttgtctgtcatctataagtcatagtgaggactacgagataagttgataagttcaattgatattaaggtgacatggcaatattaataactcaaatgtgaatgtttcaagtattgaattcttgtccctatgggacatttattaaataaaattaatgggactcttgcaaagtagccttaaaagtgttaatgagtctattaataaatatgaacacatactattattagaaccaactttactcatatctcaaatacagtacatttacattactgtagaggatgaagctctaatttctattacatgtaattttctttagaaagagaaccctgaaagctgccagtttttctattaactttgaattattgaaattgtatttatttaattttattgtttttacaaaattgcaccttgtgtccaaagggcgaagatatgacattgcataagggatttatgtttttcaaagagctaactgttttcatatccatactatatacacttgaagcaattggtaggaagagaacctattggaaaaatacgattttcaaaagtaagtattcctcgggatgtttttatataaattatgttttggaatagaacataaatgactttgagttaggataaggatgataggatgggtgctggagatgccctgccttgcttatttgtttctgtgggggatttaatactataaatgaaaatggcttctgctccattaaaaagtaaaaattgtcctccaaatataaaactccttaatagatatttttgaaattaaaatctttaaattttataaatcagctgttgccactacacaactatgatggcatgtgcttataacatttttataacattccgtctgtgtctattccctaaatatcatgagtttataataaggaaagtgataaaaatacagtaatgaaataaaaatctgaatgtttctaagaaaggttttggaaggaaaaatgacctgaaatcagtgcgtactgcaaagtacagccaataatttttgttctttgttttcacccccaccctcactggaattctcaccaaaaatagtttgatacttaaaaaacagaagtaaatacttttctcaatattgttttggctatgcaaatatttgttttgcttaatgtcctccatttacacttctcagcaaatgtagttgcaaacaaatgctttctttttatttttcccttggtttgaggtatgtaaatagccaaaaatgtacattgaatttcacattgtaaaagttttattttatcccttgtatgatattactcaaaaaatccctgtgtatatgaaagtgcataataaatatatttgctttacagagaagatcttgttttaattttgtccttgaaccagtagaacatgcatgatatgcatatagcataaacaactgttagttgttttaagttattatcttaaataaatcctgagcaaatgaatttggaaacattttgcaaagaagaaagtgaaatataacactgtccaaaggaaggtagaa

SEQ ID NO: 541 - protein, 1429 aa, Homo sapiens
MTNPWEEKVCKMAQTSLLQGKQFYCREWVFHKLQHCLQEKSNCCNSAVNAPSLVMNSGNNASGVSGKGAAWGVLLVGGPGSGKTALCTELLWPSSPASLQRGLHRQALAFHFCKAQDSDTLCVGGFIRGLVAQICRSGLLQGYEDKLRDPAVQSLLQPGECERNPAEAFKRCVLLPLLGMKPPQQSLYLLVDSVDEGCNITEGEQTSTSLSGTVAALLAGHHEFFPPWLLLLCSARKQSKAVTKMFTGFRKISLDDLRKAYIVKDVQQYILHRLDQEEALRQHLTKETAEMLNQLHIKSSGCFLYLERVLDGVVENFIMLREIRDIPGTLNGLYLWLCQRLFVRKQFAKVQPILNVILAACRPLTITELYHAVWTKNMSLTLEDFQRKLDILSKLLVDGLGNTKILFHYSFAEWLLDVKHCTQKYLCNAAEGHRMLAMSYTCQAKNLTPLEAQEFALHLINSNLQLETAELALWMIWNGTPVRDSLSTLIPKEQEVLQLLVKAGAHVNSEDDRTSCIVRQALEREDSIRTLLDNGASVNQCDSNGRTLLANAAYSGSLDVVNLLVSRGADLEIEDAHGHTPLTLAARQGHTKVVNCLIGCGANINHTDQDGWTALRSAAWGGHTEVVSALLYAGVKVDCADADSRTALRAAAWGGHEDIVLNLLQHGAEVNKADNEGRTALIAAAYMGHREIVEHLLDHGAEVNHEDVDGRTALSVAALCVPASKGHASVVSLLIDRGAEVDHCDKDGMTPLLVAAYEGHVDVVDLLLEGGADVDHTDNNGRTPLLAAASMGHASVVNTLLFWGAAVDSIDSEGRTVLSIASAQGNVEVVRTLLDRGLDENHRDDAGWTPLHMAAFEGHRLICEALIEQGARTNEIDNDGRIPFILASQEGHYDCVQILLENKSNIDQRGYDGRNALRVAALEGHRDIVELLFSHGADVNCKDADGRPTLYILALENQLTMAEYFLENGANVEASDAEGRTALHVSCWQGHMEMVQVLIAYHADVNAADNEKRSALQSAAWQGHVKVVQLLIEHGAVVDHTCNQGATALCIAAQEGHIDVVQVLLEHGADPNHADQFGRTAMRVAAKNGHSQIIKLLEKYGASSLNGCSPSPVHTMEQKPLQSLSSKVQSLTIKSNSSGSTGGGDMQPSLRGLPNGPTHAFSSPSESPDSTVDRQKSSLSNNSLKSSKNSSLRTTSSTATAQTVPIDSFHNLSFTEQIQQHSLPRSRSRQSIVSPSSTTQSLGQSHNSPSSEFEWSQVKPSLKSTKASKGGKSENSAKSGSAGKKAKQSNSSQPKVLEYEMTQFDRRGPIAKSGTAAPPKQMPAESQCKIMIPSAQQEIGRSQQQFLIHQQSGEQKKRNGIMTNPNYHLQSNQVFLGRVSVPRTMQDRGHQEVLEGYPSSETELSLKQALKLQIEGSDPSFNYKKETPL

SEQ ID NO: 542 - DNA, 1446 bp, Homo sapiens
atgtcgctgtatacccccactatttctattttcgcaacattcttcccagtcttttccttccttctcttcgtcccagccaaagtaaaagcatccctggaatttaatggactgaaaggagaccggacgactgaggggcggggcccccacgccgccccgagacaggtctccccgccgcgccggcagcgggtcccaggcggccgcacacgcccaggcacgggatgctgcgggagagcgcggtgggggaggggaaggacgcggaggcggagccggcgggcaaagaaaggccgagcggcggggcgggggcgggggcgggggcggggtctgggctgggcgggcggggcggagccggccggccgggggctgcctgagacagttactgccctgacggcggcggcggcggcggttggccggtgggggctggggcgagcacgaccgattctgctgggaaagctggaactggcagccgccgggggccaagaggaggatccggagctgggagcgtgccccgggcccggcggaggaggcggctgcagttggagtggagtcttgggagcgctgctggcagcgacttctcagcgaagcaagtgtctgagactgagagtccctaacagcggcagcggcggccacggcggcggctggggccgagttacttgtggaaattgttgattacccggacgtcttaaaaccaagaaacctgtgaacaggttcattaagaatctgctgtcttgaaaaatgcatattatgaatgctttgaattaagaaggtgttaacagtggttgtcatttctgccacataagagactataatctgaaacagttcctggcagttgcccagatgcctgaaactggcacgatctagtactcttgagtgatcatccttcaacgagaaatacagagctacttacatactgtacctcataccgtataaatgtaatctctctgatgccatttaatgcagtggacctcttttcagaatctaattgtcagatgcagaattaacacttggaatctggagaagcattttgtacaaattgaaagattgggttttttctttagttttccacatgtattgtctcatctctgttcttgaaacatccacaatcacataaactccagttataaccatggagttatgtgactcattaaaatttaggaaaagtgttgctgagctgtggaatcaggcgtttctccctcagttcaacaactaatacatagactgctgatcaagaataaggaaccaaataaagtcatgcacgttctgttgacagaggaactctgtggctgttgaattttactgtaactagttactctgtcttcagagtcaacttaatatacaagttatgtcataatggatggaaagacctgtgttgatgtatccagactctagcaaatgaagataaaaaacccgttatgactaatccttgggaagagaaagtctgcaaaatgg

SEQ ID NO: 543 - protein, 221 aa, Homo sapiens
MSLYTPTISIFATFFPVFSFLLFVPAKVKASLEFNGLKGDRTTEGRGPHAAPRQVSPPRRQRVPGGRTRPGTGCCGRARWGRGRTRRRSRRAKKGRAAGRGRGRGRGLGWAGGAEPAGRGLPETVTALTAAAAAVGRWGLGRARPILLGKLELAAAGGQEEDPELGACPGPGGGGGCSWSGVLGALLAATSQRSKCLRLRVPNSGSGGHGGGWGRVTCGNC

SEQ ID NO: 544 - DNA, 802 bp, Homo sapiens
gctggccgtgggagaggcttaaaacaaacgccggaagcaactcccagccccataaagatctgtgaccggcagccccagacctgcctgccttcctgacttctgttccagagcaaaggtcattcagccgcttgaatcagccttttccccccacccggtccccaactttgtttacccgataaggaaggtcagcattcaaagtcaagaagcgccatttatcttcccgtgcgctctacaaatagttccgtgagaaagatggccgggaactcgatcctgctggctgctgtctctattctctcggcctgtcagcaaagttattttgctttgcaagttggaaaggcaagattaaaatacaaagttacgcccccagcagtcactgggtcaccagagtttgagagagtatttcgggcacaacaaaactgtgtggagttttatcctatattcataattacattgtggatggctgggtggtatttcaaccaagtttttgctacttgtctgggtctggtgtacatatatggccgtcacctatacttctggggatattcagaagctgctaaaaaacggatcaccggtttccgactgagtctggggattttggccttgttgaccctcctaggtgccctgggaattgcaaacagctttctggatgaatatctggacctcaatattgccaagaaactgaggcggcaattctaactttttctcttccctttaatgcttgcagaagctgttcccaccatgaaggtaatatggtatcatttgttaaataaaaataaagtctttattctgtttttcttgaaaa

SEQ ID NO: 545 - protein, 147 aa, Homo sapiens
MAGNSILLAAVSILSACQQSYFALQVGKARLKYKVTPPAVTGSPEFERVFRAQQNCVEFYPIFIITLWMAGWYFNQVFATCLGLVYIYGRHLYFWGYSEAAKKRITGFRLSLGILALLTLLGALGIANSFLDEYLDLNIAKKLRRQF

SEQ ID NO: 546 - DNA, 1040 bp, Homo sapiens
acatacttggctctccaacgccagcgccgcctctcgctcgccgagctccagccgaaggagaaggggggtaagtaaggaggtctctgtaccatggctcgtacaaagcagactgcccgcaaatcgaccggtggtaaagcacccaggaagcaactggctacaaaagccgctcgcaagagtgcgccctctactggaggggtgaagaaacctcatcgttacaggcctggtactgtggcgctccgtgaaattagacgttatcagaagtccactgaacttctggttcgcaaacttcccttccagcgtctggtgcgagaaattgctcaggactttaaaacagatctgcgcttccagagcgcagctatcggtgctttgcaggaggcaagtgaggcctatctggttggcctttttgaagacaccaacctgtgtgctatccatgccaaacgtgtaacaattatgccaaaagacatccagctagcacacagcatacgtggagaacgtgcttaagaatccactatgatgggaaacatttcattctcaaaaaaaaaaaaatttctcttcttcctgttattggtagttctgaacgttagataatttttttccatggggtcaaaaggtacctaagtatatgattgcgagtggaaaaataggggacagaaatcaggtattggcagtttttccattttcatttgtgtgtgaatttttaatataaatgcggagacgtaaagcattaatgcaagttaaaatgtttcagtgaacaagtttcagcggttcaactttataataattataaataaacctgttaaatttttctggacaatgccagcatttggatttttttaaaacaagtaaatttcttattgatggcaactaaatggtgcttgtagcatttttatcatacagtagattccatccattcactatacttttctaactgagttgtcctacatgcaagtacatgtttttaatgttgtctgtcttctgtgctgttcctgtaagtttgctattaaaatacattaaactattaaaagaaaaaagaaacacat

SEQ ID NO: 547 - protein, 136 aa, Homo sapiens [sequence omitted]

SEQ ID NO: 548 - DNA, 7086 bp, Homo sapiens
agcagcggcggcagcggcagcccagccgagcgttaggtgctgctctctgcgcggcgttttgcaaaggacttcaccgatctacttttgcagtcgcctcggactgtccatgtgtttacttcccccagcccgaggattcgatatctaggttcctgtgaaatgcaactgagcagccaaagtactttgagaacacggggcggcataaacaccaaaacttttttgtggaaggaaaatgcaataagcaagcttgccgttttccgatgcggtgtggagtgagtgtgtgtcgcgcgtgtccgcactggaggcatatgcttgtgtgtgtacatggggtgtgtttttcggtatgtagggagaaaatgcttgccaaccaccggaaatctcctggaatttattagaaaataatggattataaaaagaaggcaagcaaggagcggatctccccttgagttgcaacccgatttgctgctggctcagtttgttgtgattctttttgttgataggtgtctgatggtattccgataacgttccccccttttcttccccttgagcttttacagtttaaaaaaaggaaacaaaaaccaccccaaaatctccccccccgtttttttcgccccgtcgggatcgccgtttccatccatgtgcttgcgtctcccccgcgttccacttaaactattttaatccttggacccaaggaggaggctgataggggggtggataaaaaaagttcttccaaaatagtgtgcccggggagcaggatgggggatttcgcagcccccgctgctgccgcgaatggcagtagtatttgcatcaacagtagcctgaacagcagcctcggcggggccgggatcggtgtgaataatactcccaatagtactcccgctgctccgagtagcaatcacccggcagccggtggatgcggcggctccgggggccccggcggcggttcggcggccgttcccaagcacagcaccgtggtggagcggctccgccagcgcatcgagggctgccgtcggcaccacgtcaactgcgagaacaggtaccagcaggctcaggtggagcagctggagctggagcgccgggacaccgtgagcctctaccagcggaccctggagcagagggccaagaaatcgggcgccggcaccggcaaacagcagcacccgagcaaaccccagcaagatgcggaggctgcctcggcggagcagaggaaccacacgctgatcatgctacaagagactgtgaaaaggaagttggaaggagctcgatcaccacttaatggagaccagcagaatggtgcttgtgatgggaatttttctccgactagcaaacgaattcgaaaggacatttctgcggggatggaagccatcaacaatttgcccagtaacatgccactgccttcagcttctcctcttcaccaacttgacctgaaaccttctttgcccttgcagaacagtggaactcacactcctgggcttctagaagatctaagtaagaatggtaggctccctgagattaaacttcctgtcaacggttgcagtgacctggaggatagcttcaccatcttgcagagcaaagacctcaaacaagaacctctcgatgaccctacttgcatagacacatcagaaacatctctttcaaatcagaacaagctgttctcagacattaatctgaatgatcaggagtggcaagaattaatagatgaattggccaacacggttcctgaggatgacatacaggacctgttcaacgaagactttgaagagaagaaggagccagaattctcgcagccagcaactgagacccctctctcccaggagagtgcgagcgtgaagagcgacccctctcactctcccttcgcacatgtctccatgggatctccccaggcgaggccttcttcttctggtcctcccttttctactgtctccacggccactagtttaccttctgttgccagcactcccgcagctccaaaccctgcaagctcaccagcaaactgtgctgtccagtcccctcaaactccaaaccaagcccacactccaggccaagctccacctcggcctggaaatggttatctcctgaatccggcagcagtgacagtggccggttcagcgtcagggcctgtggctgtgcccagctctgacatgtctccagcagaacagctcaaacagatggctgcacagcagcaacaaagggccaaactcatgcagcagaaacagcaacagcaacagcagcagcagcagcagcagcagcagcagcagcagcagcagcagcaacagcactcaaatcagacttcaaattggtctcccttaggacctccctctagtccatatggagcagcttttactgcagaaaaaccaaatagcccaatgatgtacccccaagcctttaacaaccaaaaccctatagtgcctccaatggcaaacaacctgcagaagacaacaatgaataactacctccctcagaatcacatgaatatgatcaatcagcagccaaataacttgggtacaaactccttaaacaaacagcacaatattctgacttatggcaacactaaacccctgacccacttcaatgcagacctgagtcagaggatgacaccaccagtggccaaccccaacaaaaaccccttgatgccgtatatccagcagcagcaacagcagcagcaacagcaacagcagcagcagcagcagcagcagccgccacctccacagctccaggcccccagggcacacctgagcgaagaccagaaacgcctgcttctcatgaagcagaaaggagtgatgaatcagcccatggcttacgctgcacttccatcccacggtcaggagcagcatccagttggacttccccgaaccacaggccccatgcagtcctccgtgcccccaggctcaggtggcatggtctcaggagccagtcccgcaggccccggcttcctgggcagccagccccaagcagccatcatgaagcagatgctcattgatcagcgggcccagttgatagagcagcagaagcaacagttcctgcgggagcaaaggcagcagcagcagcagcagcagcagattttggcggaacagcagttgcagcaatcacatctaccccggcagcacctccagccacagcggaatccatacccagtgcagcaggtcaatcagtttcaaggttctccccaggatatagcagccgtaagaagccaagcagccctccagagcatgcgaacgtcacggctgatggcacagaacgcaggcatgatgggaataggaccctcccagaaccctgggacgatggccaccgcagctgcgcagtcggagatgggactggccccttatagcaccacgcctaccagccaaccaggaatgtacaatatgagcacaggcatgacccaaatgttgcagcatccaaaccaaagtggcatgagcatcacacataaccaagcccagggaccgaggcaacctgcctctgggcagggggttggaatggtgagtggctttggtcagagcatgctggtgaactcagccattacccagcaacatccacagatgaaagggccagtaggccaggccttgcctaggccccaagcccctccaaggctgcagagccttatgggaacagtccagcaaggagcacaaagctggcaacagaggagcttgcagggcatgcctgggaggactagtggagaattgggaccattcaacaatggcgccagctaccctcttcaagctgggcagccgagactgaccaagcagcacttcccacagggactgagccagtcagtcgtggatgctaacacgggcacagtgaggaccctcaacccagctgccatgggtcggcagatgatgccatcgctcccggggcagcaaggcaccagccaggcgaggccaatggtcatgtctggcctgagccagggagtcccaggcatgccagcgttcagccagcccccagcacagcagcagatacccagtggcagctttgctccaagcagccagagccaagcctatgagcggaatgcccctcaggacgtgtcatacaattacagtggcgacggagctgggggttccttccctggcctcccggacggtgcagaccttgtggactccatcatcaaaggcgggccaggggacgagtggatgcaggagcttgatgaattgtttggtaacccctaatcaagagaggccccaagatccacaactcgagtggttaaagcttaaaaagtgaaaaagaaacaggatgttgacccatccttgttttttgtttttttgacccacgtaaactgagcaaaactgcagctggctgacaatggaagatccaggtgccaatccacagccccaccaggcctcatttcacctgattttcacacagcaatcgagatgagacgccatgcagatcccggctgcgagagagggagacacccggaggagcaggtgggaagatgaagccggccagagcccctctgcccagcatgccctgtgatcgcctggcccagcaggagctgcttcagccgagagggactattacccaagagaggtatcctcagcccctcctgccccaggtcgggagacagcagctttggagacacaaaagagacagagcctcagccagggagagtgagtcccccagaagaggctgggtggttgcacaggccaggtgcacaggttggaaatgcactgaactctgggtgccgagagatgtaaggctttgagacatgctactgaatttggagggcaggcacgaagaacagtgagattgtcaaaaggagacaaccacagatcctacaggactgtctgtctcctgccccatgatgaccctcaggaattgcaaaggctctgctgtcacaaggagagcaggctgagtttggagcagggtccatccggcagtcctgggacggcttccctctgctggtgcccctggtggcagtccctccaggtggggctggagcctgctggcgcccaatacaaaacccatacatccaggtgggtcacatctacttctggcggccgcagggcagggaaacccctactggaccctgtgtgtctgccagcctggagcctttgtctccagccctgcctttattcctccttgcctccacaccagcctccccttgcttctccttacagactatccaagaagtgaagcttatgtctttagggagccttgggcagagtccacataaatgcaggaagaacttagacaatgcctgaaatgcaaaggcgacactggagtcttctttctctaacgtgtagcgttgaatgaatatctgcctggaaccaagagggctgctctgatgtttgggagtcggttttttgtgagccacatctgatatttctgatatccccaggaaggagtggcctggaggtcactggttcaggctccctttgggcgaaatcctgggagtgatgctctaaaaatccacctttcccatcatccctactcatcagaaagacaaatataaaatcccagagaggtggaggagctaaaaaagcaattgctccaccttacaaatttggatagaaaggagatgtagtttatttcatatgggcaaagtagtcctcttccaaagtcctgtacagttgttctctgcaattgacgcacatctgccctaagcgaaatctgtcagaaggaatcaacaaggctccttgcctcccctcccaatcccccttttggaggacttgtggcttcggtgtcgtcctaagtgagagtggcgtgtgcttttttcctgtcccctcctccctccgtgtcctagacgctggctgccttctgtgcactcccaggcagatcactacggaagagtcggagcctgtggggttggactggccacactcagtcctgagaaggcgagttgccatggaaagctgggggcagaggtgtttttggagaggaggcggcaggcaaacattgcctttgacttgctctccgcgtacccggggttgtagagctgctcaggaaggggcaggatgtaaggccagaggtgcctggtgggtgagaagcccaggcaggggctgggcgccctctccgaagaggtggcagcagggtgaccctgaactccccaaatggggagtgatgccactggggaaactgagtggatcaaagagatgaaaccaaaaaaaagcaaacaaacaaatgagaagacacaaaacataattaccttttcctgaaaggtacaggaaataaatatataagcaatgatgagaaactggaggtggctaatggaagtgagacagacaggggtggggggctccattatcttttaaaagcttcctccaaatgctcagtactgggaccaactaataggtagattttaatatggtggttttgttttggttttgtttttactacggtgctgatgtatatgtaatgtctaaaaaaagttatttgtacataagtttttacaatactgcagatatcactgggtctactatctgtaaaaaatatacatataaatatatatatactgtttgtttaaaatagagtatttttatttcattccttaactcatcatcacagcagtggtattgcacttcagatgacatctaattactaatttgtactgtatgacctctggcaacttgctccattttattcagatttttctagttttctgtttttactttgtacattgagcattgcttatttccttttaagaaatgtacagaacgctgaaatgtagaaatgaagtgatgttgacataccacttttaaagaaaacaaaaacaaaaataaaagattatctgaatcaatccaaagtatagtttattttaagatcctcactggagctccaatcttaattaagcagacatattattcctgggttttaattaactgcagttcttttctcaaaattttgatatcattctttaaacatttatttaatgggagagatcaatcattcccagcctttgcattcaactgcacaactgatgatactttctgaatttactgccgcactctgaaggatgtggcaaagggaagggaggaaagtcaactttgcatggaacatagtgcaatccatttgtagattcagtaccataacaattccatttccaactagttcatctggaggtagggaggctccactggaaaaataaatatttttgtcaaa

SEQ ID NO: 549 - protein, 1133 aa, Homo sapiens
MGDFAAPAAAANGSSICINSSLNSSLGGAGIGVNNTPNSTPAAPSSNHPAAGGCGGSGGPGGGSAAVPKHSTVVERLRQRIEGCRRHHVNCENRYQQAQVEQLELERRDTVSLYQRTLEQRAKKSGAGTGKQQHPSKPQQDAEAASAEQRNHTLIMLQETVKRKLEGARSPLNGDQQNGACDGNFSPTSKRIRKDISAGMEAINNLPSNMPLPSASPLHQLDLKPSLPLQNSGTHTPGLLEDLSKNGRLPEIKLPVNGCSDLEDSFTILQSKDLKQEPLDDPTCIDTSETSLSNQNKLFSDINLNDQEWQELIDELANTVPEDDIQDLFNEDFEEKKEPEFSQPATETPLSQESASVKSDPSHSPFAHVSMGSPQARPSSSGPPFSTVSTATSLPSVASTPAAPNPASSPANCAVQSPQTPNQAHTPGQAPPRPGNGYLLNPAAVTVAGSASGPVAVPSSDMSPAEQLKQMAAQQQQRAKLMQQKQQQQQQQQQQQQQQQQQQQQQHSNQTSNWSPLGPPSSPYGAAFTAEKPNSPMMYPQAFNNQNPIVPPMANNLQKTTMNNYLPQNHMNMINQQPNNLGTNSLNKQHNILTYGNTKPLTHFNADLSQRMTPPVANPNKNPLMPYIQQQQQQQQQQQQQQQQQQPPPPQLQAPRAHLSEDQKRLLLMKQKGVMNQPMAYAALPSHGQEQHPVGLPRTTGPMQSSVPPGSGGMVSGASPAGPGFLGSQPQAAIMKQMLIDQRAQLIEQQKQQFLREQRQQQQQQQQILAEQQLQQSHLPRQHLQPQRNPYPVQQVNQFQGSPQDIAAVRSQAALQSMRTSRLMAQNAGMMGIGPSQNPGTMATAAAQSEMGLAPYSTTPTSQPGMYNMSTGMTQMLQHPNQSGMSITHNQAQGPRQPASGQGVGMVSGFGQSMLVNSAITQQHPQMKGPVGQALPRPQAPPRLQSLMGTVQQGAQSWQQRSLQGMPGRTSGELGPFNNGASYPLQAGQPRLTKQHFPQGLSQSVVDANTGTVRTLNPAAMGRQMMPSLPGQQGTSQARPMVMSGLSQGVPGMPAFSQPPAQQQIPSGSFAPSSQSQAYERNAPQDVSYNYSGDGAGGSFPGLPDGADLVDSIIKGGPGDEWMQELDELFGNP

SEQ ID NO: 550 - DNA, 4140 bp, Homo sapiens
gaagccagaggctgggggagctgctggagcctcgcgaagccgcggccggcgccctgcgccgtcgccgccgcctgctagtttcctccgggttctcagccccgggtactgaggcttcggtctataaatagcaggttacagctcctcctgggcgcgcacacgctcacacgctcgcaagcgaacgcaggaaagtcaggctaaaagtgtctgctgctgctgccgccccccactccgcctccgggagagaatacaaagaaatggtgttacctggcaagaggtcttctgtcttttatgaaaaattagacaaaggctttacaggaggcatagtactggaaatctgctcctgatgaggtctcagaaagcttccactcgtggtggaaggcaaaggaggagcaggcacatcacatgagccttgaaaccagcgaaacaataatcaaagagcagttctgtcaaagaaaacaacataaatcaggtacagaatttcagagtgggatatcagatctttagtgtgaagatacatctacattaaaccaggaatcactagaactgacatttggacaagaaaatttggaaaattttaaaactgtgaaggttgatcatggaaattaaagaggaaggggcatcagaagaagggcagcactttcttcctacagcccaggccaatgatcccggggactgtcagttcacaagtatccagaagactccaaatgaaccgcagttggaattcatccttgcatgcaaggatctcgtggctcctgtccgtgatcgtaaactgaatacactggtgcagatctccgtaatccaccccgtggagcagagtctgacaagatactccagcaccgaaattgtggagggaacaagggacccactgtttttgactggtgtcacattcccatctgagtatcccatctatgaggagaccaaaataaaactaacagtctatgatgtcaaggataagtctcatgacaccgttcgaaccagtgtcctaccagaacataaggatcccccgccagaagttgggcgaagtttcttgggctatgccagttttaaagtgggagagctgctgaagtcaaaggagcaattgctggtcctgagcctgagaacttcagatggtggcaaagtggttggcaccatagaagtcagtgtcgtgaagatgggggagattgaggatggggaagccgaccacatcaccacagatgtacagggacaaaagtgtgccctggtatgtgaatgtacagccccggaaagtgtgagcggaaaagataacttaccttttttgaattcagtgttaaagaacccagtatgtaaattatatagatttcccacatctgacaataagtggatgcgaattcgagagcagatgtcagagagcattctttcctttcatattcctaaggaattgatttcccttcacattaaagaagatttgtgcagaaaccaggagataaaagaacttggtgagctttctccacattgggacaatctgcgaaaaaatgtccttactcactgtgatcaaatggtgaatatgtaccaagacattctgacagaacttagcaaggaaacagggtcctctttcaaatcaagcagcagcaaaggagagaaaacattagaatttgttccaataaatctacatctgcaaagaatgcaggtacacagccctcacttgaaagatgctctctacgatgtcatcactgtgggagccccagctgcccattttcagggatttaagaatggtggtcttcggaagctactccatagatttgaaacagaaagaagaaataccggataccagtttatttactattcacctgaaaacacagccaaagcaaaggaagttctcagcaacatcaatcaactacaacctcttatagcaacccatgcagacctactgcttaattctgcaagccagcattctccagacagcttgaagaattctttaaagatgctttcagaaaaaacagagctttttgtacatgccttcaaggatcaacttgtcaggagtgctcttttagcactctacactgcaaggccaggaggcattcttaagaagccaccctctcctaagagcagcacagaggagagcagtccccaagaccaacccccagtgatgagagggcaggactccataccacatcattcagactatgatgaggaagagtgggacagggtgtgggccaatgtggggaagagcctgaactgcattattgctatggtggacaaactgattgaaagagatggtggcagtgaaggcagtggcggcaacaatgatggagaaaaggaaccttcattaacagatgccattccctctcacccaagagaggactggtatgaacagttgtatcccctcatccttaccctgaaggactgcatgggagaagtggtgaaccgagccaagcagtccctgacatttgtgctccttcaggaacttgcgtacagcttgccccagtgtctgatgctgacgctaagaagagacatcgtcttcagccaagcacttgctggattggtttgtggttttatcatcaaattacagacaagtctgtatgacccaggcttcctacagcagcttcacacagtggggttgatagtacaatatgaaggactgctaagtacatacagcgatgaaattggaatgctagaggacatggccgttggcatttccgatttaaagaaagttgcatttaaaataattgaagccaaatccaatgatgtgttgccagttataacaggaagacgagaacattacgtggtagaggtcaagcttccagccagaatgtttgagtcactacctctacagattaaagaaggacagttgcttcatgtgtatccagtactttttaatgttggaatcaatgaacagcaaactctggctgaaaggtttggagatgtctctttgcaagaaagtattaatcaggaaaacttcgaacttctacaagaatattacaagatatttatggaaaagatgcctcctgattatatttcacattttcaggaacaaaatgatttaaaagcattgctagaaaatctccttcaaaatatccaatccaaaaaaagaaagaatgtagaaattatgtggctggctgcaacgatttgccgcaaactgaatggtattcgtttcacctgttgtaaaagtgccaaagacaggacatcgatgtcagtgacacttgaacaatgctcaatcttgagagatgagcaccagttacacaaggacttctttatccgagcgctggattgcatgagaagagaaggatgccgcatagagaatgtactgaagaatatcaaatgcagaaagtatgctttcaacatgctacagctgatggctttccccaagtactacagacctccagaggggacttatggaaaagctgacacctaagtttaccaacatgttaataaacaggaacacaaatacatttcagttggataatcttcaccttggtcttttttgtttgtttttattgtcatgaatttgtggtgggggagatgatcacagatgtttcccaaaatctaggaactacttcaattcatcatcagcatattgctctgaaagaaatccattttaaaaaatcttacatgattcagtactgtcatttctagttctaagcttctatgtgttgagcctagctgattgagattggttcacaaagtgtaaatttcattcatgagtatttaaatgtttctgaggaaacatggatcatttcaataggactaggggtgattcacagagcaccactctccaaccaaatggaagagaggagagggggaaaaggaacatattttttttgtgatacaacttaatagcctatgagaacacagtcaacctgagaatcaatgtaagggatttaaaaaaaatgtgtagccactcaattaggtagagttaactcatgatctggaatactgaggcagtttgcaggtatgttccacaatgatctctatcatccagtcaaggtgtgactcctcccttgcaacaggcatatgcatggagtgagtaaagtggtcaacagacctttcaaaaccatggcatcttttcagaactctgacttgggttgtgtgatctagctgtgaatgtagcaatatagaacgtttaatagaatgataagcaaaacactgcaatgatctaaaattacaaaaaaaaaaaaaaaaaaa

SEQ ID NO: 551 - protein, 924 aa, Homo sapiens
MEIKEEGASEEGQHFLPTAQANDPGDCQFTSIQKTPNEPQLEFILACKDLVAPVRDRKLNTLVQISVIHPVEQSLTRYSSTEIVEGTRDPLFLTGVTFPSEYPIYEETKIKLTVYDVKDKSHDTVRTSVLPEHKDPPPEVGRSFLGYASFKVGELLKSKEQLLVLSLRTSDGGKVVGTIEVSVVKMGEIEDGEADHITTDVQGQKCALVCECTAPESVSGKDNLPFLNSVLKNPVCKLYRFPTSDNKWMRIREQMSESILSFHIPKELISLHIKEDLCRNQEIKELGELSPHWDNLRKNVLTHCDQMVNMYQDILTELSKETGSSFKSSSSKGEKTLEFVPINLHLQRMQVHSPHLKDALYDVITVGAPAAHFQGFKNGGLRKLLHRFETERRNTGYQFIYYSPENTAKAKEVLSNINQLQPLIATHADLLLNSASQHSPDSLKNSLKMLSEKTELFVHAFKDQLVRSALLALYTARPGGILKKPPSPKSSTEESSPQDQPPVMRGQDSIPHHSDYDEEEWDRVWANVGKSLNCIIAMVDKLIERDGGSEGSGGNNDGEKEPSLTDAIPSHPREDWYEQLYPLILTLKDCMGEVVNRAKQSLTFVLLQELAYSLPQCLMLTLRRDIVFSQALAGLVCGFIIKLQTSLYDPGFLQQLHTVGLIVQYEGLLSTYSDEIGMLEDMAVGISDLKKVAFKIIEAKSNDVLPVITGRREHYVVEVKLPARMFESLPLQIKEGQLLHVYPVLFNVGINEQQTLAERFGDVSLQESINQENFELLQEYYKIFMEKMPPDYISHFQEQNDLKALLENLLQNIQSKKRKNVEIMWLAATICRKLNGIRFTCCKSAKDRTSMSVTLEQCSILRDEHQLHKDFFIRALDCMRREGCRIENVLKNIKCRKYAFNMLQLMAFPKYYRPPEGTYGKADT

SEQ ID NO: 552 - DNA, 2462 bp, Homo sapiens
gctctgaccgactggtcccctaaacggtggcggcggtttttggtcgttgggccccgggatttaggaccaacatttgaagacccgaaggggaactgcaaccatgaatgaagaaaatatagatggaacaaatggatgcagtaaagttcgaactggtattcagaatgaagcagcattacttgctttgatggaaaagactggttacaacatggttcaggaaaatggacaaaggaaatttggcggtcctcctccaggttgggaaggtccacctccacctagaggctgtgaagtttttgtaggaaaaatacctcgtgatatgtatgaagatgagttagttcctgtatttgaaagagctgggaagatatatgaatttcgacttatgatggaatttagtggtgaaaatcgaggttatgcttttgtgatgtacactacaaaagaagaagcccaattagccatcagaattcttaataattatgaaattcgaccagggaagtttattggtgtgtgtgtaagcctggataattgtagattatttattggagctattcccaaggaaaagaagaaagaagaaattttagatgaaatgaagaaagttacagaaggagttgtagatgtcattgtttatccaagtgcaactgataagaccaaaaatcgtggttttgcatttgtggaatatgaatctcacagagctgctgctatggcaaggaggaaactaattccaggaacattccaactatggggccacaccattcaggtagattgggctgacccagagaaagaggtggatgaggaaaccatgcagagagttaaagttctttatgtaagaaatttaatgatctcaactacagaggaaacaattaaagcagaattcaataaatttaagcctggtgcagttgaacgggtaaagaaacttagagattatgcttttgttcactttttcaaccgagaagatgcagtggctgccatgtctgttatgaatggaaaatgcattgatggagcaagtattgaggtaacactagctaaaccagtaaataaagaaaacacttggagacagcatcttaatggtcagattagtccaaattctgaaaatctgattgtgtttgctaacaaagaagagagccacccaaaaactctaggcaagctgccaactcttcctgctcgtctcaatggtcagcatagcccaagtccgcctgaagttgaaagatgcacttaccctttttatcctggaacaaagcttactccaattagtatgtattctttaaaatccaatcattttaattctgcagtaatgcatttggattattactgcaacaaaaataactgggcaccaccagaatattatttatattcaacaacaagtcaagatgggaaagtactcttggtgtataagatagttattcctgctattgcaaatggatcccagagttacttcatgccagacaaactctgtactacgttagaagatgcaaaggaactggcagcccagtttacattacttcatttggactacaatttccatcgcagctcaataaatagtctttcccctgttagtgctaccctctcttctgggactcccagcgtgcttccttatacttcaaggccttattcttatccaggctatcctttgtcaccaacaatatcacttgctaatggcagccatgttggacagcggctatgtatctccaatcaggcctccttcttctgaagaaaatactaacattagtatgaaaatttgtgtaaatttgtagtatgaaaacttgcaaattaaaatattgttttattttagaatcgggtttgcatatttggttttaaaaaggtatttattccaaagtactaaacatcagctataattcagaataacatggagttgtagaatttataaaaatgcaaagtttaaaaagttattcagtggtttctcttgataaaggtacagcaaactactattctttttaaacttctaggattttcttctactttctgagtgggcaatagaacctagtcatttatgttttttttttttttgcataattttactaaatagtatttcacaaatattaaagcacttgaagacaatggttatagtagatttgattaccaaggatcactatctgtactggagattagaacaattatatgaccagaagcatctaaccattatgtaaaaagaaatgatgagacaaaaagattaagatacaaattttgtgcagtactaaagaaaaagcagtctaccattgtggtccttgaaaataactatagatatttttgttatttgttagacacaaattataattttgttgttaatgtatttaagcattttatagttatgctttgtgtttttgatattctttgtattgttaataacaagtgttatgggtttttaatgttgaaatcatgtgttaatttttgtacttgaattcaaattttttgacattaaatatgtgatgcttctaaaaaaaaaaaaaaaa

SEQ ID NO: 553 - protein, 533 aa, Homo sapiens
MNEENIDGTNGCSKVRTGIQNEAALLALMEKTGYNMVQENGQRKFGGPPPGWEGPPPPRGCEVFVGKIPRDMYEDELVPVFERAGKIYEFRLMMEFSGENRGYAFVMYTTKEEAQLAIRILNNYEIRPGKFIGVCVSLDNCRLFIGAIPKEKKKEEILDEMKKVTEGVVDVIVYPSATDKTKNRGFAFVEYESHRAAAMARRKLIPGTFQLWGHTIQVDWADPEKEVDEETMQRVKVLYVRNLMISTTEETIKAEFNKFKPGAVERVKKLRDYAFVHFFNREDAVAAMSVMNGKCIDGASIEVTLAKPVNKENTWRQHLNGQISPNSENLIVFANKEESHPKTLGKLPTLPARLNGQHSPSPPEVERCTYPFYPGTKLTPISMYSLKSNHFNSAVMHLDYYCNKNNWAPPEYYLYSTTSQDGKVLLVYKIVIPAIANGSQSYFMPDKLCTTLEDAKELAAQFTLLHLDYNFHRSSINSLSPVSATLSSGTPSVLPYTSRPYSYPGYPLSPTISLANGSHVGQRLCISNQASFF

SEQ ID NO: 554 - DNA, 727 bp, Homo sapiens
atgttgcctatgggccgcctcatgttcagaaatatctttttgcctaatgctgaacacaagatcagttgtccctgcctctggaatatgatcacttttatctctattgaccctctcttgccagttatggtcaggacaactaaaaatttagacaaagagctgggacttgacctcatgaaacagacccaagaattcatagtaacagacctcacagcaactcgtgtggacatgcagaacttgataatgcatagaaaatttcctgtaagacagacccagttcaaacaagggattcaggtcagagaaagaatgactgtaacacctactgtctattggaaagagaaggagagcaggagagagtgatggcagaaagaggagcgagagagagagtgagcgagctatagaacttccggacatttcaactttattatttcaagtgtaacaccaattgttgaggagaaaattagcatgcagtggcttggggtcaatcaggcctatcttgaattatctgtttctgtaaaaatgaggggaaaatgagatgtaggtctctgtgaggattaggagtggaaattacgtaagataacataaacattgtatgtgaaacttcttaatagcagagtacattgtagggggatcaataggcattgatttgtagatattaatagatactttttcataattttaaactctgtttttctaagtccatgattaaaaatattttccagcatattaa

SEQ ID NO: 555 - protein, 118 aa, Homo sapiens
MLPMGRLMFRNIFLPNAEHKISCPCLWNMITFISIDPLLPVMVRTTKNLDKELGLDLMKQTQEFIVTDLTATRVDMQNLIMHRKFPVRQTQFKQGIQVRERMTVTPTVYWKEKESRRE

SEQ ID NO: 556 - DNA, 3012 bp, Homo sapiens
ttatggcgattgggcggctgcagagaccaggactcagttcccctgccctagtctgagcctagtgggtgggactcagctcagagtcagttttccagaagcaggtttcagtgcagagttttcctacacttttcctgcgctagagcagcgagcagcctggaacagacccaggcggaggacacctgtgggggagggagcgcctggaggagcttagagaccccagccgggcgtgatctcaccatgtgcggatttgcgaggcgcgccctggagctgctagagatccggaagcacagccccgaggtgtgcgaagccaccaagactgcggctcttggagaaagcgtgagcagggggccaccgcggtctccgcgcctgtctgcaccctgtcgcctgagctgcctgacagtgacaatgacatcccagttaccagtgtccttgaattgatagtggcttctgtttgtcagtctcatataagaactacagctcatcaggaggagatcgcagcagggtaagagacaccaacaccatgttctgcacgaagctcaaggatctcaagatcacaggagagtgtcctttctccttactggcaccaggtcaagttcctaacgagtcttcagaggaggcagcaggaagctcagagagctgcaaagcaaccgtgcccatctgtcaagacattcctgagaagaacatacaagaaagtcttcctcaaagaaaaaccagtcggagccgagtctatcttcacactttggcagagagtatttgcaaactgattttcccagagtttgaacggctgaatgttgcacttcagagaacattggcaaagcacaaaataaaagaaagcaggaaatctttggaaagagaagactttgaaaaaacaattgcagagcaagcagttgcagcaggagttccagtggaggttatcaaagaatctcttggtgaagaggtttttaaaatatgttacgaggaagatgaaaacatccttggggtggttggaggcacccttaaagattttttaaacagcttcagtacccttctgaaacagagcagccattgccaagaagcaggaaaaaggggcaggcttgaggacgcctccattctatgcctggataaggaggatgattttctacatgtttactacttcttccctaagagaaccacctccctgattcttcccggcatcataaaggcagctgctcacgtattatatgaaacggaagtggaagtgtcgttaatgcctccctgcttccataatgattgcagcgagtttgtgaatcagccctacttgttgtactccgttcacatgaaaagcaccaagccatccctgtcccccagcaaaccccagtcctcgctggtgattcccacatcgctattctgcaagacatttccattccatttcatgtttgacaaagatatgacaattctgcaatttggcaatggcatcagaaggctgatgaacaggagagactttcaaggaaagcctaattttgaagaatactttgaaattctgactccaaaaatcaaccagacgtttagcgggatcatgactatgttgaatatgcagtttgttgtacgagtgaggagatgggacaactctgtgaagaaatcttcaagggttatggacctcaaaggccaaatgatctacattgttgaatccagtgcaatcttgtttttggggtcaccctgtgtggacagattagaagattttacaggacgagggctctacctctcagacatcccaattcacaatgcactgagggatgtggtcttaataggggaacaagcccgagctcaagatggcctgaagaagaggctggggaagctgaaggctacccttgagcaagcccaccaagccctggaggaggagaagaaaaagacagtagaccttctgtgctccatatttccctgtgaggttgctcagcagctgtggcaagggcaagttgtgcaagccaagaagttcagtaatgtcaccatgctcttctcagacatcgttgggttcactgccatctgctcccagtgctcaccgctgcaggtcatcaccatgctcaatgcactgtacactcgcttcgaccagcagtgtggagagctggatgtctacaaggtggagaccattggcgatgcctattgtgtagctgggggattacacaaagagagtgatactcatgctgttcagatagcgctgatggccctgaagatgatggagctctctgatgaagttatgtctccccatggagaacctatcaagatgcgaattggactgcactctggatcagtttttgctggcgtcgttggagttaaaatgccccgttactgtctttttggaaacaatgtcactctggctaacaaatttgagtcctgcagtgtaccacgaaaaatcaatgtcagcccaacaacttacagattactcaaagactgtcctggtttcgtgtttacccctcgatcaagggaggaacttccaccaaacttccctagtgaaatccccggaatctgccattttctggatgcttaccaacaaggaacaaactcaaaaccatgcttccaaaagaaagatgtggaagatggcaatgccaattttttaggcaaagcatcaggaatagattagcaacctatatacctatttataagtctttggggtttgactcattgaagatgtgtagagcctctgaaagcactttagggattgtagatggctaacaagcagtattaaaatttcaggagccaagtcacaatctttctcctgtttaacatgacaaaatgtactcacttcagtacttcagctcttcaagaaaaaaaaaaaaaccttaaaaagctacttttgtgggagtatttctattatataaccagcacttactacctgtactcaaaattcagcaccttgtacatatatcagataattgtagtcaattgtacaaactgatggagtcacctgcaatctcatatcctggtggaatgccatggttattaaagtgtgtttgtgatagtgtcgtcaaaaaaaaaaaaaaaaaaaaaaaaaaaaaaaaa

SEQ ID NO: 557 - protein, 690 aa, Homo sapiens
MFCTKLKDLKITGECPFSLLAPGQVPNESSEEAAGSSESCKATVPICQDIPEKNIQESLPQRKTSRSRVYLHTLAESICKLIFPEFERLNVALQRTLAKHKIKESRKSLEREDFEKTIAEQAVAAGVPVEVIKESLGEEVFKICYEEDENILGVVGGTLKDFLNSFSTLLKQSSHCQEAGKRGRLEDASILCLDKEDDFLHVYYFFPKRTTSLILPGIIKAAAHVLYETEVEVSLMPPCFHNDCSEFVNQPYLLYSVHMKSTKPSLSPSKPQSSLVIPTSLFCKTFPFHFMFDKDMTILQFGNGIRRLMNRRDFQGKPNFEEYFEILTPKINQTFSGIMTMLNMQFVVRVRRWDNSVKKSSRVMDLKGQMIYIVESSAILFLGSPCVDRLEDFTGRGLYLSDIPIHNALRDVVLIGEQARAQDGLKKRLGKLKATLEQAHQALEEEKKKTVDLLCSIFPCEVAQQLWQGQVVQAKKFSNVTMLFSDIVGFTAICSQCSPLQVITMLNALYTRFDQQCGELDVYKVETIGDAYCVAGGLHKESDTHAVQIALMALKMMELSDEVMSPHGEPIKMRIGLHSGSVFAGVVGVKMPRYCLFGNNVTLANKFESCSVPRKINVSPTTYRLLKDCPGFVFTPRSREELPPNFPSEIPGICHFLDAYQQGTNSKPCFQKKDVEDGNANFLGKASGID

SEQ ID NO: 558 - DNA, 2443 bp, Homo sapiens
cccccccccgccgctgccgcctctgcctgggtcccttcggccgtacctctgcgtgggggctgcctccccggctcccggtgcagacaccatgtacggatttgtgaatcacgccctggagttgctggtgatccgcaattacggccccgaggtgtgggaagacatcaaaaaagaggcacagttagatgaagaaggacagtttcttgtcagaataatatatgatgactccaaaacttatgatttggttgctgctgcaagcaaagtcctcaatctcaatgctggagaaatcctccaaatgtttgggaagatgtttttcgtcttttgccaagaatctggttatgatacaatcttgcgtgtcctgggctctaatgtcagagaatttctacagaaccttgatgctctgcacgaccaccttgctaccatctacccaggaatgcgtgcaccttcctttaggtgcactgatgcagaaaagggcaaaggactcattttgcactactactcagagagagaaggacttcaggatattgtcattggaatcatcaaaacagtggcacaacaaatccatggcactgaaatagacatgaaggttattcagcaaagaaatgaagaatgtgatcatactcaatttttaattgaagaaaaagagtcaaaagaagaggatttttatgaagatcttgacagatttgaagaaaatggtacccaggaatcacgcatcagcccatatacattctgcaaagcttttccttttcatataatatttgaccgggacctagtggtcactcagtgtggcaatgctatatacagagttctcccccagctccagcctgggaattgcagccttctgtctgtcttctcgctggttcgtcctcatattgatattagtttccatgggatcctttctcacatcaatactgtttttgtattgagaagcaaggaaggattgttggatgtggagaaattagaatgtgaggatgaactgactgggactgagatcagctgcttacgtctcaagggtcaaatgatctacttacctgaagcagatagcatactttttctatgttcaccaagtgtcatgaacctggacgatttgacaaggagagggctgtatctaagtgacatccctctgcatgatgccacgcgcgatcttgttcttttgggagaacaatttagagaggaatacaaactcacccaagaactggaaatcctcactgacaggctacagctcacgttaagagccctggaagatgaaaagaaaaagacagacacattgctgtattctgtccttcctccgtctgttgccaatgagctgcggcacaagcgtccagtgcctgccaaaagatatgacaatgtgaccatcctctttagtggcattgtgggcttcaatgctttctgtagcaagcatgcatctggagaaggagccatgaagatcgtcaacctcctcaacgacctctacaccagatttgacacactgactgattcccggaaaaacccatttgtttataaggtggagactgttggtgacaagtatatgacagtgagtggtttaccagagccatgcattcaccatgcacgatccatctgccacctggccttggacatgatggaaattgctggccaggttcaagtagatggtgaatctgttcagataacaatagggatacacactggagaggtagttacaggtgtcataggacagcggatgcctcgatactgtctttttgggaatactgtcaacctcacaagccgaacagaaaccacaggagaaaagggaaaaataaatgtgtctgaatatacatacagatgtcttatgtctccagaaaattcagatccacaattccacttggagcacagaggcccagtgtccatgaagggcaaaaaagaaccaatgcaagtttggtttctatccagaaaaaatacaggaacagaggaaacaaagcaggatgatgactgaatcttggattatggggtgaagaggagtacagactaggttccagttttctcctaacacgtgccaagcccaggagcagttcttccctatggatacagattttcttttgtccttgtccattaccccaagactttcttctagatatatctctcactatccgttattcaaccttagctctgctttctattactttttaggctttagtatattatctaaagtttggcttttgatgtggatgatgtgagcttcatgtgtcttaaaatctactacaagcattacctaacatggtgatctgcaagtagtaggcacccaataaatatttgttgaatttagttaaatgaaactgaacagtgtttggccatgtgtatatttatatcatgtttaccaaatctgtttagtgttccacatatatgtatatgtatattttaatgactataatgtaataaagtttatatcatgttggtgtatatcattatagaaatcattttctaaaggagt

SEQ ID NO: 559 - protein, 619 aa, Homo sapiens
MYGFVNHALELLVIRNYGPEVWEDIKKEAQLDEEGQFLVRIIYDDSKTYDLVAAASKVLNLNAGEILQMFGKMFFVFCQESGYDTILRVLGSNVREFLQNLDALHDHLATIYPGMRAPSFRCTDAEKGKGLILHYYSEREGLQDIVIGIIKTVAQQIHGTEIDMKVIQQRNEECDHTQFLIEEKESKEEDFYEDLDRFEENGTQESRISPYTFCKAFPFHIIFDRDLVVTQCGNAIYRVLPQLQPGNCSLLSVFSLVRPHIDISFHGILSHINTVFVLRSKEGLLDVEKLECEDELTGTEISCLRLKGQMIYLPEADSILFLCSPSVMNLDDLTRRGLYLSDIPLHDATRDLVLLGEQFREEYKLTQELEILTDRLQLTLRALEDEKKKTDTLLYSVLPPSVANELRHKRPVPAKRYDNVTILFSGIVGFNAFCSKHASGEGAMKIVNLLNDLYTRFDTLTDSRKNPFVYKVETVGDKYMTVSGLPEPCIHHARSICHLALDMMEIAGQVQVDGESVQITIGIHTGEVVTGVIGQRMPRYCLFGNTVNLTSRTETTGEKGKINVSEYTYRCLMSPENSDPQFHLEHRGPVSMKGKKEPMQVWFLSRKNTGTEETKQDDD

SEQ ID NO: 560 - DNA, 4868 bp, Homo sapiens
gcctagggaggaggagcgagaatcagcctggttcagtgactgagacaaactggaggtgaaaggagctggtactgtccactgtgctgtcggtgctgaacctgagacgcgagcggaccagttgctccagcacctgaaggcaacgccctcttgcaccctctgtgccctgtgggacccgcttcaccaacaggacccatatcaacttgacaaaggagtgtggtatcggacgtgggagagagtcctctgtttgccacctgggcgctcattcaggcgtgactttggagatttctatagttttagactaaactatttttttttccccagctaagacgatcttttgagagtttttttttttttattgtgatttatatttccacagcgtttaggaatctttctgggggacttttgtgactgttaaaataaggtgaaaagcaataaggatgtttaagtgctggtcagttgtcttggttctcggattcatttttctggagtcggaaggaaggccaaccaaagaaggaggatatggccttaaatcctatcagcctctaatgagattgcgacataagcaggaaaaaaatcaagaaagttcaagagtcaaaggatttatgattcaggatggcccttttggatcttgtgaaaataagtactgtggtttgggaagacactgtgttaccagcagagagacagggcaagcagaatgtgcctgtatggacctttgcaaacgtcactacaaacctgtgtgtggatctgacggagaattctatgaaaaccactgtgaagtgcacagagctgcttgcctgaaaaaacaaaagattaccattgttcacaatgaagactgcttctttaaaggagataagtgcaagactactgaatacagcaagatgaaaaatatgctattagatttacaaaatcaaaaatatattatgcaagaaaatgaaaatcctaatggcgacgacatatctcggaagaagctattggtggatcaaatgtttaaatattttgatgcagacagtaatggacttgtagatattaatgaactaactcaggtgataaaacaggaagaacttggcaaggatctctttgattgtactttgtatgttctattgaaatatgatgattttaatgctgacaagcacctggctcttgaagaattttatagagcattccaagtgatccagttgagtctgccagaagatcagaaactaagcatcactgcagcaactgtgggacaaagtgctgttctgagctgtgccattcaaggaaccctgagacctcccattatctggaaaaggaacaatattattctaaataatttagatttggaagacatcaatgactttggagatgatgggtccttgtatattactaaggttaccacaactcacgttggcaattacacctgctatgcagatggctatgaacaagtctatcagactcacatcttccaagtgaatgttcctccagtcatccgggtgtatccagagagtcaggctagagagcctggggtaactgccagtcttaggtgccatgcagagggcataccaaagcctcagcttggctggttgaagaatggaattgatattacaccaaagctttccaaacaactcacgcttcaagcaaatggcagtgaggttcacataagcaatgtgcgctatgaagatactggagcatacacttgtatcgcaaagaatgaagcaggagtggatgaagacatctcttctctttttgtggaagactctgctagaaagaccctagctaacatattatggagagaagaaggtctgggaattgggaacatgttctatgttttttatgaagatggaatcaaagtgatacaacccatagaatgtgaatttcagaggcacattaagcctagtgaaaagctccttggatttcaggatgaagtctgtcccaaagctgagggagatgaagttcagaggtgtgtgtgggcatcagctgttaatgtcaaagacaagttcatttatgttgcacagccaactttggacagagtccttattgttgatgtgcagtcccaaaaagttgttcaggcagtgagcacagaccctgtcccagttaaattacactatgacaaatcacatgatcaggtctgggtgctaagctggggtaccttggagaagtcatcaccaacactacaggtaattaccctggccagtgggaatgtgcctcaccacacgatccacacccaaccagtgggaaagcaatttgacagagtggatgattttttcattcccaccacaacactcattatcacccatatgaggtttggatttattcttcataaagatgaagctgcactacaaaaaattgatattgaaaccatgtcatacatcaagacaattaacttgaaggactataagtgcgttcctcagtcattggcatatacacacttgggaggctactacttcattggctgcaaacctgacagcaccggagcagtttccccacaggtcatggtggacggtgtaactgactcagtcattgggttcaatagtgatgtgacgggcactccatatgtctctccagatggccactaccttgtcagcattaatgatgtgaaaggtcttgtaagggttcagtacattaccatcagaggagaaatacaggaggcttttgatatttacacaaatctgcacatatctgatctggcatttcaaccatcctttactgaagcccaccaatataacatctacggtagttcaagcacacaaactgatgtgctctttgtggagctctcttctgggaaggtcaagatgataaagagtctcaaggaaccactcaaggcagaagaatggccttggaaccggaaaaacaggcaaatccaggacagtggcttgtttggtcaatacctgatgacaccttccaaggactctctcttcatcctagatggacgactcaataaattaaactgtgagatcactgaagttgaaaaaggaaatacagtcatttgggttggagatgcctaaaaaccctacgatacaattattgaatgaagcgttttacaatacattgcacttaatccattgtttaaatttacaacttaactttccaagtttatatcctagtcaaacaaaatttacttggttggtccaaataaaataaattgtttttgactaagtgactaagacatacacaattaattatattggttaattagaaatactcagcacaatatttaatgagaaatcacatcagtcacaagaatcaaatatgtaaattatgctttaaacaataaagtaggatttaaatcatttaaaaaactaaactgcagggaatttcagatgacataaagcattatttcattttgagggtagtttattttttttctctgtccttttggtatgattaaacaagaaataaaaggtgttgtggaaacttaaaattcttaattcaaaatattcggtcctgtccactgtttataatattttgtgccttgaagggaatgtcacaggaggaaaaggaagactaaagcctgcatactaaatgctctcataactataaatctcttgttgttaaaaaacatctcttgcaccaaatcctgtcttcagtcttttgtttaaccctcaatgaactaccaattgaaggcataagttggtcttaggttgtatacaggtgtcaaactccacttgacatttactgtataatctgcagcatgctatagaaagtggggaggaagggaggaaaaataattacagtcaaaatatttgcaatctatctactcattttgctttcaatcactagagtgcattatgtttttaatgcaagtttgtctgggatgtcaactgcctacagatgtttattactagcagaatagattatttattaatagattgtttcttttcatatagtccaatgtttcatcatcaggaactttcggttttaaaaaagaaacattacttttgtctgctaaagtaaacaatatatagggaaattaacacctaggaaaagaaaactggcaagagaattgatgaggtattagtggcttagaagaattagtaatataagttgggaataaaggggtagcccgacagtggtaagtaaaaatgtagtactccattgtttttgctatttaaatataatgtatcaaaaacctttattctaaaatttccacaaatgattccttttatccatcttcttgtaatcctaaaagcatcttctcactatgtgctgtagtttgaaacctaacgaatcctcctacttgagacactgtagaaaagtaaaaattgttgcttctgttttcttttaagaggaaatgagaaggccagcagaagtagattaaaactagagagctggtttattaaaataagcagataattatccaggcttaaagtaatagcttacatgttttgaaaatccttgtacttatttttgtttttattgttgcaaaaaaatgttaatgggctgttgaaatgacctccatttacttaaggtaatccaataaggtcttttttaaatatacaaattttactcaagtttaaattgtataaaactgcttagaaacctgaaattttatagtgtgtaatatcttatgtgtatatagcatcctgagctgtgtgatacagtagatttcttcttagcagaaacatgcgaggtagatttaataaacaacaaaaatcagcttatgtttctacttattgaatctgctttactttttagcaattttcttccttgtgaacatgaaccatataaagtgtctgtgacttaatgatttcatgtaagtctgtcgcatacatccttcttttgtagcttacaccatgtggatgctctgtctgtagacactgcttgataaaaggagaataaacctcttacattttaaaaaaaaaaaaaaaaaaaaaaaagaaaaaaaaaaaaaa

SEQ ID NO: 561 - protein, 847 aa, Homo sapiens
MFKCWSVVLVLGFIFLESEGRPTKEGGYGLKSYQPLMRLRHKQEKNQESSRVKGFMIQDGPFGSCENKYCGLGRHCVTSRETGQAECACMDLCKRHYKPVCGSDGEFYENHCEVHRAACLKKQKITIVHNEDCFFKGDKCKTTEYSKMKNMLLDLQNQKYIMQENENPNGDDISRKKLLVDQMFKYFDADSNGLVDINELTQVIKQEELGKDLFDCTLYVLLKYDDFNADKHLALEEFYRAFQVIQLSLPEDQKLSITAATVGQSAVLSCAIQGTLRPPIIWKRNNIILNNLDLEDINDFGDDGSLYITKVTTTHVGNYTCYADGYEQVYQTHIFQVNVPPVIRVYPESQAREPGVTASLRCHAEGIPKPQLGWLKNGIDITPKLSKQLTLQANGSEVHISNVRYEDTGAYTCIAKNEAGVDEDISSLFVEDSARKTLANILWREEGLGIGNMFYVFYEDGIKVIQPIECEFQRHIKPSEKLLGFQDEVCPKAEGDEVQRCVWASAVNVKDKFIYVAQPTLDRVLIVDVQSQKVVQAVSTDPVPVKLHYDKSHDQVWVLSWGTLEKSSPTLQVITLASGNVPHHTIHTQPVGKQFDRVDDFFIPTTTLIITHMRFGFILHKDEAALQKIDIETMSYIKTINLKDYKCVPQSLAYTHLGGYYFIGCKPDSTGAVSPQVMVDGVTDSVIGFNSDVTGTPYVSPDGHYLVSINDVKGLVRVQYITIRGEIQEAFDIYTNLHISDLAFQPSFTEAHQYNIYGSSSTQTDVLFVELSSGKVKMIKSLKEPLKAEEWPWNRKNRQIQDSGLFGQYLMTPSKDSLFILDGRLNKLNCEITEVEKGNTVIWVGDA

SEQ ID NO: 562 - DNA, 426 bp, Homo sapiens
attattgttttgtactactaagctttgacacgaactatggggaagatctaaaattaatatacaaccatacctcaaaatattgcaggatcagttccagaccactgccatgaagtcaatattgcaacaaagtgcccaaaaatcatggtctagttttccctgctttcaccctcacaactggagggttcatggagctctccaggggatgacggttgtgccatgcagagcagcatttctaagcaagtgtgagttcatgagtgtgattgaaactgctgtttcacatagaaaggcctgcgtgcagcaggttgcaaacaggtcctgaagggacggcacatcccagctggagcgtgtggcccatctgcccgattagcaccgtggctgaaaggagctgacaagcagcttctatttttatctaatctttaaattcca

SEQ ID NO: 563 - protein, 70 aa, Homo sapiens
MKSILQQSAQKSWSSFPCFHPHNWRVHGALQGMTVVPCRAAFLSKCEFMSVIETAVSHRKACVQQVANRS

SEQ ID NO: 564 - DNA, 1258 bp, Homo sapiens
atgtgttgcagtaatagtgcagttggaagaccaagtggagtggatgattctagtctaacccaaggacaaaatctgattcaactcagtaatgaactaaacacagcagcttgcttcagtgataccttgggataccaggcacagctccacctgttctgtgaagacaaggggcagctcatctgctggcactgtgagcgggcaccgcagcacaaagggcacaccacagctcttgttgaagacgtatgccagggctacaaggaaaagctccagaaagctgtgacaaaattgaggcaacttgaagaggagtgcacagagcagaaggtgttcacagcaatgcacataactaaatggacaataaaagacacaaattcagagacaaaaaaatcgtttgactttaagaatctccagagtttcctacatgaggagaagaagtcttatccctggagacaggagaaggaagaacgatagactctgaatagactgagggaccatgggaccagtctggggctgaattcaagagccacatgctggaactggaggaaaaatgtcggggctcagcccaaaaattgctgcagaatgtgaatgatactgtgggcaggagttggactgtgaagctggaaacatcagaggccttctccttagagcttcatactatgtgcaacatttttgagctttatttcctgtaatgtgaagaaaatgttaaggagccatcaagagatgggtaccgggattacagtcaacatgactctggatccagatacagctcatagtgaactaattctgtatgaggattggagaaaagtgacttgtggatatccccaggaccatcacagcacttcttccaggagatttagtgccttcccctgtgtcctgggttgtgagggcttcacctctcaggaagatgctccttcaaaatggatgctggaaaacgaaccaggtgggatttaggagtttgtatggcaatatgcagaggtgcactgacatgaagcaagagcctcagtctggattctggaacctcggactatgccaaaagaaaggctatgtagcccttacatctcccttaacttcccttcatatgtgtgagcagcccttggttgtgggagtgtttctggactctgaggctggagttgtatccttttacaacatgagtactggctaccacatcttcaccttcccaaaggcttccttctctgatactatccggccctatttccaggtttatcaatattctcctttgttcctgcctcccccagatggttaa

SEQ ID NO: 565 - DNA, 10858 bp, Homo sapiens
accagcaggactgatgtgcacacagaaggaatgaagtatggatgtgaaagaacgcaggccttactgctccctgaccaagagcagacgagagaaggaacggcgctacacaaattcctccgcagacaatgaggagtgccgggtacccacacagaagtcctacagttccagcgagacattgaaagcttttgatcatgattcctcgcggctgctttacggcaacagagtgaaggatttggttcacagagaagcagacgagttcactagacaaggacagaattttaccctaaggcagttaggagtttgtgaaccagcaactcgaagaggactggcattttgtgcggaaatggggctccctcacagaggttactctatcagtgcagggtcagatgctgatactgaaaatgaagcagtgatgtccccagagcatgccatgagactttggggcaggggggtcaaatcaggccgcagctcctgcctgtcaagtcggtccaactcagccctcaccctgacagatacggagcacgaaaacaagtccgacagtgagaatgagcaacctgcaagcaatcaaggccagtctaccctgcagcccttgccgccttcccataagcagcactctgcacagcatcatccatccatcacttctctcaacagaaactccctgaccaatagaaggaaccagagtccggccccgccggctgctttgcccgccgagctgcaaaccacacccgagtccgtccagctgcaggacagctgggtccttggcagtaatgtaccactggaaagcaggcatttcctattcaaaacaggaacaggtacaacgccactgttcagtactgcaaccccaggatacacaatggcatctggctctgtttattcaccacctactcggccactacctagaaacaccctatcaagaagtgcttttaaattcaagaagtcttcaaagtactgtagctggaaatgcactgcactgtgtgccgtaggggtctcggtgctcctggcaatactcctgtcttattttatagcaatgcatctctttggcctcaactggcagctacagcagactgaaaatgacacatttgagaatggaaaagtgaattctgataccatgccaacaaacactgtgtcattaccttctggagacaatggaaaattaggtggatttacgcaagaaaataacaccatagattccggagaacttgatattggccgaagagcaattcaagagattcctcccgggatcttctggagatcacagctcttcattgatcagccacagtttcttaaattcaatatctctcttcagaaggatgcattgattggagtatatggccggaaaggcttaccgccttcccatactcagtatgacttcgtggagctcctggatggcagcaggctgattgccagagagcagcggagcctgcttgagacggagagagccgggcggcaggcgagatccgtcagccttcatgaggccggctttatccagtacttggattctggaatctggcatctggctttttataatgatgggaaaaatgcagagcaggtgtcttttaataccattgttatagagtctgtggtggaatgtccccgaaattgccatggaaatggagaatgcgtttctggaacttgccattgttttccaggatttctgggtccggattgttcaagagccgcctgtccagtgttatgtagtggcaacgggcagtactccaagggccgctgcctgtgtttcagcggctggaagggcaccgagtgtgatgtgccgactacccagtgtattgacccacagtgtgggggtcgtgggatttgtatcatgggctcttgtgcttgcaactcaggatacaaaggagaaagttgtgaagaagctgactgtatagaccctgggtgttctaatcatggtgtgtgtatccacggggaatgtcactgcagtccaggatggggaggtagcaattgtgaaatactgaagaccatgtgtccagaccagtgctccggccacggaacgtatcttcaagaaagtggctcctgcacgtgtgaccctaactggactggcccagactgctcaaacgaaatatgttctgtggactgtggctcacacggcgtttgcatgggggggacgtgtcgctgtgaagaaggctggacgggcccagcctgtaatcagagagcctgccacccccgctgtgccgagcacgggacctgcaaggatggcaagtgtgaatgcagccagggctggaatggagagcactgcactatcgctcactatttggataagatagttaaagagggttgtcctggtctgtgcaacagcaatggaagatgtaccctggaccaaaatggctggcattgtgtgtgccagcctggatggagaggagcaggctgtgacgtagccatggagactctttgcacagatagcaaggacaatgaaggagatggactcattgactgcatggatcccgattgctgcctacagagttcctgccagaatcagccctattgtcggggactgccggatcctcaggacatcattagccaaagccttcaatcgccttctcagcaagctgccaaatccttttatgatcgaatcagtttccttataggatctgatagcacccatgttatacctggagaaagtcctttcaataagagccttgcatctgtcatcagaggccaagtactgactgctgatggaactccacttattggagtaaatgtctcgtttttccattacccagaatatggatatactattacccgccaggacggaatgtttgacttggtggcaaatggtggggcctctctaactttggtatttgaacgatccccattcctcactcagtatcatactgtgtggattccatggaatgtcttttatgtgatggataccctagtcatgaagaaagaagagaatgatattcccagctgtgatctgagtggattcgtgaggccaaatcccatcattgtgtcatcacctttatccacctttttcagatcttctcctgaagacagtcccatcattcccgaaacacaggtactccacgaggaaactacaattccaggaacagatttgaaactctcctacttgagttccagagctgcagggtataagtcagttctcaagatcaccatgacccagtctattattccatttaatttaatgaaggttcatcttatggtagctgtagtaggaagactcttccaaaagtggtttcctgcctcaccaaacttggcctatactttcatatgggataaaacagatgcatataatcagaaagtctatggtctatctgaagctgttgtgtcagttggatatgagtatgagtcgtgtttggacctgactctgtgggaaaagaggactgccattctgcagggctatgaattggatgcgtccaacatgggtggctggacattagataaacatcacgtgctggatgtacagaacggtatactgtacaagggaaacggggaaaaccagttcatctcccagcagcctccagtcgtgagtagcatcatgggcaatgggcgaaggcgcagcatttcctgccccagttgcaatggtcaagctgatggtaacaagttactggccccagtggcgctagcttgtgggatcgatggcagtctgtacgtaggcgatttcaactatgtgcggcggatattcccttctggaaatgtaacaagtgtcttagaactaagaaataaagattttagacatagcagcaacccagctcatagatactaccttgcaacggatccagtcacgggagatctgtacgtttctgacacaaacacccgcagaatttatcgcccaaagtcacttacgggggcaaaagacttgactaaaaatgcagaagtcgtcgcagggacaggggagcaatgccttccgtttgacgaggcgagatgtggggatggagggaaggccgtggaagccacactcatgagtcccaaaggaatggcagttgataagaatggattaatctactttgttgatggaaccatgattaggaaagttgaccaaaatggaatcatatcaactcttctgggctctaacgatttgacttcagccagacctttaacttgtgacaccagcatgcacatcagccaggtacgtctggaatggcccactgacctagccattaaccctatggataactccatttatgtcctggataataatgtagttttacagatcactgaaaatcgtcaagttcgcattgctgctggacggcccatgcactgtcaggttcccggagtggaatatcctgtggggaagcacgcggtgcagacaacactggaatcagccactgccattgctgtgtcctacagtggggtcctgtacattactgaaactgatgagaagaaaattaaccggataaggcaggtcacaacagatggagaaatctccttagtggccggaataccttcagagtgtgactgcaaaaatgatgccaactgtgactgttaccagagtggagatggctacgccaaggatgccaaactcagtgccccatcctccctggctgcttctccagatggtacactgtatattgcagatctagggaatatccggatccgggctgtgtcaaagaataagcctttacttaactctatgaacttctatgaagttgcgtctccaactgatcaagaactctacatctttgacatcaatggtactcaccaatatactgtaagtttagtcactggtgattacctttacaattttagctacagcaatgacaatgatattactgctgtgacagacagcaatggcaacacccttagaattagacgggacccaaatcgcatgccagttcgagtggtgtctcctgataaccaagtgatatggttgacaataggaacaaatggatgtttgaaaagcatgactgctcaaggactggaattagttttgtttacttaccatggcaatagtggccttttagccactaaaagtgatgaaactggatggacaacgttttttgactatgacagtgaaggtcgtctgacaaatgttacgtttccaactggagtggtcacaaacctgcatggggacatggacaaggctatcacagtggacattgagtcatctagccgagaagaagatgtcagcatcacttcaaatctgtcctcgatcgattctttctacaccatggttcaagatcagttaagaaacagctaccagattggttatgacggctccctcagaattatctacgccagtggcctggactcacactaccaaacagagccgcacgttctggctggcaccgctaatccgacggttgccaaaagaaacatgactttgcctggcgagaacggtcaaaacttggtggaatggagattccgaaaagagcaagcccaagggaaagtcaatgtctttggccgcaagctcagggttaatggcagaaacctcctttcagttgactttgatcgaacaacaaagacagaaaagatctatgacgaccaccgtaaatttctactgaggatcgcctacgacacgtctgggcacccgactctctggctgccaagcagcaagctgatggccgtcaatgtcacctattcatccacaggtcaaattgccagcatccagcgaggcaccactagcgagaaagtagattatgacggacaggggaggatcgtgtctcgggtctttgctgatggtaaaacatggagttacacatatttagaaaagtccatggttcttctgcttcatagccagcggcagtacatcttcgaatacgatatgtgggaccgcctgtctgccatcaccatgcccagtgtggctcgccacaccatgcagaccatccgatccattggctactaccgcaacatatacaaccccccggaaagcaacgcctccatcatcacggactacaacgaggaagggctgcttctacaaacagctttcttgggtacaagtcggagggtcttattcaaatacagaaggcagactaggctctcagaaattttatatgatagcacaagagtcagttttacctatgatgaaacagcaggagtcctaaagacagtaaacctccagagtgatggttttatttgcaccattagatacaggcaaattggtcccctgattgacaggcagattttccgctttagtgaagatgggatggtaaatgcaagatttgactatagctatgacaacagctttcgagtgaccagcatgcagggtgtgatcaatgaaacgccactgcctattgatctgtatcagtttgatgacatttctggcaaagttgagcagtttggaaagtttggagttatatattatgatattaaccagatcatttctacagctgtaatgacctatacgaagcactttgatgctcatggccgtatcaaggagattcaatatgagatattcaggtcgctcatgtactggattacaattcagtatgataacatgggtcgggtaaccaagagagagattaaaatagggccctttgccaacaccaccaaatatgcttatgaatatgatgttgatggacagctccaaacagtttacctcaatgaaaagataatgtggcggtacaactacgatctgaatggaaacctccatttactgaacccaagtaacagtgcgcgtctgacaccccttcgctatgacctgcgagacagaatcactcgactgggtgatgttcaatatcggttggatgaagatggtttcctacgtcaaaggggcacggaaatctttgaatatagctccaaggggcttctaactcgagtttacagtaaaggcagtggctggacagtgatctaccgttatgacggcctgggaaggcgtgtttctagcaaaaccagtctaggacagcacctgcagtttttttatgctgacttaacttatcccactaggattactcatgtctacaaccattcgagttcagaaattacctccctgtattatgatctccaaggacatctttttgccatggaaatcagcagtggggatgaattctatattgcatcggataacacagggacaccactggctgtgttcagtagcaatgggcttatgctgaaacagattcagtacactgcatatggggaaatctattttgactctaatattgactttcaactggtaattggatttcatggtggcctgtatgacccactcaccaaattaatccactttggagaaagagattatgacattttggcaggacggtggacaacacctgacatagaaatctggaaaagaattgggaaggacccagctccttttaacttgtacatgtttaggaataacaaccctgcaagcaaaatccatgacgtgaaagattacatcacagatgttaacagctggctggtgacatttggtttccatctgcacaatgctattcctggattccctgttcccaaatttgatttaacagaaccttcttacgaacttgtgaagagtcagcagtgggatgatataccgcccatcttcggagtccagcagcaagtggcgcggcaggccaaggccttcctgtcgctggggaagatggccgaggtgcaggtgagccggcgccgggccggcggcgcgcagtcctggctgtggttcgccacggtcaagtcgctgatcggcaagggcgtcatgctggccgtcagccagggccgcgtgcagaccaacgtgctcaacatcgccaacgaggactgcatcaaggtggcggccgtgctcaacaacgccttctacctggagaacctgcacttcaccatcgagggcaaggacacgcactacttcatcaagaccaccacgcccgagagcgacctgggcacgctgcggttgaccagcggccgcaaggcgctggagaacggcatcaacgtgacggtgtcgcagtccaccacggtggtgaacggcaggacgcgcaggttcgcggacgtggagatgcagttcggcgcgctggcgctgcacgtgcgctacggcatgaccctggacgaggagaaggcgcgcatcctggagcaggcgcggcagcgcgcgctcgcccgggcctgggcgcgcgagcagcagcgcgtgcgcgacggcgaggagggcgcgcgcctctggacggagggcgagaagcggcagctgctgagcgccggcaaggtgcagggctacgacgggtactacgtactctcggtggagcagtaccccgagctggccgacagcgccaacaacatccagttcctgcggcagagcgagatcggcaggaggtaacgcccgggccgcgcccgccgagccgctcacgccctgcccacattgtcctgtggcacaacccgagtgggactctccaacgcccaagagccttcctcccgggggaatgagactgctgttacgacccacacccacaccgcgaaaacaaggaccgcttttttccgaatgaccttaaaggtgatcggctttaacgaatatgtttacatatgcatagcgctgcactcagtcggactgaacgtagccagaggaaaaaaaaatcatcaaggacaaaggcctcgacctgttgcgctgggccgtctgttccttctaggcactgtatttaactaactttaaaaaagaaaaaaaaatgtgtacagtgtttccaaatagtcccgaattgtcgacctttgcttacaagaagtagtctgtctgcataggatgtgatagctatctctgttcattttacaatgtggggcaaagttactgtttctagacaacccaactgctttccctgtgcagctttgtagaaggacattggcacagtgacttctgcggcggggatttattaatggattttacaatgctaacgtggtttcccttcggggaaaaaactggcaactagaatccttgtcactgataagcaaaggaaatcctgatttttttgtaaattatgtgagacaagttgtttatggatttttatatgaattacaatttactgtacatcaaatcttagtctcagaggagttaatttatgtaaagtgtttaaaaatttatacttaaaaataaaatgataaaaacgtgaactgtgtgatttttttaaaaggattgcaccttttgttatctgttatagctgtacagtatgaattattatattgtagagatataacaacttatgcctataatgtccagaagtgttaatatttttgtattaggttgaaaaaatgtgcaagcttctatcactagatggataggaccgtgcaattctaggtgggtggcgaatcagagagctcctttctcttccctctctcacgcatcaggccagtgtcctcagcattgtcaactgagaggcacagtagacaactagggctggtggaatgtaagggaagaagattgaaaaaacgggaggaagggttctctggccctctctcaaccttgcaagtcaatggggagttgttgatataattaaccccgaggtttttactgttactgttccaaagctctgtctcttgatggaggagagaccacatcagatgctggggaaataggaggaggaaaggttctgatgtagtcgtgatcctaaacacgtgtcttaagatctaggaaagacagcagaaaccgagcagtggtgggtgagccagatggagccggtcagggttactctaagcccacatgaccaaaccatcttggggggctggtttgaatgacagcctctgctctgtctcggggaagccgggggtggcagatccagctggaagtgaactgacagccgcgccctcctgcacacatgcatgcacgcgtgtgggaacgagcccagccgccatctgcacttccgtgtcggctcagctctgacaaatctctttcctgagcactaaattcagccacgaaaatatttttagaagatatttctcagttcatcgagctatagtacacactgttttcctctatgtataatggtgataaaatatagcaagtgaacatgtcgtaaatataaaggttcaagtgatgtattgaaaataattttctaactgctttgtatgtatcacatactctaaattgcacagtaggcgtgtttattaaacagatgattggctgggaaagtttcaaaatagctactgaatttacagtatcagtgctattactgtctttgtgtatttggtagagcataccgaagtaattaatcttctaatgaatgctgatgatattttattagaatgaaagcacagattagcattaatattttttattctggaaatcctttggcaagtattatgaagcccaaatttagaaaactatgagatttcaaaccacataaacatgattctgttttccattttattttttaactgttaggtatttgcagttctgttccgtggaacttctgcaggcctgtatttagcatgctgtaagtacttttgggtgaaataggctctgagtctaaattctcagacatgtttctgatgtattaccatgaaaagcttgtgccacatgacagaagtgagatcatagtcttaacctcttcttgacgtggactggtcttcactcgggcaccgataaataacagatttggagtatctcctggtgcttattttagatgatgaagtcaaatcaacccaattagtgtcctgttagtaggtataatgagcctatttctttctaaaaagacttgtgatctggacatgcttttacaagaaatagtgaccttggggaatatgtaaacaaaagacctttttctaagagttgggagggggtgggggactgtataatgaaaagaattagcttacaaaaaagaaattgatattcaaagtattttaggcaaagccagtcaaaatgctttcatgatattttgagatgtaaattttgtctgatttgtattgttcttttcatttgccttcttaactttatatgtgacctgaattttccataacttgatgactatagattgcacctaggcattccaataaaagccaacccaatgtg

SEQ ID NO: 566 - protein, 2715 aa, Homo sapiens
MDVKERRPYCSLTKSRREKERRYTNSSADNEECRVPTQKSYSSSETLKAFDHDSSRLLYGNRVKDLVHREADEFTRQGQNFTLRQLGVCEPATRRGLAFCAEMGLPHRGYSISAGSDADTENEAVMSPEHAMRLWGRGVKSGRSSCLSSRSNSALTLTDTEHENKSDSENEQPASNQGQSTLQPLPPSHKQHSAQHHPSITSLNRNSLTNRRNQSPAPPAALPAELQTTPESVQLQDSWVLGSNVPLESRHFLFKTGTGTTPLFSTATPGYTMASGSVYSPPTRPLPRNTLSRSAFKFKKSSKYCSWKCTALCAVGVSVLLAILLSYFIAMHLFGLNWQLQQTENDTFENGKVNSDTMPTNTVSLPSGDNGKLGGFTQENNTIDSGELDIGRRAIQEIPPGIFWRSQLFIDQPQFLKFNISLQKDALIGVYGRKGLPPSHTQYDFVELLDGSRLIAREQRSLLETERAGRQARSVSLHEAGFIQYLDSGIWHLAFYNDGKNAEQVSFNTIVIESVVECPRNCHGNGECVSGTCHCFPGFLGPDCSRAACPVLCSGNGQYSKGRCLCFSGWKGTECDVPTTQCIDPQCGGRGICIMGSCACNSGYKGESCEEADCIDPGCSNHGVCIHGECHCSPGWGGSNCEILKTMCPDQCSGHGTYLQESGSCTCDPNWTGPDCSNEICSVDCGSHGVCMGGTCRCEEGWTGPACNQRACHPRCAEHGTCKDGKCECSQGWNGEHCTIAHYLDKIVKEGCPGLCNSNGRCTLDQNGWHCVCQPGWRGAGCDVAMETLCTDSKDNEGDGLIDCMDPDCCLQSSCQNQPYCRGLPDPQDIISQSLQSPSQQAAKSFYDRISFLIGSDSTHVIPGESPFNKSLASVIRGQVLTADGTPLIGVNVSFFHYPEYGYTITRQDGMFDLVANGGASLTLVFERSPFLTQYHTVWIPWNVFYVMDTLVMKKEENDIPSCDLSGFVRPNPIIVSSPLSTFFRSSPEDSPIIPETQVLHEETTIPGTDLKLSYLSSRAAGYKSVLKITMTQSIIPFNLMKVHLMVAVVGRLFQKWFPASPNLAYTFIWDKTDAYNQKVYGLSEAVVSVGYEYESCLDLTLWEKRTAILQGYELDASNMGGWTLDKHHVLDVQNGILYKGNGENQFISQQPPVVSSIMGNGRRRSISCPSCNGQADGNKLLAPVALACGIDGSLYVGDFNYVRRIFPSGNVTSVLELRNKDFRHSSNPAHRYYLATDPVTGDLYVSDTNTRRIYRPKSLTGAKDLTKNAEVVAGTGEQCLPFDEARCGDGGKAVEATLMSPKGMAVDKNGLIYFVDGTMIRKVDQNGIISTLLGSNDLTSARPLTCDTSMHISQVRLEWPTDLAINPMDNSIYVLDNNVVLQITENRQVRIAAGRPMHCQVPGVEYPVGKHAVQTTLESATAIAVSYSGVLYITETDEKKINRIRQVTTDGEISLVAGIPSECDCKNDANCDCYQSGDGYAKDAKLSAPSSLAASPDGTLYIADLGNIRIRAVSKNKPLLNSMNFYEVASPTDQELYIFDINGTHQYTVSLVTGDYLYNFSYSNDNDITAVTDSNGNTLRIRRDPNRMPVRVVSPDNQVIWLTIGTNGCLKSMTAQGLELVLFTYHGNSGLLATKSDETGWTTFFDYDSEGRLTNVTFPTGVVTNLHGDMDKAITVDIESSSREEDVSITSNLSSIDSFYTMVQDQLRNSYQIGYDGSLRIIYASGLDSHYQTEPHVLAGTANPTVAKRNMTLPGENGQNLVEWRFRKEQAQGKVNVFGRKLRVNGRNLLSVDFDRTTKTEKIYDDHRKFLLRIAYDTSGHPTLWLPSSKLMAVNVTYSSTGQIASIQRGTTSEKVDYDGQGRIVSRVFADGKTWSYTYLEKSMVLLLHSQRQYIFEYDMWDRLSAITMPSVARHTMQTIRSIGYYRNIYNPPESNASIITDYNEEGLLLQTAFLGTSRRVLFKYRRQTRLSEILYDSTRVSFTYDETAGVLKTVNLQSDGFICTIRYRQIGPLIDRQIFRFSEDGMVNARFDYSYDNSFRVTSMQGVINETPLPIDLYQFDDISGKVEQFGKFGVIYYDINQIISTAVMTYTKHFDAHGRIKEIQYEIFRSLMYWITIQYDNMGRVTKREIKIGPFANTTKYAYEYDVDGQLQTVYLNEKIMWRYNYDLNGNLHLLNPSNSARLTPLRYDLRDRITRLGDVQYRLDEDGFLRQRGTEIFEYSSKGLLTRVYSKGSGWTVIYRYDGLGRRVSSKTSLGQHLQFFYADLTYPTRITHVYNHSSSEITSLYYDLQGHLFAMEISSGDEFYIASDNTGTPLAVFSSNGLMLKQIQYTAYGEIYFDSNIDFQLVIGFHGGLYDPLTKLIHFGERDYDILAGRWTTPDIEIWKRIGKDPAPFNLYMFRNNNPASKIHDVKDYITDVNSWLVTFGFHLHNAIPGFPVPKFDLTEPSYELVKSQQWDDIPPIFGVQQQVARQAKAFLSLGKMAEVQVSRRRAGGAQSWLWFATVKSLIGKGVMLAVSQGRVQTNVLNIANEDCIKVAAVLNNAFYLENLHFTIEGKDTHYFIKTTTPESDLGTLRLTSGRKALENGINVTVSQSTTVVNGRTRRFADVEMQFGALALHVRYGMTLDEEKARILEQARQRALARAWAREQQRVRDGEEGARLWTEGEKRQLLSAGKVQGYDGYYVLSVEQYPELADSANNIQFLRQSEIGRR

SEQ ID NO: 567 - DNA, 572 bp, Homo sapiens
agcacataagagcacacgcgtggggctccagcccggccacggggagaccttttctcagcaaagggcagcactgctcgctttgctggggcagccctcccaggaagatcccagaagagatggtctgaggtgtgtgaacactgtgaatgtcatggacaaagctcagcgtgggaccccatgggacttcaggccctgaaagcagcagatctcacctgcattggaggatgagacgccacatgaagaagaaagaagacgccacagacagcagcgcagtaccaccttccagagatgtcagagcagtactactgggagagccaaggcgcttctctggatgcactcaactacagggatctttcttttgtacatgcttgaatatttaccattaggtttgatgtagtggaaagactcctggatttggaatcggaaactctgaacgagaagacacttattttgtcacggtacgggaggaaatgtatcttccttgcccatctcaggttcagggctgaggcccatataagaaaagacagattaagaagagaaaagtatacacatttagttaatctaagttttacttg

SEQ ID NO: 568 - protein, 79 aa, Homo sapiens
MSWTKLSVGPHGTSGPESSRSHLHWRMRRHMKKKEDATDSSAVPPSRDVRAVLLGEPRRFSGCTQLQGSFFCTCLNIYH

SEQ ID NO: 569 - DNA, 2302 bp, Homo sapiens
agccgcggctcttcgcagtttcctctccttgttttgctttcgatctggactgttctcaggcaagccggggagtaacttttagttttgctcctgcgattattcaactgacgggctttcatttccatttcacataccctagcaacacttataccttgcggaattgtattggtagcgtgaaaaaagcacactgagagggcaccatgccggtggaaaggatgcgcatgcgcccgtggctggaggagcagataaactccaacacgatcccggggctcaagtggcttaacaaggaaaagaagatttttcagatcccctggatgcatgcggctagacatgggtgggatgtggaaaaagatgcaccactctttagaaactgggcaatccatacaggaaagcatcaaccaggagtagataaacctgatcccaaaacatggaaggcgaatttcagatgcgccatgaattccttgcctgatattgaagaagtcaaggataaaagcataaagaaaggaaataatgccttcagggtctaccgaatgctgcccctatcagaacggccttctaagaaaggaaagaaaccaaagacagaaaaagaagacaaagttaagcacatcaagcaagaaccagttgagtcatctctggggcttagtaatggagtaagtgatctttctcctgagtatgcggtcctgacttcaactataaaaaatgaagtggatagtacggtgaacatcatagttgtaggacagtcccatctggacagcaacattgagaatcaagagattgtcaccaatccgccagacatttgccaagttgtagaggtgaccactgagagcgacgagcagccggtcagcatgagcgagctctaccctctgcagatctcccccgtgtcttcctatgcagaaagcgaaacgactgatagtgtgcccagcgatgaagagagtgccgaggggcggccacactggcggaagaggaatattgaaggcaaacagtacctcagcaacatggggactcgaggctcctacctgctgcccggcatggcgtccttcgtcacttccaacaaaccggacctccaggtcaccatcaaagaggagagcaatccggtgccttacaacagctcctggcccccttttcaagacctccccctttcttcctccatgaccccagcatccagcagcagtcggccagaccgggagacccgggccagcgtcatcaagaaaacatcggatatcacccaggcccgcgtcaagagctgttaagcctctgactctccgcggtggttgttggggcttcttggctttgttttgttgtttgtttgtattttatttttttctctctgacacctattttagacaaatctaagggaaaaagccttgacaatagaacattgattgctgtgtccaactccagtactggagcttctctttaactcaggactccagcccattggtagacgtgtgtttctagagcctgctggatctcccagggctactcactcaagttcaaggaccaacaagggcagtggaggtgctgcattgcctgcggtcaaggccagcaaggtggagtggatgcctcagaacggacgagataatgtgaactagctggaattttttattcttgtgaatatgtacataggcagcactagcgacattgcagtctgcttctgcaccttatcttaaagcacttacagataggccttcttgtgatcttgctctatctcacagcacactcagcacccccttctctgcccattccccagcctctcttcctatcccatcccatcccatcccatcccatcccatcccatcccgctcttttcctacttttccttccctcaaagcttccattccacatccggaggagaagaaggaaatgaatttctctacagatgtcccattttcagactgctttaaaaaaaatccttctaatctgctatgcttgaatgccacgcggtacaaaggaaaaagtatcatggaaatattatgcaaattcccagatttgaagacaaaaatactctaattctaaccagagcaagcttttttattttttatacaggggaatattttattcaaggtaaaattctaaataaaatataattgttttttatcttttctacagcaaatttataattttaagattccttttcttgtttatcagcagttgttattacatccttgtggcacatttttttttttaattttgtaaaggtgaaaaaagcttttatgagctcatgtagcaatcagattttcctgtggattgataataaatgaatatgatatatagttaaatttttaaaaaaaaaaaaaaaaaa

SEQ ID NO: 570 - protein, 349 aa, Homo sapiens
MPVERMRMRPWLEEQINSNTIPGLKWLNKEKKIFQIPWMHAARHGWDVEKDAPLFRNWAIHTGKHQPGVDKPDPKTWKANFRCAMNSLPDIEEVKDKSIKKGNNAFRVYRMLPLSERPSKKGKKPKTEKEDKVKHIKQEPVESSLGLSNGVSDLSPEYAVLTSTIKNEVDSTVNIIVVGQSHLDSNIENQEIVTNPPDICQVVEVTTESDEQPVSMSELYPLQISPVSSYAESETTDSVPSDEESAEGRPHWRKRNIEGKQYLSNMGTRGSYLLPGMASFVTSNKPDLQVTIKEESNPVPYNSSWPPFQDLPLSSSMTPASSSSRPDRETRASVIKKTSDITQARVKSC

SEQ ID NO: 571 - DNA, 4938 bp, Homo sapiens
gagctgagaggaccagccattttacttatggaaaacagtgtggcatattctgctgagcttcgccctggaagaagcctcttttatacatctcttcagggaagagagaagcaatgggcatgttagtatacaatgatcacagccacgcaggcctgcaagctgccttttggacaggctgttgactgccgttccaattagctgattggagaatgtggaatgcagagtgataatgctgcatatctgctatcaggcagcagcaaaggtttttgtcttgggaaggcaagctttccctgcaatattatctcagcagctccctagctgcttaccctgaaaacgagggatccaaacggagggtgttgcactctgctaacgctggtcctgtgcgtggctgtggcatatgagcggcaggtctgaaaaagcaggtgtgtgctgggacgggcactggactggaacgcaggcggacgctctcgggtttacctgcttcctgttaacagattgtgggctcccagggcatatgtctgcacgctgaggccgaggcggagaaggggcttcctgagcgtcccagtacactgacagagacacttggattggacttaatcttaaacctctggagttcaagaccttttaaaaagggctaaataaacaatctctacatgtaaaaggccactgactcctacttcctctgtatagagcaactgttgaactcagctgcctgtaggaaaactgaagactttaataacaaactctccaaggtgaaaatgaacacagggcgtgattctcagtcaccagactcacaaaaggttttagaagcgttcgaccaaacctacaagataaaagatcaccaactcagagccagataacagtgaatggaaactcaggaggtgccgtgagtcccatgagttactatcagaggccgttttccccctcggcatattctctcccagcctcactcaactccagcattgtcatgcagcacggcacatccctcgattccacagacacatatccccagcatgcgcagtctctggatggcaccaccagcagctctatccccctgtaccgatcctcagaggaagagaagagagtgacagtcatcaaagccccgcattacccagggatcgggcccgtggatgaatccggaatccccacagcaattagaacgacagtcgaccggcccaaggactggtacaagacgatgtttaagcaaattcacatggtgcacaagccggatgatgacacagacatgtataatactccttatacatacaatgcaggtctgtacaacccaccctacagtgctcagtcacaccctgctgcaaagacccaaacctacagacctctttccaaaagccactccgacaacagccccaatgcctttaaggatgcgtcctccccagtgcctcccccacatgttccacctccagtcccgccgcttcgaccaagagatcggtcttcaacagaaaagcatgactgggatcctccagacagaaaagtggacacaagaaaatttcggtctgagccaaggagtatttttgaatatgaacctggcaagtcatcaattcttcagcatgaaagaccaactgatcgcataaatccagatgacatagatttagaaaatgagccctggtataaattcttttcagaactggagtttggacgcccgcctcctaaaaagcctctggactatgttcaagatcattcttctggtgttttcaatgaggcctccttgtatcagtcctctatagacagaagcctggaaagacccatgagttctgcaagcatggccagtgacttcaggaagcggaggaagagcgagcctgcagtgggtccaccacggggcttgggagatcaaagtgcgagcaggactagcccaggccgagtggacctcccaggatcaagcaccactcttacaaagtctttcactagctcttctccttcttccccatcaagagcaaaagaccgtgagtcccctagaagttactcatccactttgactgacatggggagaagtgcaccaagggaaagaagaggaactccagaaaaagagaaattgcctgcaaaagctgtttatgattttaaggctcagacatctaaggagttgtcatttaagaaaggagatactgtctacatcctcaggaaaattgatcaaaattggtatgagggagaacaccacgggagagtgggcatcttcccgatctcatacgtagagaaactcacacctcctgagaaagcacagcctgcaagaccacctccgccagcccagcccggagaaatcggagaagctatagccaaatacaacttcaacgcagacacaaatgtggagctgtcactgagaaagggagatagagttattcttcttaaaagagttgatcaaaactggtatgaaggtaaaatcccaggaaccaacagacaaggcatcttccctgtttcctatgtggaggtcgtcaagaagaacacaaaaggtgctgaggactaccctgaccctccaataccccacagctattctagtgataggattcacagcttgagctcaaataagccacagcgtcctgtgtttactcatgaaaatattcaaggtgggggggaaccgtttcaggctctgtataactatactcccaggaatgaagatgagctggagctcagagaaagtgatgtcattgatgtcatggaaaagtgtgatgacggctggtttgtggggacctcaagaagaaccaaattctttggtactttccccggaaactacgtcaagaggctgtgaattgcgctccctccttctgtagaggccgcctgccagccatgcacctgcgtcaacgcgcctgaaacaccccgcgggcctcccgttgtcatgccttacggtttccaatgcgccgtcaccatctccacctgccaccaaaccaccagcagagtagccgccgctgctgtgagcctggggacgacatggcaggctggtccccctccgtgaaagtgtggattcctacttcctgctctaagctttgacacgtcaaaatgtgggatcagaaagaaaaaaatcatgatatttaaaaatggtcaaatatttgaggcaaaaaaaaaaaaaaaaagtgtctccaggaggctgtccagcctcgtggctccatttcaacatctccccccaggcgatgttctcccccaagacgaccagaaaattgtttattggggaatgctgtggtttgcattttcatattcttcgcttggcagtgtgtattcttttcacaagtttgcctagtgtcttggtttacacaatatgacaactgtaactgtactttagctattgtttgcctgcacatacatgttgtaatatgcacagtgattacaacctttaaagcaagaggaggcgagttaatttggatgagtgtgattttgctgattgaatgtgagttttcaaataggagtctttttctgcaatttgtttgcattttttagaagtgcaaacagtaagtaaataaaagccttcggtaataatcatgacaatacaagaggctgagctaggctacaggggaaaactattgtgttgtaaagttgcatcgctattttatattaaaatgtaatgatcagcatcatgaacaatgagctcttagtgttttatttatctgaaaaaatgtaagtaaaagcagtgttagtgagaggtgcaaagaattattctaacagacacctgaaagtatctgtaagcaatactagtaggtaagatttcactgtgtgtacacatacacatttgagattgtatgagaacatataatccatatgatatgttgtacattttatggaaatgtaatagaatctcacacattattttatagaaatagagtacagaagcatcacaagtattaaagttggttttagcaaggattaggattactacaattatttttactataataattatttttcttctatggaactcagaatcctggctacatttgaggacaggaatatgttgagcctgattttcctggtgtgtgtaaaatatttcctaggaataaattaggcactttttagaagcaatgttaaatcattcaggttttattttctgccctgaagcagaaatttaaaaaatgatattgggacctggaaggtttaatatggttcacagtgcctgaattacacctgctccgaaaactagctttgtatttcttatgactttgcataagaactgttcatctttggatcttgagcaccttacagataaaactttttatggcatctctttcatggacagtgatattgatcttttcacaatgtacgtagcctctagaattttgtacatatgtttgctctttttttgtacagactagttgttgagaaaacaggggcgtttcctaatttggtctttatcctgcgacaacactttcagcagactagcctctccttatctcacagatcacaagcacccctagatagtgtgattctgtcagatagcatttatgcaaaaatctatgaagttaaaagatcgtagaagccaaatgaaatgtacatatctactgactgatgacaagggaatttcattaggaagaaggtaaagaaacatcgttgagtagcctaccttgatttctgtcaagttcataaccagcttcatattttaaaggcttcaggtttgaaattaagtcaactgcatgcagctttgctgataaatgaataattctctttgatgccatttatgagaaaagacttcaatatctgttgcctgtcatatttaagaaaaattactgtttctactctctgtatctgattttaaaagaaaaaactattcatacctggcttccaggtaattgactttgaattcttacaagcaaaggtcattgtgtttttcttgaatagacatctaataaattttgcttggaagtatacttcagtttttcttcttgacatttatctttataaaaattgtgtattttattccaacttgttaaactaagagaaaatgca

SEQ ID NO: 572 - protein, 620 aa, Homo sapiens
MSYYQRPFSPSAYSLPASLNSSIVMQHGTSLDSTDTYPQHAQSLDGTTSSSIPLYRSSEEEKRVTVIKAPHYPGIGPVDESGIPTAIRTTVDRPKDWYKTMFKQIHMVHKPDDDTDMYNTPYTYNAGLYNPPYSAQSHPAAKTQTYRPLSKSHSDNSPNAFKDASSPVPPPHVPPPVPPLRPRDRSSTEKHDWDPPDRKVDTRKFRSEPRSIFEYEPGKSSILQHERPTDRINPDDIDLENEPWYKFFSELEFGRPPPKKPLDYVQDHSSGVFNEASLYQSSIDRSLERPMSSASMASDFRKRRKSEPAVGPPRGLGDQSASRTSPGRVDLPGSSTTLTKSFTSSSPSSPSRAKDRESPRSYSSTLTDMGRSAPRERRGTPEKEKLPAKAVYDFKAQTSKELSFKKGDTVYILRKIDQNWYEGEHHGRVGIFPISYVEKLTPPEKAQPARPPPPAQPGEIGEAIAKYNFNADTNVELSLRKGDRVILLKRVDQNWYEGKIPGTNRQGIFPVSYVEVVKKNTKGAEDYPDPPIPHSYSSDRIHSLSSNKPQRPVFTHENIQGGGEPFQALYNYTPRNEDELELRESDVIDVMEKCDDGWFVGTSRRTKFFGTFPGNYVKRL

SEQ ID NO: 573 - DNA, 5996 bp, Homo sapiens
tccttttattgtggatgaacaccacgtacatgccgtaaatgctccctaggctggctgcggctacaaggcagacccgggagctgagaatagaggaatacctgcccaagcaactcattctgcacagcagccgacaagacagcgattttcctgtgctggaatgtgcccatccaaagacacttggattggacttaatcttaaacctctggagttcaagaccttttaaaaagggctaaataaacaatctctacatgtaaaaggccactgactcctacttcctctgtatagagcaactgttgaactcagctgcctgtagggcgtgattctcagtcaccagactcagcttggagatcttacaatgatggcaatcaggagacactgaacggagatgctacatattcctctcttgcagcaaaaggttttagaagcgttcgaccaaacctacaagataaaagatcaccaactcagagccagataacagtgaatggaaactcaggaggtgccgtgagtcccatgagttactatcagaggccgttttccccctcggcatattctctcccagcctcactcaactccagcattgtcatgcagcacggcacatccctcgattccacagacacatatccccagcatgcgcagtctctggatggcaccaccagcagctctatccccctgtaccgatcctcagaggaagagaagagagtgacagtcatcaaagccccgcattacccagggatcgggcccgtggatgaatccggaatccccacagcaattagaacgacagtcgaccggcccaaggactggtacaagacgatgtttaagcaaattcacatggtgcacaagccggatgatgacacagacatgtataatactccttatacatacaatgcaggtctgtacaacccaccctacagtgctcagtcacaccctgctgcaaagacccaaacctacagacctctttccaaaagccactccgacaacagccccaatgcctttaaggatgcgtcctccccagtgcctcccccacatgttccacctccagtcccgccgcttcgaccaagagatcggtcttcaacagaaaagcatgactgggatcctccagacagaaaagtggacacaagaaaatttcggtctgagccaaggagtatttttgaatatgaacctggcaagtcatcaattcttcagcatgaaagaccagcctccttgtatcagtcctctatagacagaagcctggaaagacccatgagttctgcaagcatggccagtgacttcaggaagcggaggaagagcgagcctgcagtgggtccaccacggggcttgggagatcaaagtgcgagcaggactagcccaggccgagtggacctcccaggatcaagcaccactcttacaaagtctttcactagctcttctccttcttccccatcaagagcaaaaggtggggatgatagcaaaatatgtccatccctttgcagttactcagggctcaacggcaacccctccagtgagttagattactgtagcacttacagacagcacttggatgtccctcgggactcaccaagagccattagtttcaagaacggctggcaaatggcccggcaaaacgcagaaatctggagcagcacggaagaaaccgtctctcccaaaatcaaatcccggagctgtgacgatctcctaaacgacgactgcgatagcttcccggacccgaaagtcaagtcggaaagcatgggctccctgttatgtgaggaggactccaaggagagctgccccatggcgtgggggtccccctacgtcccggaggttcgcagtaacggcagatcaaggatcagacacaggtcagcccgcaacgccccggggttcctgaagatgtacaagaaaatgcaccgcatcaaccgcaaggacctgatgaactccgaggtgatctgctccgtgaagtccaggattctgcagtacgagagcgagcagcagcacaaggacctgctgcgcgcctggagccagtgctccacggaggaggtgccccgggacatggtgcccacacgcatctccgaattcgaaaagctgatccagaagtccaaatccatgccaaatttaggggatgacatgctgtctcccgtaaccctagaaccaccgcaaaatggcctatgtcccaagaggcggttttccattgagtatttgctggaggaagaaaatcaaagcggcccccccgctcggggccggcgaggctgccagtctaacgccctggtgcccattcacattgaagtcaccagcgatgagcagccccgagcacacgtggagttttccgacagcgaccaggacggggttgtgtccgaccacagtgactacattcacctagaggggtcatccttctgcagtgaaagtgactttgatcacttttccttcacatcctccgaaagcttttacggatccagccaccaccaccaccatcaccaccaccaccaccaccgccacctcatcagctcctgcaaaggcaggtgcccggcctcctacactcgatttaccacaatgttaaaacacgaaagagccagacacgaaaacaccgaggagcccagaaggcaagaaatggaccctggcctttctaaacttgcttttctagtcagtcctgtgcctttccggaggaaaaaaaattcggctcctaagaaacagactgaaaaggcaaaatgtaaagcatctgtgtttgaggctctggactctgcccttaaagacatctgtgaccaaattaaagctgaaaagaaaagggggagcttgccggacaacagcatcctgcaccgcctcatcagtgagctgctgccagatgttcccgagaggaactcatccctgagagcgctgaggaggagccccctgcaccagcctctccacccactgcctcccgatggtgctattcattgtccaccctaccagaatgactgcgggagaatgccccgcagtgcctctttccaagacgtggacacagccaacagcagctgccaccaccaagaccgtggcggtgcactccaagaccgtgagtcccctagaagttactcatccactttgactgacatggggagaagtgcaccaagggaaagaagaggaactccagaaaaagagaaattgcctgcaaaagctgtttatgattttaaggctcagacatctaaggagttgtcatttaagaaaggagatactgtctacatcctcaggaaaattgatcaaaattggtatgagggagaacaccacgggagagtgggcatcttcccgatctcatacgtagagaaactcacacctcctgagaaagcacagcctgcaagaccacctccgccagcccagcccggagaaatcggagaagctatagccaaatacaacttcaacgcagacacaaatgtggagctgtcactgagaaagggagatagagttattcttcttaaaagagttgatcaaaactggtatgaaggtaaaatcccaggaaccaacagacaaggcatcttccctgtttcctatgtggaggtcgtcaagaagaacacaaaaggtgctgaggactaccctgaccctccaataccccacagctattctagtgataggattcacagcttgagctcaaataagccacagcgtcctgtgtttactcatgaaaatattcaaggtgggggggaaccgtttcaggctctgtataactatactcccaggaatgaagatgagctggagctcagagaaagtgatgtcattgatgtcatggaaaagtgtgatgacggctggtttgtggggacctcaagaagaaccaaattctttggtactttccccggaaactacgtcaagaggctgtgaattgcgctccctccttctgtagaggccgcctgccagccatgcacctgcgtcaacgcgcctgaaacaccccgcgggcctcccgttgtcatgccttacggtttccaatgcgccgtcaccatctccacctgccaccaaaccaccagcagagtagccgccgctgctgtgagcctggggacgacatggcaggctggtccccctccgtgaaagtgtggattcctacttcctgctctaagctttgacacgtcaaaatgtgggatcagaaagaaaaaaatcatgatatttaaaaatggtcaaatatttgaggcaaaaaaaaaaaaaaaaagtgtctccaggaggctgtccagcctcgtggctccatttcaacatctccccccaggcgatgttctcccccaagacgaccagaaaattgtttattggggaatgctgtggtttgcattttcatattcttcgcttggcagtgtgtattcttttcacaagtttgcctagtgtcttggtttacacaatatgacaactgtaactgtactttagctattgtttgcctgcacatacatgttgtaatatgcacagtgattacaacctttaaagcaagaggaggcgagttaatttggatgagtgtgattttgctgattgaatgtgagttttcaaataggagtctttttctgcaatttgtttgcattttttagaagtgcaaacagtaagtaaataaaagccttcggtaataatcatgacaatacaagaggctgagctaggctacaggggaaaactattgtgttgtaaagttgcatcgctattttatattaaaatgtaatgatcagcatcatgaacaatgagctcttagtgttttatttatctgaaaaaatgtaagtaaaagcagtgttagtgagaggtgcaaagaattattctaacagacacctgaaagtatctgtaagcaatactagtaggtaagatttcactgtgtgtacacatacacatttgagattgtatgagaacatataatccatatgatatgttgtacattttatggaaatgtaatagaatctcacacattattttatagaaatagagtacagaagcatcacaagtattaaagttggttttagcaaggattaggattactacaattatttttactataataattatttttcttctatggaactcagaatcctggctacatttgaggacaggaatatgttgagcctgattttcctggtgtgtgtaaaatatttcctaggaataaattaggcactttttagaagcaatgttaaatcattcaggttttattttctgccctgaagcagaaatttaaaaaatgatattgggacctggaaggtttaatatggttcacagtgcctgaattacacctgctccgaaaactagctttgtatttcttatgactttgcataagaactgttcatctttggatcttgagcaccttacagataaaactttttatggcatctctttcatggacagtgatattgatcttttcacaatgtacgtagcctctagaattttgtacatatgtttgctctttttttgtacagactagttgttgagaaaacaggggcgtttcctaatttggtctttatcctgcgacaacactttcagcagactagcctctccttatctcacagatcacaagcacccctagatagtgtgattctgtcagatagcatttatgcaaaaatctatgaagttaaaagatcgtagaagccaaatgaaatgtacatatctactgactgatgacaagggaatttcattaggaagaaggtaaagaaacatcgttgagtagcctaccttgatttctgtcaagttcataaccagcttcatattttaaaggcttcaggtttgaaattaagtcaactgcatgcagctttgctgataaatgaataattctctttgatgccatttatgagaaaagacttcaatatctgttgcctgtcatatttaagaaaaattactgtttctactctctgtatctgattttaaaagaaaaaactattcatacctggcttccaggtaattgactttgaattcttacaagcaaaggtcattgtgtttttcttgaatagacatctaataaattttgcttggaagtatacttcagtttttcttcttgacatttatctttataaaaattgtgtattttattccaacttgttaaactaagagaaaatgca

SEQ ID NO: 574 - protein, 1100 aa, Homo sapiens
MSYYQRPFSPSAYSLPASLNSSIVMQHGTSLDSTDTYPQHAQSLDGTTSSSIPLYRSSEEEKRVTVIKAPHYPGIGPVDESGIPTAIRTTVDRPKDWYKTMFKQIHMVHKPDDDTDMYNTPYTYNAGLYNPPYSAQSHPAAKTQTYRPLSKSHSDNSPNAFKDASSPVPPPHVPPPVPPLRPRDRSSTEKHDWDPPDRKVDTRKFRSEPRSIFEYEPGKSSILQHERPASLYQSSIDRSLERPMSSASMASDFRKRRKSEPAVGPPRGLGDQSASRTSPGRVDLPGSSTTLTKSFTSSSPSSPSRAKGGDDSKICPSLCSYSGLNGNPSSELDYCSTYRQHLDVPRDSPRAISFKNGWQMARQNAEIWSSTEETVSPKIKSRSCDDLLNDDCDSFPDPKVKSESMGSLLCEEDSKESCPMAWGSPYVPEVRSNGRSRIRHRSARNAPGFLKMYKKMHRINRKDLMNSEVICSVKSRILQYESEQQHKDLLRAWSQCSTEEVPRDMVPTRISEFEKLIQKSKSMPNLGDDMLSPVTLEPPQNGLCPKRRFSIEYLLEEENQSGPPARGRRGCQSNALVPIHIEVTSDEQPRAHVEFSDSDQDGVVSDHSDYIHLEGSSFCSESDFDHFSFTSSESFYGSSHHHHHHHHHHHRHLISSCKGRCPASYTRFTTMLKHERARHENTEEPRRQEMDPGLSKLAFLVSPVPFRRKKNSAPKKQTEKAKCKASVFEALDSALKDICDQIKAEKKRGSLPDNSILHRLISELLPDVPERNSSLRALRRSPLHQPLHPLPPDGAIHCPPYQNDCGRMPRSASFQDVDTANSSCHHQDRGGALQDRESPRSYSSTLTDMGRSAPRERRGTPEKEKLPAKAVYDFKAQTSKELSFKKGDTVYILRKIDQNWYEGEHHGRVGIFPISYVEKLTPPEKAQPARPPPPAQPGEIGEAIAKYNFNADTNVELSLRKGDRVILLKRVDQNWYEGKIPGTNRQGIFPVSYVEVVKKNTKGAEDYPDPPIPHSYSSDRIHSLSSNKPQRPVFTHENIQGGGEPFQALYNYTPRNEDELELRESDVIDVMEKCDDGWFVGTSRRTKFFGTFPGNYVKRL

SEQ ID NO: 575 - DNA, 615 bp, Homo sapiens
atggtgatgatggtggtggtgatgacagtggtgatggtgatgattatggtgatgatggtggtgatagtgatgatggtgatgattatggtggtgatggtgatgatgacggtgatgatggtggtaatggtggtgatggtgatgatggtgatcatggtgatggatgattatggtgatggtggtgatgatggtgatgatggtggtagtgatgatggtgatgattatggtggtgatggtgatgatgatggtgatgatggtgatgatggtggtgatggtggtgatggtgatgatggtgaagatgattatggtgatgacggtggtgatggtgatggtggtgttgatggtgatagtgatgatggtgatgatgattatggtggtgatggtgatgatgatggtgatgatggtggtgatggtggtggtgacagtgatgatggtggtagtgatgatggtgatgatggtgatggtggtggtgatggtggtgaaggttatgatggtgatggtgatggtgatgatggtaatgatgctgatggtggtgatgatagtgatgatagtaatgatggtgatgatggtggtgatgatggccatgacaatgttagaattggcctgcataatgcgtga

SEQ ID NO: 576 - protein, 204 aa, Homo sapiens
MVMMVVVMTVVMVMIMVMMVVIVMMVMIMVVMVMMTVMMVVMVVMVMMVIMVMDDYGDGGDDGDDGGSDDGDDYGGDGDDDGDDGDDGGDGGDGDDGEDDYGDDGGDGDGGVDGDSDDGDDDYGGDGDDDGDDGGDGGGDSDDGGSDDGDDGDGGGDGGEGYDGDGDGDDGNDADGGDDSDDSNDGDDGGDDGHDNVRIGLHNA

SEQ ID NO: 577 - DNA, 11436 bp, Homo sapiens
gagagctggctgagccgcggcgcgggactgctcacctccaagcgctcgcgcggggatcgcggctcctgctcactttgcggcccgctgtcctcctgcccgccccgagggcccccggccggagcgcagagggagggggccgcgctcgccagcaccccgccgccttcccccgcctgggggaagaatgtgccaccagctgttctccgcttgcgagcgctgcgcccagtagtgaggaacttggaggaagaagagacaaaggctgccgtcgggacgggcgagttagggacttgggtttgggcgaacaaaaggtgagaaggacaagaagggaccgggcgatggcagcaggggagccccgcgggcgcgcgtcctcgggagtggcgccgtgacacgcatggtttccccggacccgcggcggcgctgacttccgcgagtcggagcggcactcggcgagtccgggactgcgctggaacaatggataacttcttcaccgagggaacacgggtctggctgagagaaaatggccagcattttccaagtactgtaaattcctgtgcagaaggcatcgtcgtcttccggacagactatggtcaggtattcacttacaagcagagcacaattacccaccagaaggtgactgctatgcaccccacgaacgaggagggcgtggatgacatggcgtccttgacagagctccatggcggctccatcatgtataacttattccagcggtataagagaaatcaaatatatacctacatcggctccatcctggcctccgtgaacccctaccagcccatcgccgggctgtacgagcctgccaccatggagcagtacagccggcgccacctgggcgagctgcccccgcacatcttcgccatcgccaacgagtgctaccgctgcctgtggaagcgccacgacaaccagtgcatcctcatcagtggtgaaagtggggcaggtaaaaccgaaagcactaaattgatcctcaagtttctgtcagtcatcagtcaacagtctttggaattgtccttaaaggagaagacatcctgtgttgaacgagctattcttgaaagcagccccatcatggaagctttcggcaatgcgaagaccgtgtacaacaacaactctagtcgctttgggaagtttgttcagctgaacatctgtcagaaaggaaatattcagggcgggagaattgtagattatttattagaaaaaaaccgagtagtaaggcaaaatcccggggaaaggaattatcacatattttatgcactgctggcagggctggaacatgaagaaagagaagaattttatttatctacgccagaaaactaccactacttgaatcagtctggatgtgtagaagacaagacaatcagtgaccaggaatcctttagggaagttattacggcaatggacgtgatgcagttcagcaaggaggaagttcgggaagtgtcgaggctgcttgctggtatactgcatcttgggaacatagaatttatcactgctggtggggcacaggtttccttcaaaacagctttgggcagatctgcggagttacttgggctggacccaacacagctcacagatgctttgacccagagatcaatgttcctcaggggagaagagatcctcacgcctctcaatgttcaacaggcagtagacagcagggactccctggccatggctctgtatgcgtgctgctttgagtgggtaatcaagaagatcaacagcaggatcaaaggcaatgaggacttcaagtctattggcatcctcgacatctttggatttgaaaactttgaggttaatcactttgaacagttcaatataaactatgcaaacgagaaacttcaggagtacttcaacaagcatattttttctttagaacaactagaatatagccgggaaggattagtgtgggaagatattgactggatagacaatggagaatgcctggacttgattgagaagaaacttggcctcctagcccttatcaatgaagaaagccattttcctcaagccacagacagcaccttattggagaagctacacagtcagcatgcgaataaccacttttatgtgaagcccagagttgcagttaacaattttggagtgaagcactatgctggagaggtgcaatatgatgtccgaggtatcttggagaagaacagagatacatttcgagatgaccttctcaatttgctaagagaaagccgatttgactttatctacgatctttttgaacatgtttcaagccgcaacaaccaggataccttgaaatgtggaagcaaacatcggcggcctacagtcagctcacagttcaaggactcactgcattccttaatggcaacgctaagctcctctaatcctttctttgttcgctgtatcaagccaaacatgcagaagatgccagaccagtttgaccaggcggttgtgctgaaccagctgcggtactcagggatgctggagactgtgagaatccgcaaagctgggtatgcggtccgaagaccctttcaggacttttacaaaaggtataaagtgctgatgaggaatctggctctgcctgaggacgtccgagggaagtgcacgagcctgctgcagctctatgatgcctccaacagcgagtggcagctggggaagaccaaggtctttcttcgagaatccttggaacagaaactggagaagcggagggaagaggaagtgagccacgcggccatggtgattcgggcccatgtcttgggcttcttagcacgaaaacaatacagaaaggtcctttattgtgtggtgataatacagaagaattacagagcattccttctgaggaggagatttttgcacctgaaaaaggcagccatagttttccagaagcaactcagaggtcagattgctcggagagtttacagacaattgctggcagagaaaagggagcaagaagaaaagaagaaacaggaagaggaagaaaagaagaaacgggaggaagaagaaagagaaagagagagagagcgaagagaagccgagctccgcgcccagcaggaagaagaaacgaggaagcagcaagaactcgaagccttgcagaagagccagaaggaagctgaactgacccgtgaactggagaaacagaaggaaaataagcaggtggaagagatcctccgtctggagaaagaaatcgaggacctgcagcgcatgaaggagcagcaggagctgtcgctgaccgaggcttccctgcagaagctgcaggagcggcgggaccaggagctccgcaggctggaggaggaagcgtgcagggcggcccaggagttcctcgagtccctcaatttcgacgagatcgacgagtgtgtccggaatatcgagcggtccctgtcggtgggaagcgaattttccagcgagctggctgagagcgcatgcgaggagaagcccaacttcaacttcagccagccctacccagaggaggaggtcgatgagggcttcgaagccgacgacgacgccttcaaggactcccccaaccccagcgagcacggccactcagaccagcgaacaagtggcatccggaccagcgatgactcttcagaggaggacccatacatgaacgacacggtggtgcccaccagccccagtgcggacagcacggtgctgctcgccccatcagtgcaggactccgggagcctacacaactcctccagcggcgagtccacctactgcatgccccagaacgctggggacttgccctccccagacggcgactacgactacgaccaggatgactatgaggacggtgccatcacttccggcagcagcgtgaccttctccaactcctacggcagccagtggtcccccgactaccgctgctctgtggggacctacaacagctcgggtgcctaccggttcagctctgagggggcgcagtcctcgtttgaagatagtgaagaggactttgattccaggtttgatacagatgatgagctttcataccggcgtgactctgtgtacagctgtgtcactctgccgtatttccacagctttctgtacatgaaaggtggcctgatgaactcttggaaacgccgctggtgcgtcctcaaggatgaaaccttcttgtggttccgctccaagcaggaggccctcaagcaaggctggctccacaaaaaaggggggggctcctccacgctgtccaggagaaattggaagaagcgctggtttgtcctccgccagtccaagctgatgtactttgaaaacgacagcgaggagaagctcaagggcaccgtagaagtgcgaacggcaaaagagatcatagataacaccaccaaggagaatgggatcgacatcattatggccgataggactttccacctgattgcagagtccccagaagatgccagccagtggttcagcgtgctgagtcaggtccacgcgtccacggaccaggagatccaggagatgcatgatgagcaggcaaacccacagaatgctgtgggcaccttggatgtggggctgattgattctgtgtgtgcctctgacagccctgatagacccaactcgtttgtgatcatcacggccaaccgggtgctgcactgcaacgccgacacgccggaggagatgcaccactggataaccctgctgcagaggtccaaaggggacaccagagtggagggccaggaattcatcgtgagaggatggttgcacaaagaggtgaagaacagtccaaagatgtcttcactgaaactgaagaaacggtggtttgtactcacccacaattccctggattactacaagagttcagagaagaacgcgctcaaactggggaccctggtcctcaacagcctctgctctgtcgtccccccagatgagaagatattcaaagagacaggctactggaacgtcaccgtgtacgggcgcaagcactgttaccggctctacaccaagctgctcaacgaggccacccggtggtccagtgccattcaaaacgtgactgacaccaaggccccgatcgacacccccacccagcagctgattcaagatatcaaggagaactgcctgaactcggatgtggtggaacagatttacaagcggaacccgatccttcgatacacccatcaccccttgcactccccgctcctgccccttccgtatggggacataaatctcaacttgctcaaagacaaaggctataccacccttcaggatgaggccatcaagatattcaattccctgcagcaactggagtccatgtctgacccaattccaataatccagggcatcctacagacagggcatgacctgcgacctctgcgggacgagctgtactgccagcttatcaaacagaccaacaaagtgccccaccccggcagtgtgggcaacctgtacagctggcagatcctgacatgcctgagctgcaccttcctgccgagtcgagggattctcaagtatctcaagttccatctgaaaaggatacgggaacagtttccaggaagcgagatggaaaaatacgctctcttcacttacgaatctcttaagaaaaccaaatgccgagagtttgtgccttcccgagatgaaatagaagctctgatccacaggcaggaaatgacatccacggtctattgccatggcggcggctcctgcaagatcaccatcaactcccacaccaccgctggggaggtggtggagaagctgatccgaggcctggccatggaggacagcaggaacatgtttgctttgtttgaatacaacggccacgtcgacaaagccattgaaagtcgaaccgtcgtagctgatgtcttagccaagtttgaaaagctggctgccacatccgaggttggggacctgccatggaaattctacttcaaactttactgcttcctggacacagacaacgtgccaaaagacagtgtggagtttgcatttatgtttgaacaggcccacgaagcggttatccatggccaccatccagccccggaagaaaacctccaggttcttgctgccctgcgactccagtatctgcagggggattatactctgcacgctgccatcccacctctcgaagaggtttattccctgcagagactcaaggcccgcatcagccagtcaaccaaaaccttcaccccttgtgaacggctggagaagaggcggacgagcttcctagaggggaccctgaggcggagcttccggacaggatccgtggtccggcagaaggtcgaggaggagcagatgctggacatgtggattaaggaagaagtctcctctgctcgagccagtatcattgacaagtggaggaaatttcagggaatgaaccaggaacaggccatggccaagtacatggccttgatcaaggagtggcctggctatggctcgacgctgtttgatgtggagtgcaaggaaggtggcttccctcaggaactctggttgggtgtcagcgcggacgccgtctccgtctacaagcgtggagagggaagaccactggaagtcttccagtatgaacacatcctctcttttggggcacccctggcgaatacgtataagatcgtggtcgatgagagggagctgctctttgaaaccagtgaggtggtggatgtggccaagctcatgaaagcctacatcagcatgatcgtgaagaagcgctacagcacgacacgctccgccagcagccagggcagctccaggtgaaggcgggacagagcccacctgtctttgctacctgaacgcaccaccctctggcctaggctggctccagtgtgccatgcccagccaaaacaaacacagagctgcccaggctttctggaagcttctggtctgagggaggtgtctccgaggatccttttgcctgccgccttcattgatcctgtattaagctgtcaactttaacagtctgcacagtttccaaagctttactactcttagaggacacatgccttaaaaaaggaggggaggaaccacgctgccaccaaagcagccggaagtgccttaacttgtggaaccaacactaatcgaccgtaactgtgctactgaagggaactgcctttcccccttctgggggagacttaacagagcgtggaaggggggcattctctgtcaatgatgcactaacctcccaacctgatttccccgaatctgagggaaggtgagggagtgggaagggggatggagagctcgaggggacagtgtgtttgagctggagtgctgcgggcagcctttctcatggaatgacatgaatcaacttttttctttgtttcatcttttaagtgtacgtgcttgcctgttcgtgcatgtgttcataaactcaacactttaatcatggtttcatgagcattaaaaagcaaagggaaaaaggatgtgtaatggtgtacacagtctgtatattttaataatgcagagctatagtctcaattgttactttataaggtggttttattaacaaacccaaatcctggattttcctgtctttgctgtattttgaaaaacacgtgttgactccattgttttacatgtagcaaagtctgccatctgtgtctgctgtattataaacagataagcagcctacaagataactgtatttataaaccactcttcaacagctggctccagtgctggttttagaacaagaatgaagtcattttggagtctttcatgtctaaaagatttaagttaaaaacaaagtgttacttggaaggttagcttctatcattctggatagattacagatataataaccatgttgactatgggggagagacgctgcattccagaaacgtcttaacacttgagtgaatcttcaaaggaccctgacattaaatgctgaggctttaatacacacatattttatcccaagtttataatggtggtctgaacaaggcacctgtaaataaatcagcatttatgaccagaagaaaaataatctggtcttggactttttatttttatatggaaaagttttaaggacttgggccaactaagtctacccacacgaaaaaagaaatttgccttgtccctttgtgtacaaccatgcaaaactgtttgttggctcacagaagttctgacaataaaagatactagctaacacgctgtgtgtttcctttatcagaggaggctctaaaaaccatggaggggaggcttatttttgttttggctttttggtggttttttttttttttctttagagacagagtctcactctgttacccaggctggagtacagtggcgtgatctcggctcactgcagcctctgcctcctgggttctagcgattctcctgcctcagcctcccaaggagttgggagtacaggcatgcatcaccacgcctggctaggttttgtatttttagtagagatggggtttcaccatgttggccaggctggtctcgatccacctgcctcagcctcccaaagtgctgggattacaggtgtgagctaccgcacccggccggctttttggtgttaatgctatggtttcagtgtctgggctttgtgtttgtttcatggacttgctcatcaggtctaaacacagatctgcagctgtctccactgctcttgtagacactgagtgtgacttcaagaaagcaaaagaagggactggtaaatgaagtcacacacagctgaggacttgaaatgtgtttatgtcagacagtcccctatgtcagccccaaagtgtgcctgatcttgcaaccctggatcctagaacctgcctgcacctccctgtggaccagaacacacaggtaggcagtttggttgccaatgtacccaaaccaccaggccaggcgtctagcatgagcaagcgccacttctcttgcagaccactgactcccaccctctgctcatgctcacggatggcttcttcccattctgcagggattgggatggaacctgaagccaggtgctgcctgaagcctgtggccccgccaggcacccaaggaaagccggcaaagacttggatgtgtgttgtctttgtttttattttaggctcagaaagaatttgacagaagtcttctttctactgctcacctctcaggattccctctgtgacttaatttactctggaaggctgtcgcccgccctcaattatagatggggaaataggcaaggaaaggcatgactcagattgggggggttagagcagcaccatagttagaacatagatttacatgtgagcctttacatggcatagttgtggttttgttttagccttttatttagaaataattacagactcagagaaagttgcaacagaacgtacagggaggcctgcgtgcccttcagtttccccagtggtagcatcccccatcactgtagagcagcatcacagctgacaaagtaccgttgagcttcccctagccacagaacctattccaattttactgcttttacatgcactcattggtgtgtgtgatgtcagttgctttcaacaaggtcagtgaagtgcagtcgtcccttggtatccaagggagattggttccaggaccccctccccccacccctgaggatacaaaattcacagatgctcaagtccctgctatacagtggtataatatttgcatagaacctgcacacatctttccttaccctttaaatcatctccaggttacagatacctagcacaacataaatgctgcataaatagctgttataccgtgtgtgtctgtgttttaaacattgtttatttgagacagggtctcactctgtcaccaggctacagtgcagaggcacagtcacagctcattgcagcctcaacctcctgggctcaagcagtcctccacctcagcctcccaaagtgctaggatgacaggtgtgagccactgtgccccaccaaaaaaagttttttcaaatattttctatctgtggttggattcagaccacatgaacactgagggctgactgtagttttgaatgtctgttactgaggaggcaccagcataaagtattttatcacttcagacgctgacaatctagtatttttaatttttaaatcttttgaaagctaatacatataggtgatttgtaaaaaaaaaaaaaaaaaaaaaaaaaaaaaaaaaaaaaaacaactagaagtaaaatgttacttttttccagctgtagccctaattacccattttcctttcccagaaacagctatttttactgttttattgaatattctctcaaaaataatttaagctgtccaatcatttactcatacatacatatatatccccatcctcatttttaatagatggaaacaaactgttgtagcttacttttttctcagcatagtattttagctctaatcctacattaatacctatagaattgccttattctttttgatgattatatagtacctcagatagctctgtggaaaaacaggataaggccatctgtattagtccattctcacactgctagaaggacatgcctgagactgggtaatttataaagaaaaagaagttgaatggactcagtctcacatgcctggggaggcctcacaatcatggtggacagcaaaggaggagaaaaggcacatcttatatggcagcaggcaagagagcttgcacaggggaactcccttttataaaaccattagctcttccgagacatactcactatggacaagaacagcatgggaaaacccacccccatgattcaattacctcccatcaggtccctcccgtgacaggtggggattatgggagctataattcaagatgagatttgggtggggacagagccaaaccatatcaccacctaagttctctgtaaaaatagtttcagccaggcatgctggctcacgcctgtaatcccagcatgttggaaggccgaggcaagaggatcgcttgagctccggagttcaagaccagtctgggcaacatgacaagaccctgtctccacagaaaattaacattagccaggtgtggtggtgcgcatctgtagtcccagctactggggaggctgagatgagaaaatcgtttgaacccaggaggtcaaagctgcagggagccatgatggtgccactgcattctggtgtgggtgacagagcaagactctgtctccaaaaaaaaaaaaaaaaaaaaaaaatagttcagaaatctaagacagcactttttttagttactaagccttttattcagatagcacactaaattggggtcaaaaatctgctatagtaaagttctgtatttgtgtgtattgggtataaaaataagcgctttaattaatttgaaaatccctattcaccaaaagtttatactgtaataggggacaaaacaagtgcataaagctaaatttagccagtacatttataactgtttcattcagttgatcagagaagcatcacgattgctggaaaatatcggacctggattcaaggtttggcattgctgttttcaaagtatgtaatcttttagatcaggggtcagtgaactacagtacagagaccaaatctaccctgccacctgtttttgtgaataaagttttattgaaacagaaaaaaa

SEQ ID NO: 578 - protein, 2058 aa, Homo sapiens
MDNFFTEGTRVWLRENGQHFPSTVNSCAEGIVVFRTDYGQVFTYKQSTITHQKVTAMHPTNEEGVDDMASLTELHGGSIMYNLFQRYKRNQIYTYIGSILASVNPYQPIAGLYEPATMEQYSRRHLGELPPHIFAIANECYRCLWKRHDNQCILISGESGAGKTESTKLILKFLSVISQQSLELSLKEKTSCVERAILESSPIMEAFGNAKTVYNNNSSRFGKFVQLNICQKGNIQGGRIVDYLLEKNRVVRQNPGERNYHIFYALLAGLEHEEREEFYLSTPENYHYLNQSGCVEDKTISDQESFREVITAMDVMQFSKEEVREVSRLLAGILHLGNIEFITAGGAQVSFKTALGRSAELLGLDPTQLTDALTQRSMFLRGEEILTPLNVQQAVDSRDSLAMALYACCFEWVIKKINSRIKGNEDFKSIGILDIFGFENFEVNHFEQFNINYANEKLQEYFNKHIFSLEQLEYSREGLVWEDIDWIDNGECLDLIEKKLGLLALINEESHFPQATDSTLLEKLHSQHANNHFYVKPRVAVNNFGVKHYAGEVQYDVRGILEKNRDTFRDDLLNLLRESRFDFIYDLFEHVSSRNNQDTLKCGSKHRRPTVSSQFKDSLHSLMATLSSSNPFFVRCIKPNMQKMPDQFDQAVVLNQLRYSGMLETVRIRKAGYAVRRPFQDFYKRYKVLMRNLALPEDVRGKCTSLLQLYDASNSEWQLGKTKVFLRESLEQKLEKRREEEVSHAAMVIRAHVLGFLARKQYRKVLYCVVIIQKNYRAFLLRRRFLHLKKAAIVFQKQLRGQIARRVYRQLLAEKREQEEKKKQEEEEKKKREEEERERERERREAELRAQQEEETRKQQELEALQKSQKEAELTRELEKQKENKQVEEILRLEKEIEDLQRMKEQQELSLTEASLQKLQERRDQELRRLEEEACRAAQEFLESLNFDEIDECVRNIERSLSVGSEFSSELAESACEEKPNFNFSQPYPEEEVDEGFEADDDAFKDSPNPSEHGHSDQRTSGIRTSDDSSEEDPYMNDTVVPTSPSADSTVLLAPSVQDSGSLHNSSSGESTYCMPQNAGDLPSPDGDYDYDQDDYEDGAITSGSSVTFSNSYGSQWSPDYRCSVGTYNSSGAYRFSSEGAQSSFEDSEEDFDSRFDTDDELSYRRDSVYSCVTLPYFHSFLYMKGGLMNSWKRRWCVLKDETFLWFRSKQEALKQGWLHKKGGGSSTLSRRNWKKRWFVLRQSKLMYFENDSEEKLKGTVEVRTAKEIIDNTTKENGIDIIMADRTFHLIAESPEDASQWFSVLSQVHASTDQEIQEMHDEQANPQNAVGTLDVGLIDSVCASDSPDRPNSFVIITANRVLHCNADTPEEMHHWITLLQRSKGDTRVEGQEFIVRGWLHKEVKNSPKMSSLKLKKRWFVLTHNSLDYYKSSEKNALKLGTLVLNSLCSVVPPDEKIFKETGYWNVTVYGRKHCYRLYTKLLNEATRWSSAIQNVTDTKAPIDTPTQQLIQDIKENCLNSDVVEQIYKRNPILRYTHHPLHSPLLPLPYGDINLNLLKDKGYTTLQDEAIKIFNSLQQLESMSDPIPIIQGILQTGHDLRPLRDELYCQLIKQTNKVPHPGSVGNLYSWQILTCLSCTFLPSRGILKYLKFHLKRIREQFPGSEMEKYALFTYESLKKTKCREFVPSRDEIEALIHRQEMTSTVYCHGGGSCKITINSHTTAGEVVEKLIRGLAMEDSRNMFALFEYNGHVDKAIESRTVVADVLAKFEKLAATSEVGDLPWKFYFKLYCFLDTDNVPKDSVEFAFMFEQAHEAVIHGHHPAPEENLQVLAALRLQYLQGDYTLHAAIPPLEEVYSLQRLKARISQSTKTFTPCERLEKRRTSFLEGTLRRSFRTGSVVRQKVEEEQMLDMWIKEEVSSARASIIDKWRKFQGMNQEQAMAKYMALIKEWPGYGSTLFDVECKEGGFPQELWLGVSADAVSVYKRGEGRPLEVFQYEHILSFGAPLANTYKIVVDERELLFETSEVVDVAKLMKAYISMIVKKRYSTTRSASSQGSSR

SEQ ID NO: 579 - DNA, 552 bp, Homo sapiens
atgccccgaggtctgaaaggcagcaacaaggatgggatccctgaggacctagatgggaacttggaagaacccagggatcaggaaggtgagctcaggagtcaggatgtcatggacctcacagaaggtgacaaagaaacctcagcctcagctcctcctgcagccaaaaggctgaaaacagataccaaaggaaagaaggagaggaagcccactgtggatgcagaggaggctcagaggatgacaaccctgctgtctgccatgtctgaggagcagctggcccgctacgaagtgtgtcgccagtcagctttcccaaaagcacgcattgcagctctgatgcagtctatcactggcagttcggtgtctgagaacgtggccattgccatggctggaatagccaaggtcttggttggagaggtggtggaagaggccctggacgtgtgtgagatgtggggagaaatgcccccgctgcagcccaagcatttaagggaggctgttcgcaggttaaagcccaagggcctcttccccaacagcaactacaaaaaattcatgttctag

SEQ ID NO: 580 - protein, 183 aa, Homo sapiens
MPRGLKGSNKDGIPEDLDGNLEEPRDQEGELRSQDVMDLTEGDKETSASAPPAAKRLKTDTKGKKERKPTVDAEEAQRMTTLLSAMSEEQLARYEVCRQSAFPKARIAALMQSITGSSVSENVAIAMAGIAKVLVGEVVEEALDVCEMWGEMPPLQPKHLREAVRRLKPKGLFPNSNYKKFMF

SEQ ID NO: 581 - DNA, 444 bp, Homo sapiens
atggcgcgcaccaagcagaccgcccgcaaagccaccgcctggcaggcccccaggaagcccctggccaccaaagccgccagaaaaagggcgtcgcctacaggagggatcaagaagcctcaccgctacaagcctggcaccctggcgctgcgggaaatcagaaagtaccagaagtccacgcagctgctcctgcgcaagctgcccttccagcgtctggtgcgtgagatcgcccaggccatcagcccggacctgcgcttccagagcgcggccattggcgccctgcaggaggccagcgaggcctacctggtgcaactctttgaagacaccaacctgtgtgccatccatgccaggcgcgtcacaattatgccccgagacatgcagctggcccgccgcctccgtggagagggtgccggagagcccacgctcctgggaaaccttgcactctag

SEQ ID NO: 582 - protein, 147 aa, Homo sapiens
MARTKQTARKATAWQAPRKPLATKAARKRASPTGGIKKPHRYKPGTLALREIRKYQKSTQLLLRKLPFQRLVREIAQAISPDLRFQSAAIGALQEASEAYLVQLFEDTNLCAIHARRVTIMPRDMQLARRLRGEGAGEPTLLGNLAL

SEQ ID NO: 583 - DNA, 552 bp, Homo sapiens
atgccccgagatctgaagggcagcaagaaggatggaatccctgaggacctagatgggaacttggaagaacccagggatcaggaaggtgagctcaggagtgaggatgtcatggacctcacagaaggtgacaatgaggcctcagcctcagctcctcctgcagccaaaagacggaaaacagataccaaaggaaagaaggagaggaagcccactgtggatgcagaggaggctcagaggatgacaaccctgctgtctgccatgtctgaggagcagctgtcccgctacgaagtgtgtcgccggtcagctttcccaaaagcatgcattgcgggtctgatgcggtctatcactggcagatcggtgtctgagaacgtggcgattgccatggctggaatagccaaggtctttgttggagaggtggtggaagaggccctggacgtgtgtgagatgtggggagaaatgcccccactgcagcccaagcatttaagggaggctgttcgcaggttaaagcccaagggcctcttccccaacagcaactacaaaaaaatcatgttctag

SEQ ID NO: 584 - protein, 183 aa, Homo sapiens
MPRDLKGSKKDGIPEDLDGNLEEPRDQEGELRSEDVMDLTEGDNEASASAPPAAKRRKTDTKGKKERKPTVDAEEAQRMTTLLSAMSEEQLSRYEVCRRSAFPKACIAGLMRSITGRSVSENVAIAMAGIAKVFVGEVVEEALDVCEMWGEMPPLQPKHLREAVRRLKPKGLFPNSNYKKIMF

SEQ ID NO: 585 - DNA, 597 bp, Homo sapiens
atggagaccggcaggcaaacaggtgtgtctgctgagatgctcgccatgccccgaggtctgaagggcagcaagaaggatggaatccctgaggacctagacgggaacttggaagcacccagggatcaggaaggtgagctcaggagtgaggatgtcatggacctcacagaaggtgacagtgaggcctcagcctcagctcctcctgcagccaaaagacggaaaacacatacgaaaggcaagaaggagagcaagcccaccgtggatgcggaggaggctcagaggatgacaaccctgctgtctgccatgtctgaggagcagctgtcccgctacgaagtgtgtcgccggtcagcgttcccgagagcacgcgttgcgggtctgatgcgggctatcactggcagttcggtgtcggagaacgcggccattgccatggctggaatagccaagctttttgttggagaggtggtggaagaggccctggacgtgtgtgagatgtggggagagacgctcccgctgcagcccaagcatttaagggaggccgttcgcaggttaaagcccaagggcctcttccccaacagcaactgcaaaagaatcatgttctag

SEQ ID NO: 586 - protein, 198 aa, Homo sapiens
METGRQTGVSAEMLAMPRGLKGSKKDGIPEDLDGNLEAPRDQEGELRSEDVMDLTEGDSEASASAPPAAKRRKTHTKGKKESKPTVDAEEAQRMTTLLSAMSEEQLSRYEVCRRSAFPRARVAGLMRAITGSSVSENAAIAMAGIAKLFVGEVVEEALDVCEMWGETLPLQPKHLREAVRRLKPKGLFPNSNCKRIMF

SEQ ID NO: 587 - DNA, 597 bp, Homo sapiens
atggagaccggcaggcaaacaggtgtgtctgctgagatgctcgccatgccccgaggtctgaagggcagcaagaaggatggaatccctgaggacctagacgggaacttggaagcacccagggatcaggaaggtgagctcaggagtgaggatgtcatggacctcacagaaggtgacagtgaggcctcagcctcagctcctcctgcagccaaaagacggaaaacacatacgaaaggcaagaaggagagcaagcccaccgtggatgcggaggaggctcagaggatgacaaccctgctgtcttccatgtctgaggagcagctgtcccgctacgaagtgtgtcgccggtcagcgttcccgagagcacgcgttgcgggtctgatgcgggctatcactggcagttcggtgtcggagaacgcggccattgccatggctggaatagccaagctctttgttggagaggtggtggaagaggccctggacgtgtgtgagatgtggggagagacgcccccgctgcagcccaagcatttaagggaggccgttcgcaggttaaagcccaagggcctcttccccaacagcaactgcaaaagaatcatgttctag

SEQ ID NO: 588 - protein, 198 aa, Homo sapiens
METGRQTGVSAEMLAMPRGLKGSKKDGIPEDLDGNLEAPRDQEGELRSEDVMDLTEGDSEASASAPPAAKRRKTHTKGKKESKPTVDAEEAQRMTTLLSSMSEEQLSRYEVCRRSAFPRARVAGLMRAITGSSVSENAAIAMAGIAKLFVGEVVEEALDVCEMWGETPPLQPKHLREAVRRLKPKGLFPNSNCKRIMF

SEQ ID NO: 589 - DNA, 597 bp, Homo sapiens
atggagaccggcaggcaaacaggtgtgtctgctgagatgctcgccatgccccgaggtctgaagggcagcaagaaggatggaatccctgaggacctagacgggaacttggaagcacccagggatcaggaaggtgagctcaggagtgaggatgtcatggacctcacagaaggtgacagtgaggcctcagcctcagctcctcctgcagccaaaagacggaaaacacatacgaaaggcaagaaggagagcaagcccaccgtggatgcggaggaggctcagaggatgacaaccctgctgtctgccatgtctgaggagcagctgtcccgctacgaagtgtgtcgccggtcagcgttcccgagagcacgcgttgcgggtctgatgcgggctatcactggcagttcggtgtcggagaacgcggccattgccatggctggaatagccaagctctttgttggagaggtggtggaagaggccctggacgtgtgtgagatgtggggagagacgcccccgctgcagcccaagcatttaagggaggccgttcgcaggttaaagcccaagggcctcttccccaacagcaactgcaaaagaatcatgttctag

SEQ ID NO: 590 - protein, 198 aa, Homo sapiens [sequence omitted]

SEQ ID NO: 591 - DNA, 597 bp, Homo sapiens
atggagaccggcaggcaaacaggtgtgtctgctgagatgctcgccatgccccgaggtctgaagggcagcaagaaggatggaatccctgaggacctagacgggaacttggaagcacccagggatcaggaaggtgagctcaggagtgaggatgtcatggacctcacagaaggtgacagtgaggcttcagcctcagctcctcctgcagccaaaagacggaaaacacatacgaaaggcaagaaggagagcaagcccaccgtggatgcggaggaggctcagaggatgacaaccctgctgtctgccatgtctgaggagcagctgtcccgctacgaagtgtgtcgccggtcagcgttcccgagagcacgcgttgcgggtctgatgcgggctatcactggcagttcggtgtcggagaacgcggccattgccatggctggaatagccaagctctttgttggagaggtggtggaagaggccctggacgtgtgtgagatgtggggagagacgcccccgctgcagcccaagcatttaagggaggccgttcgcaggttaaagcccaagggcctcttccccaacagcaactgcaaaagaatcatgttctag

SEQ ID NO: 592 - protein, 198 aa, Homo sapiens [sequence omitted]

SEQ ID NO: 593 - DNA, 597 bp, Homo sapiens
atggagaccggcaggcaaacaggcgtgtctgctgagatgctcgccatgccccgaggtctgaagggcagcaagaaggatggaatccctgaggacctagacgggaacttggaagcacccagggatcaggaaggtgagctcaggagtgaggatgtcatggacctcacagaaggtgacagtgaggcctcagcctcagctcctcctgcagccaaaagacggaaaacacatacgaaaggcaagaaggagagcaagcccaccgtggatgcggaggaggctcagaggatgacaaccctgctgtctgccatgtctgaggagcagctgtcccgctacgaagtgtgtcgccggtcagcgttcccgagagcacgcgttgcgggtctgatgcgggctatcactggcagttcggtgtcggagaacgcggccattgccatggctggaatagccaagctctttgttggagaggtggtggaagaggccctggacgtgtgtgagatgtggggagagacgcccccgctgcagcccaagcatttaagggaggccgttcgcaggttaaagcccaagggcctcttccccaacagcaactgcagaagaatcatgttctag

SEQ ID NO: 594 - protein, 198 aa, Homo sapiens
METGRQTGVSAEMLAMPRGLKGSKKDGIPEDLDGNLEAPRDQEGELRSEDVMDLTEGDSEASASAPPAAKRRKTHTKGKKESKPTVDAEEAQRMTTLLSAMSEEQLSRYEVCRRSAFPRARVAGLMRAITGSSVSENAAIAMAGIAKLFVGEVVEEALDVCEMWGETPPLQPKHLREAVRRLKPKGLFPNSNCRRIMF

SEQ ID NO: 595 - DNA, 597 bp, Homo sapiens
atggagaccggcaggcaaacaggtgtgtctgctgagatgctcgccatgccccgaggtctgaagggcagcaagaaggatggaatccctgaggacctagacgggaacttggaagcacccagggatcaggaaggtgagctcaggagtgaggatgtcatggacctcacagaaggtgacagtgaggcctcagcctcagctcctcctgcagccaaaagacggaaaacacatacgaaaggcaagaaggagagcaagcccaccgtggatgcggaggaggctcacaggatgacaaccctgctgtctgccatgtctgaggagcagctgtcccgctacgaagtgtgtcgccggtcagcgttcccgagagcacgcgttgcgggtctgatgcgggctatcactggcagttcggtgtcggagaacgcggccattgccatggctggaatagccaagctctttgttggagaggtggtggaagaggccctggacgtgtgtgagatgtggggagagacgcacccgctgcagcccaagcatttaagggaggccgttcgcaggttaaagcccaagggcctcttccccaacagcaactgcagaagaatcatgttctag

SEQ ID NO: 596 - protein, 198 aa, Homo sapiens
METGRQTGVSAEMLAMPRGLKGSKKDGIPEDLDGNLEAPRDQEGELRSEDVMDLTEGDSEASASAPPAAKRRKTHTKGKKESKPTVDAEEAHRMTTLLSAMSEEQLSRYEVCRRSAFPRARVAGLMRAITGSSVSENAAIAMAGIAKLFVGEVVEEALDVCEMWGETHPLQPKHLREAVRRLKPKGLFPNSNCRRIMF

SEQ ID NO: 597 - DNA, 597 bp, Homo sapiens
atggagaccggcaggcaaacaggcgtgtctgctgagatgctcgccatgccccgaggtctgaagggcagcaagaaggatggaatccctgaggacctagacgggaacttggaagcacccagggatcaggaaggtgagctcaggagtgaggatgtcatggacctcacagaaggtgacagtgaggcctcagcctcagctcctcctgcagccaaaagacggaaaacacatacgaaaggcaagaaggagagcaagcccaccgtggatgcggaggaggctcagaggatgacaaccctgctgtctgccatgtctgaggagcagctgtcccgctacgaagtgtgtcgccggtcagcgttcccgagagcacgcgttgcgggtctgatgcgggctatcactggcagttcggtgtcggagaacgcggccattgccatggctggaatagccaagctctttgttggagaggtggtggaagaggccctggacgtgtgtgagatgtggggagagacgcccccgctgcagcccaagcatttaagggaggccgttcgcaggttaaagcccaagggcctcttccccaacagcaactgcaaaagaatcatgttctag

SEQ ID NO: 598 - protein, 198 aa, Homo sapiens [sequence omitted]

SEQ ID NO: 599 - DNA, 597 bp, Homo sapiens; identical to SEQ ID NO: 597

SEQ ID NO: 600 - protein, 198 aa, Homo sapiens [sequence omitted]

SEQ ID NO: 601 - DNA, 597 bp, Homo sapiens; identical to SEQ ID NO: 597

SEQ ID NO: 602 - protein, 198 aa, Homo sapiens [sequence omitted]

SEQ ID NO: 603 - DNA, 597 bp, Homo sapiens; identical to SEQ ID NO: 589

SEQ ID NO: 604 - protein, 198 aa, Homo sapiens [sequence omitted]

SEQ ID NO: 605 - DNA, 597 bp, Homo sapiens; identical to SEQ ID NO: 597

SEQ ID NO: 606 - protein, 198 aa, Homo sapiens [sequence omitted]

SEQ ID NO: 607 - DNA, 597 bp, Homo sapiens; identical to SEQ ID NO: 589

SEQ ID NO: 608 - protein, 198 aa, Homo sapiens [sequence omitted]

SEQ ID NO: 609 - DNA, 597 bp, Homo sapiens; identical to SEQ ID NO: 597

SEQ ID NO: 610 - protein, 198 aa, Homo sapiens [sequence omitted]

SEQ ID NO: 611 - DNA, 597 bp, Homo sapiens; identical to SEQ ID NO: 589

SEQ ID NO: 612 - protein, 198 aa, Homo sapiens [sequence omitted]

SEQ ID NO: 613 - DNA, 597 bp, Homo sapiens
atggagaccggcaggcaaacaggtgtgtctgctgagatgctcgccatgccccgaggtctgaagggcagcaagaaggatggaatccctgaggacctagacgggaacttggaagcacccagggatcaggaaggtgagctcaggagtgaggatgtcatggacctcacagaaggtgacagtgaggcctcagcctcagctcctcctgcagccaaaagacggaaaacacatacgaaaggcaagaaggagagcaagcccaccgtggatgcggaggaggctcagaggatgacaaccctgctgtctgccatgtctgaggagcagctgtcccgctacgaagtgtgtcgccggtcagcgttcccgagagcacgcgttgcgggtctgatgcgggctatcactggcagttcggtgtcggagaacgcggccattgccatggctggaatagccaagctctttgttggagaggtggtggaagaggccctggacgtgtgtgagatgtggggagagacgcccccgctgcagcccaagcatttaagggaggccgttcgcaggttaaagcccaagggcctcttccccaacagcaactgcagaagaatcatgttctag

SEQ ID NO: 614 - protein, 198 aa, Homo sapiens; identical to SEQ ID NO: 594

SEQ ID NO: 615 - DNA, 597 bp, Homo sapiens; identical to SEQ ID NO: 613

SEQ ID NO: 616 - protein, 198 aa, Homo sapiens; identical to SEQ ID NO: 594

SEQ ID NO: 617 - DNA, 597 bp, Homo sapiens; identical to SEQ ID NO: 589

SEQ ID NO: 618 - protein, 198 aa, Homo sapiens [sequence omitted]

SEQ ID NO: 619 - DNA, 597 bp, Homo sapiens; identical to SEQ ID NO: 589

SEQ ID NO: 620 - protein, 198 aa, Homo sapiens [sequence omitted]

SEQ ID NO: 621 - DNA, 597 bp, Homo sapiens
atggagaccggcaggcaaacaggtgtgtctgctgagatgctcgccatgccccgaggtctgaagggcagcaagaaggatggaatccctgaggacctagacgggaacttggaagcacccagggatcaggaaggtgagctcaggagtgaggatgtcatggacctcacagaaggtgacagtgaggcctcagcctcagctcctcctgcagccaaaagacggaaaacacatacgaaaggcaagaaggagagcaagcccaccgtggatgcggaggaggctcagaggatgacaaccctgctgtctgccatgtctgaggagcagctgtcccgctacgaagtgtgtcgccggtcagcgttcccgagagcacgcgttgcgggtctgatgcgggctatcactggcagttctgtgtcggagaacgcggccattgccatggctggaatagccaagctctttgttggagaggtggtggaagaggccctggacgtgtgtgagatgtggggagagacgcccccgctgcagcccaagcatttaagggaggccgttcgcaggttaaagcccaagggcctcttccccaacagcaactgcaaaagaatcatgttctag

SEQ ID NO: 622 - protein, 198 aa, Homo sapiens [sequence omitted]

SEQ ID NO: 623 - DNA, 597 bp, Homo sapiens; identical to SEQ ID NO: 589

SEQ ID NO: 624 - protein, 198 aa, Homo sapiens [sequence omitted]

SEQ ID NO: 625 - DNA, 597 bp, Homo sapiens
atggagaccggcaggcaaacaggtgtgtctgctgagatgctcgccatgccccgaggtctgaagggcagcaagaaggatggaatccctgaggacctagacgggaacttggaagcacccagggatcaggaaggtgagctcaggagtgaggatgtcatggacctcacagaaggtgacagtgaggcctcagcctcagctcctcctgcagccaaaagacggaaaacacatacgaaaggcaagaaggagagcaagcccaccgtggatgcggaggaggctcacaggatgacaaccctgctgtctgccatgtctgaggagcagctgtcccgctacgaagtgtgtcgccggtcagcgttcccgagagcacgcgttgcgggtctgatgcgggctatcactggcagttcggtgtcggagaacgcggccattgccatggctggaatagccaagctctttgttggagaggtggtggaagaggccctggacgtgtgtgagatgtggggagagacgcccccgctgcagcccaagcatttaagggaggccgttcgcaggttaaagcccaagggcctcttccccaacagcaactgcaaaagaatcatgttctag

SEQ ID NO: 626 - protein, 198 aa, Homo sapiens [sequence omitted]

SEQ ID NO: 627 - DNA, 756 bp, Homo sapiens
atgattgaaagggatgatcaaacaggctgctgccttcatctgggtgtaaccaatgtaaaatgtaagaaagacgttaaattacggatccataatcgaaccaccccagccagaacttctgcctgtacagctgctgtcacggagcagactggaatctcacccatggagacaggcaggcaaagagatgcctctgctgagatgttccccatgccccgaggtctgaagtacagcaacaaggatggaatccctgaggacctagatgggaacttggaagaacccagggatcaggaaagtgagctcaggagtcaggatgtcatggacctcacagaaggtgacaatgaagcgtcagcctcaactcctccttcagctaaaaggcagaaaacagataccaaggggaagaaggagaggaagcccaccatggatgcagaggaggctcagaggatgacaaccctgttttctgccatgtctgaggagcagctatctcgctacgaagtgtgtcgccggtcagctttcccaaaagcacgcattgcagctctgatgcagtccatcactggcagatcggtgtctgagaacaccgccattgccatggctggaatagccaaggtctttgtgggagaggtggtggaagaggccctggacgtgtgcgaaatgtggggagaaacgcccccgctgcagcccaagcatttacgggaggctgttcgcaggttaaagcccaagggcatcctccccaacagcaactacaaaaaaatcatgttctag

SEQ ID NO: 628 - protein, 251 aa, Homo sapiens
MIERDDQTGCCLHLGVTNVKCKKDVKLRIHNRTTPARTSACTAAVTEQTGISPMETGRQRDASAEMFPMPRGLKYSNKDGIPEDLDGNLEEPRDQESELRSQDVMDLTEGDNEASASTPPSAKRQKTDTKGKKERKPTMDAEEAQRMTTLFSAMSEEQLSRYEVCRRSAFPKARIAALMQSITGRSVSENTAIAMAGIAKVFVGEVVEEALDVCEMWGETPPLQPKHLREAVRRLKPKGILPNSNYKKIMF

SEQ ID NO: 629 - DNA, 597 bp, Homo sapiens
atggagaccggcaggcaaacaggcgtgtctgctgagatgctcgccatgccccgaggtctgaagggcagcaagaaggatggaatccctgaggacctagatgggaacttggaagaacccagggatcaggaaggtgagctcaggagtgaggatgtcatggacctcacagaaggtgacagtgaggcctcagcctcagctcctcctgcagccaaaagacggaaaacacatacgaaacgcaagaaggagaggaagcccaccgtggatgcagaggaggctcagaggatgacaaccctgctgtctgccatgtctgaggagcagctgtcccgctacgaagtgtgtcgccggtcagctttcccaagagcacgcattgcgggtctgatgcggtctatcactggcagttcggtgtctgagaacgcggccattgccatggctggaatagccaaggtctttgttggagaggtggtggaagaggccctggacatgtgtgagatgtggggagagacgcccccgctgcagcccaagcatttaagggaggctgttcacaggttaaagcccaagggcctcttccccaacagcaactacaaaagagtcatgttctag

SEQ ID NO: 630 - protein, 198 aa, Homo sapiens
METGRQTGVSAEMLAMPRGLKGSKKDGIPEDLDGNLEEPRDQEGELRSEDVMDLTEGDSEASASAPPAAKRRKTHTKRKKERKPTVDAEEAQRMTTLLSAMSEEQLSRYEVCRRSAFPRARIAGLMRSITGSSVSENAAIAMAGIAKVFVGEVVEEALDMCEMWGETPPLQPKHLREAVHRLKPKGLFPNSNYKRVMF

SEQ ID NO: 631 - DNA, 594 bp, Homo sapiens
atggagaccggcaggcaaacaggtgtgtctgctgagatgttcgccataccccgaggtctgaagggctgcaacgaggatggaatccctgaggccctagatgggaacttggaagaacccagggctcaggaatgtgagctcaggagtgaggatgtcatggacctcacagtagttgacaatgaggcctcagcctcagctcctcctgcagccaaaagacagaaaacagataccaaaggccagaaggagaggaagcccagtgtggatgcagaggaggctcagaggatgacaaccctgctgtctgccatgtctgaggagcagctgtcccgctatgaagtgtgtcgccagttagctttcccaaaagcacttgttgcacgtctgatgtggtctatcactgggagatcggtgcctgagaacatggccattgccatggctggaatagccaaggtctttgttggagaggtggtggaagaggccctggacatgtgtgagatgtggggagaaatgcccccattgcagcccatggatttaagggaggctgtttgcaggttaaagcccaagggcctcttccccaacaactataaaaaagtcatgttctag

SEQ ID NO: 632 - protein, 197 aa, Homo sapiens
METGRQTGVSAEMFAIPRGLKGCNEDGIPEALDGNLEEPRAQECELRSEDVMDLTVVDNEASASAPPAAKRQKTDTKGQKERKPSVDAEEAQRMTTLLSAMSEEQLSRYEVCRQLAFPKALVARLMWSITGRSVPENMAIAMAGIAKVFVGEVVEEALDMCEMWGEMPPLQPMDLREAVCRLKPKGLFPNNYKKVMF

SEQ ID NO: 633 - DNA, 596 bp, Homo sapiens
atgccccgagttctgaagggcagcaacaaggatggaatccctgagggcctagatgggaacttggaagaacccagggatcaggaaggtgagctcaggagtcaggacatcttggttctcagagcaggtgacaaagaagcctcagcctcagttcctcctgcagccaaaaaatggaaaacagataccaaaggaaagaagaagaggaagcccagtgtggatgcagaggaggctcagaggatgacaaccctgctttctgccatgtctgaggagcagctggcccgctacgaagtgtgtcgccggtcagctttcccaaaagcacgcattgcagctctgatgcagtctatcactggcagatcggtgtctgagaacgcggccattgccatggctggaatagccaaggtcttggttggagaggtggtgcaagaggccctggacatgtgtgagatgggggagaaacgcccccgctgcatcccaagcatttaagggaggctgttcacaggttaaagcccaagggcttcttccccaacagcaactacaaaaaaaaaatatgttcttttaggcccaaggccagagggaaaggtctgtttgtgcaggaataa

SEQ ID NO: 634 - DNA, 411 bp, Homo sapiens
atggcgcgcaccaagcagaccgcccgcaaagccaccgcctggcaggcccccaggaagcccctggccaccaaagcagccggaaaaagggcgccgcctacaggagggatcaagaagcctcaccgctacaagcctggcaccctggcgctgcgggaaatcagaaagtaccagaagtccacgcagctgctcctgcgcaagctgcccttccagcgcctggtgcgcgagatcgcccaggccatcagcccggacctgcgcttccagagtgcggccattggcgccctgcaggaggccagcgaggcctacctggtgcagctctttgaagacaccaacctgtgtgccatccatgccaggcgcgtcacaattatgccccgagacatgcagctggcccgccgcctccgcagagagggtccttaa

SEQ ID NO: 635 - protein, 136 aa, Homo sapiens
MARTKQTARKATAWQAPRKPLATKAAGKRAPPTGGIKKPHRYKPGTLALREIRKYQKSTQLLLRKLPFQRLVREIAQAISPDLRFQSAAIGALQEASEAYLVQLFEDTNLCAIHARRVTIMPRDMQLARRLRREGP

SEQ ID NO: 636 - DNA, 11659 bp, Homo sapiens
gctggagggatcctccattcctgtgtcatttgcatgggtcctgctgtgaaatgaacctggcagggacttgttagacacttccttccttccctcattgagcactccagtgccattgttccacagttgttctaattgggtcctagcttcctcctgccaaggcaaacagcatagtctcgagtaggtgtccctaggctcatctgccagcctgaacatgaacacaggcaaagctgatgatggccagggaccccaggggacgtggggccctgtggggtctggcccccaggagcaagacctctgatgatgctggtgtctgggagtgagcaccatgcccatcacccaggacaatgccgtgctgcacctgcccctcctctaccagtggctgcagaacagcctgcaggaaggtggggatgggccggagcagcggctctgccaggcggccatccagaagctgcaggagtacatccagctgaactttgctgtggatgagagtacggtcccacctgatcacagcccccccgaaatggagatctgtactgtgtacctcaccaaggagctgggggacacagagactgtgggcctgagttttgggaacatccctgttttcggggactatggtgaaaagcgcagggggggcaagaagaggaaaacccaccagggtcctgtgctggatgtgggctgcatctgggtgacagagctgaggaagaacagcccagcagggaagagtgggaaggtccgactgcgggatgagatcctctcactgaatgggcagctgatggttggagttgatgtcagtggggccagttacctggctgagcagtgctggaatggcggctttatctacctgatcatgctgcgtcgctttaagcacaaagcccactccacttataatggcaacagtagcaacagctctgaaccaggagaaacacctaccttggagctgggtgaccgaactgcgaaaaaggggaaacgaaccagaaagtttggggtcatctccaggcctcctgccaacaaggcccctgaagaatccaagggcagcgctggctgtgaggtgtccagtgaccccagcactgagctggagaacggccctgaccctgaacttggaaacggccatgtctttcagctagaaaatggcccagattctctcaaggaggtggctggaccccatctagagaggtcagaagtggacagagggacagagcatagaattccaaagacagatgctcctctgaccacaagcaatgacaaacgccgcttctcaaaaggtgggaagacggacttccaatcgagtgactgcctggcacgggaggaagttggccgaatatggaagatggagctgctcaaagaatcggatgggctgggaattcaggttagtggaggccgaggatcaaagcgctcacctcacgctatcgttgtcactcaagtgaaggaaggaggtgccgctcacagggatggcaggctgtccttaggagatgagctgctggtaatcaatggtcatttactggtcgggctctcccacgaggaagcagtggccattcttcgctccgccacgggaatggtgcagcttgtggtggccagcaaggaaaactccgcagaggacctcctcaggttaacatctaagagcttgccagatctgaccagctcggtagaagatgtgtcctcctggactgataacgaagaccaggaggcagacggggaagaggacgaaggaaccagctcttctgtccagagagcaatgcctgggacagatgaaccccaagatgtgtgcggtgctgaggaatccaaggggaacttggaaagtcccaaacagggcagcaataaaatcaagctcaagagtcgcctttcagggggtgtacaccgccttgagtcagttgaagaatataacgagctgatggtgcggaatggggacccccggatccggatgttggaggtctcccgagatggccggaaacactccctcccgcagctgctggactcttccagtgcctcacaggaataccacattgtgaagaagtctacccgctccttaagcacgactcaggtggaatctccttggaggctcattcggccatccgtcatctcgatcattgggttgtacaaagaaaaaggcaagggccttggctttagtattgctggaggtcgagactgcattcgtggacagatggggatttttgtcaagaccatcttcccaaatggatcagctgcagaggacggaagacttaaagaaggggatgaaatcctagatgtaaatggaataccaataaagggcttgacatttcaagaagccattcatacctttaagcaaatccggagtggattatttgttttaacggtacgcacaaagttggtgagccccagcctcacaccctgctcgacacccacacacatgagcagatccgcctccccgaacttcaataccagtgggggagcctcagcgggaggttccgatgaaggcagttcttcatccctgggtcggaagacccctgggcccaaggacaggatcgtcatggaagtaacactcaacaaagagccaagagttggattaggcattggtgcctgctgcttggctctggaaaacagtcctcctggcatctacattcacagccttgctccaggatcagtggccaagatggagagcaacctgagccgcggggatcaaatcctggaagtgaactccgtcaacgtccgccatgctgctttaagcaaagtccacgccatcttgagtaaatgccctccaggacccgttcgccttgtcatcggccggcaccctaatccaaaggtttccgagcaggaaatggatgaagtcatagcacgcagcacttatcaggagagcaaagaggccaattcctctcctggcttaggtacccccttgaagagtccctctcttgcaaaaaaggactcccttatttctgaatctgaactctcccagtactttgcccacgatgtccctggccccttgtcagacttcatggtggccggttctgaggacgaggatcacccgggaagtggctgcagcacgtcggaggagggcagcctgcctcccagcacctccactcacaaggagcctggaaaacccagagccaacagcctcgtgactcttgggagccatcgggcttctgggctcttccacaagcaggtgacagttgccagacaagccagtctccccggaagcccacaggccctccgaaaccctctcctccgccagaggaaggtaggctgctacgatgccaacgatgccagtgatgaggaagagtttgacagagaaggggactgcatttcactcccaggggccctcccgggtcccatcaggcctctgtcagaggatgacccgaggcgtgtctcaatttcctcttccaagggcatggacgtccacaaccaagaggaacgaccccggaaaacactggtgagcaaggccatctcggcacctcttcttggtagctcagtggacttagaggagagtatcccagagggcatggtggatgctgcgtcctatgcagccaacctcacggactctgcagaggcccccaaggggagccctggaagctggtggaagaaggaactgtcaggatcaagtagcgcacccaaattggaatacacagtccgtacagacacccagagtccgacgaacactgggagccccagttccccccagcagaaaagtgaaggcctgggctccaggcacagaccagtggccagggtaagcccccactgcaagagatccgaggctgaggccaagcccagtggctcacagacagtgaacctgactggcagagccaatgatccatgcgatctggactcgagagtccaggccacttctgtcaaagtgactgtcgctggctttcagccaggtggagctgtggagaaggaatctctgggaaagctgaccactggagatgcttgtgtctctaccagctgtgaactagccagtgctctgtcccatctggatgccagccacctcacagagaacctgcccaaagctgcatcagagctggggcaacaacccatgactgaactggacagctcctcagacctcatctcttccccagggaagaagggggccgctcatcctgaccccagcaagacctctgtagacacagggcaagtcagtcggccagagaatcccagccagcctgcatcgcccagggtcaccaagtgcaaggccaggtctccagtcaggctcccccatgagggcagcccctccccgggggagaaagcagcggctccccctgactacagcaagactcgatcagcatcggaaaccagcacaccccacaataccaggagggtggctgccctcaggggagcgggacctggagcagagggaatgacaccagctggtgctgtcctgccaggagaccccctcacatcccaggagcagagacagggagctccaggtaaccacagtaaggctctggaaatgacaggaatccatgcacctgaaagctcccaggagccttccctgctggagggagcagattctgtgtcctcaagggcaccgcaggccagcctctccatgctgccatccactgacaacaccaaagaagcatgtggccatgtctcggggcactgctgcccaggggggagtagagagagccctgtgacggacattgacagcttcatcaaggagctggatgcttctgcagcaaggtctccgtcttcccagacgggggacagtggctctcaggagggcagtgctcagggccacccaccagccggggctggaggtgggagctcctgccgtgccgaaccagtcccggggggccagacctcctccccgaggagggcctgggctgctggtgcccccgcctacccacaatgggcctcccagccttcggttttagattcaattaatcccgacaaacattttactgtgaacaaaaactttctgagcaactactctagaaattttagcagttttcatgaagacagcacctccctatcaggcctgggtgacagcacggagccgtctctgtcatccatgtatggcgatgctgaggattcttcttctgaccctgagtcactcactgaagccccacgagcttctgccagggacggctggtcccctcctcgttcccgtgtgtctttgcacaaggaagatccttcggagtcagaagaggaacagattgagatttgttccacacgtggctgccccaatccaccctcgagtcctgctcatcttcccacccaggctgccatctgtcctgcctcagccaaagttctgtcattaaaatacagcactccgagagagtcggtggccagtccccgtgagaaggccgcctgcttgccaggctcatacacttcaggcccagactcttcccagccatcatcactcttggagatgagctctcaggagcatgaaactcatgcggacataagcacttcacagaaccacaggccctcgtgtgcagaagaaaccacagaagtcaccagcgctagctcagccatggaaaacagtccgctgtctaaagtagccaggcattttcacagtccgcccatcattctcagctcccccaacatggtaaatggcttggaacatgacctgctagatgacgaaaccctgaatcaatacgaaacaagcattaatgcagctgccagtctgtcctccttcagtgtggatgtccctaagaatggagaatctgttttggaaaacctccacatctctgaaagtcaagacctggatgacttgctacagaaaccaaaaatgatcgctaggaggcccatcatggcctggtttaaagaaataaataaacataaccaaggcacacatttgaggagcaaaaccgagaaggaacaacctctaatgcctgccagaagtcccgactccaagattcagatggtgagttcaagccaaaaaaagggcgttactgtgcctcatagccctcctcagccgaaaacaaacctggaaaataaggacctgtctaagaagagtccggcagaaatgcttctgactaatggtcagaaggcaaagtgtggtccgaagctgaagaggctcagcctcaagggcaaggccaaagtcaactctgaggcccctgctgcgaatgctgtgaaggctggggggacggaccacaggaaacccttgatctcaccccagacctcccacaaaacactttctaaggcagtgtcacagcggctccatgtagccgaccacgaggaccctgacagaaacaccacagctgcccccaggtccccccagtgtgtgctggaaagcaagccacctcttgccacctctgggccactgaaaccctcagtgtctgacacgagcatcaggacatttgtctcgcccctgacctctcccaagcctgttcctgagcaaggcatgtggagcaggttccacatggctgtcctctctgaacccgacagaggttgcccaaccacccctaaatctcctaagtgtagagcagagggcagggcgccccgtgctgactccgggccggtgagtccggcagcgtctaggaacggcatgtccgtggcagggaacagacagagtgagccgcgcctggccagccatgtggcagcagacacagcccaacccaggccgactggcgaaaaaggaggcaacataatggccagcgatcgcctcgaaagaacaaaccagctgaaaatcgtggagatttctgctgaagcagtgtcagagactgtatgtggtaacaagccagctgaaagcgacagacggggagggtgcttggcccagggcaactgtcaggagaagagtgaaatcaggctctatcgccaggtcgcagaatcatccacaagtcatccatcctcactcccatctcatgcctcccaggcagagcaggaaatgtcacgatcattcagcatggcaaaactggcgtcctcctcctcctcccttcaaacagccattagaaaggcagaatactcccagggaaaatcaagcctgatgtcagactcccgaggggtgcccagaaacagcattccagggggcccctcgggggaggaccatctctacttcaccccaaggccagcgaccaggacctactccatgccagcccagttctcaagccattttggacgggagggtcaccccccacacagcctgggtcgctctcgggacagccaggtccctgtgacaagcagtgttgtccccgaggcaaaggcatccagaggtggtcttcccagcctggctaatggacagggcatatatagtgtaaagccgctgctggacacatcgaggaatcttccagccacagatgaaggggatatcatttcagtccaggagacgagctgcctagtcacagacaaaatcaaagtcaccagacgacactactgctatgagcagaactggccccatgaatctacctcatttttctctgtgaagcagcggatcaagtcttttgagaacctggccaatgctgaccggcctgtagccaagtccggggcttccccatttttgtcggtgagctccaagcctcccattgggaggcggtcttccggcagcattgtttccgggagcctgggccacccaggtgacgcagcagcaaggttgttgagacgcagcttgagttcctgcagcgaaaaccaaagcgaagccggcaccctcctgccccagatggccaagtctccctcaatcatgacactgaccatctctcggcagaacccaccagagaccagtagcaagggctctgattcggaactaaagaaatcacttggtcctttgggaattcccaccccaacgatgaccctggcttctcctgttaagaggaacaagtcctcggtacgccacacgcagccctcgcccgtgtcccgctccaagctccaggagctgagagccttgagcatgcctgaccttgacaagctctgcagcgaggattactcagcagggccgagcgccgtgctcttcaaaactgagctggagatcacccccaggaggtcacctggccctcctgctggaggcgtttcgtgtcccgagaagggcgggaacagggcctgtccaggaggaagtggccctaaaaccagtgctgctgagacacccagttcagccagtgatacgggtgaagctgcccaggatctgccttttagaagaagctggtcagttaatttggatcaacttctagtctcagcgggggaccagcaaagattacagtctgttttatcgtcagtgggatcgaaatctaccatcctaactctcattcaggaagcgaaagcacaatcagagaatgaagaagatgtttgcttcatagtcttgaatagaaaagaaggctcaggtctgggattcagtgtggcaggagggacagatgtggagccaaaatcaatcacggtccacagggtgttttctcagggggcggcttctcaggaagggactatgaaccgaggggatttccttctgtcagtcaacggcgcctcactggctggcttagcccacgggaatgtcctgaaggttctgcaccaggcacagctgcacaaagatgccctcgtggtcatcaagaaagggatggatcagcccaggccctctgcccggcaggagcctcccacagccaatgggaagggtttgctgtccagaaagaccatccccctggagcctggcattgggagaagtgtggctgtacacgatgctctgtgtgttgaagtgctgaagacctcggctgggctgggactgagtctggatgggggaaaatcatcggtgacgggagatgggcccttggtcattaaaagagtgtacaaaggtggtgcggctgaacaagctggaataatagaagctggagatgaaattcttgctattaatgggaaacctctggttgggctcatgcactttgatgcctggaatattatgaagtctgtcccagaaggacctgtgcagttattaattagaaagcataggaattcttcatgaattttaacaagaatcattttctcagttctcttctttctttagcaaatcagagtgacttctttaaaccacaggttgttgaaatggccaacactggtacagacacggactataaaaatctccaagcttgtgcttacacatgaagcctgacttaactgtatgtgcaacagcaatgaaattaactccagaagccttccacctgcgtcacccaggccgggagggttccttcgttccagtgcctgtcccctacctttatgttatgtttactgatggggatacaagatgtgacacacccttctttatttgaaacaaacaaacatttagctagacctttgcttccttcttgccagctctcccaacatacccaatcctggtgatcagggaactaaaagtctgagggggacacaaatgtcacacctaagaggacaatcaatcattttgtatgattttgtaagtaaatgacagaatgcttttaggcacattcaatggaaggaggagatgtaggtctgtatatgttaccctgaaaagagaataagacttacttaaaaaaatgaattatgacctgttaggctgagctcaggaattgtccaaaaaggaaaaagcaaaataattaattgagagtattttttagtgagtgtaatgtataatgtacgtatgcaaagttcaactcaataggttattgatcaccatgaagtattgatcattttctatctcaaaagtgtaagccataaggctgttttacagaatagcacttctgataagctgtattaaatagccatgagcttcactgcttagagggagcagaaaggtcaacatctaaaagcaccttacaactagtttttgaacctgtcttgataagtgcttgaattcaagactggtcagtccaagagcagacaaaaatatcacaagtcagtcagtcactgggtttccatttctgaattttatgcactccaaccatgaatttaaactaaatttttagaaatcaagtatctttctaagtgtccttggatttatagacaatgtatgtacaatccaaatagaggagcttaatggaatccttttaggagactggttggtttttttccctctttcccaacatgtttaagaaatgtaacattctaagtattggatctcttttcttgacctagtataatgacaactgcagtgacttaagtttttgctgttttcgttttcccgctttgcaatttcctccttttgccaaaaatgttttcctacagaagactgtcgtgactcacgctacttgggaaactcactctggccactcctcctctggtggcatgagctgcttcccagtagctattccgattggatattccgttcgtcgtcacatagctggcttttctctcctcatgatgtaccttattttcttaggtaaataattccaaactctcatcgggtcataaagaggaggagaaacagggtgagtcaaggtaaaggagcagaaatgtagttacaagccaggtcgtcttcagtggcacaaaccaacccgttgagccctgacaacatgagtggagagtgcatttgccatacctgtgtgcatgacactaagattttatgttggagatacttctttaaataacctacagcttgggtctatggctgtgacccccagattcatggaggggctttagccatcagctttgtacatcatcatttttctgaatgaccaatcccactaaacatctttgaagtcggcctagagaggtccttcagatgagagagaaatagctggcttgtctgagtccagatttctcatcaactggcaatacaaaggaaaatatggtacaggagttagttagaaaggtcttattgattttacttctacttttcactacagttacaggtagaatactgtaggaagtcagtgcaaggtgcatgcttgattgatagatattgattgattgtttttcagtctctggggtcagttttgtggtttctgctttcttgcctaaatcaaagactatttcaagtcaacaacactgaaaactgcttttcgcctccactcttacagctgtgcctaataataattaattaataaacgcacagccctatgtgaacagacaggaatttcttgtgcaatgtggagcaaatggaatggtctccttccgcaagtctttttaatcctcatatctggagtacaagggtagacctctggcttaccacatacactatgctaaagtcatcagccactgctactacatcttgccagaaggtttccctcgccaacaaacagttgaaatttaagggaagaagcaaaagctaaactgtctttgaccctaagatagatagaaagctatttatttgtcttcagtgttcaaggcatgactagtatttctaattagcctaataaattcccacactttctgaagtgaacactaatggtattgtcctactaaaactgtcattgtttctttttttttaactggtcagtcattcacaataagctatgagggtaaataaatatgtgttataacaagtaaaccgtagttgcaagaatataccatgaagattaaagtaggctgggtttcatttccatcttcccacacatctcattgaatttgatggttgacttaattggcaccataactttgtatgatattatacattaacctttatttatgtaaagtaaaatgccttatatattaaagagtaagtgcaataatatgaaatagcctgtacattttaaaaatgttgtcaccaagttatataaatccacatctctgtaaacaaccttttttaagtaattttaaaaaaaataaacactctgcttactacttgaaaaaaaaaaaaaaaaaa

SEQ ID NO: 637 - protein, 2839 aa, Homo sapiens
MPITQDNAVLHLPLLYQWLQNSLQEGGDGPEQRLCQAAIQKLQEYIQLNFAVDESTVPPDHSPPEMEICTVYLTKELGDTETVGLSFGNIPVFGDYGEKRRGGKKRKTHQGPVLDVGCIWVTELRKNSPAGKSGKVRLRDEILSLNGQLMVGVDVSGASYLAEQCWNGGFIYLIMLRRFKHKAHSTYNGNSSNSSEPGETPTLELGDRTAKKGKRTRKFGVISRPPANKAPEESKGSAGCEVSSDPSTELENGPDPELGNGHVFQLENGPDSLKEVAGPHLERSEVDRGTEHRIPKTDAPLTTSNDKRRFSKGGKTDFQSSDCLAREEVGRIWKMELLKESDGLGIQVSGGRGSKRSPHAIVVTQVKEGGAAHRDGRLSLGDELLVINGHLLVGLSHEEAVAILRSATGMVQLVVASKENSAEDLLRLTSKSLPDLTSSVEDVSSWTDNEDQEADGEEDEGTSSSVQRAMPGTDEPQDVCGAEESKGNLESPKQGSNKIKLKSRLSGGVHRLESVEEYNELMVRNGDPRIRMLEVSRDGRKHSLPQLLDSSSASQEYHIVKKSTRSLSTTQVESPWRLIRPSVISIIGLYKEKGKGLGFSIAGGRDCIRGQMGIFVKTIFPNGSAAEDGRLKEGDEILDVNGIPIKGLTFQEAIHTFKQIRSGLFVLTVRTKLVSPSLTPCSTPTHMSRSASPNFNTSGGASAGGSDEGSSSSLGRKTPGPKDRIVMEVTLNKEPRVGLGIGACCLALENSPPGIYIHSLAPGSVAKMESNLSRGDQILEVNSVNVRHAALSKVHAILSKCPPGPVRLVIGRHPNPKVSEQEMDEVIARSTYQESKEANSSPGLGTPLKSPSLAKKDSLISESELSQYFAHDVPGPLSDFMVAGSEDEDHPGSGCSTSEEGSLPPSTSTHKEPGKPRANSLVTLGSHRASGLFHKQVTVARQASLPGSPQALRNPLLRQRKVGCYDANDASDEEEFDREGDCISLPGALPGPIRPLSEDDPRRVSISSSKGMDVHNQEERPRKTLVSKAISAPLLGSSVDLEESIPEGMVDAASYAANLTDSAEAPKGSPGSWWKKELSGSSSAPKLEYTVRTDTQSPTNTGSPSSPQQKSEGLGSRHRPVARVSPHCKRSEAEAKPSGSQTVNLTGRANDPCDLDSRVQATSVKVTVAGFQPGGAVEKESLGKLTTGDACVSTSCELASALSHLDASHLTENLPKAASELGQQPMTELDSSSDLISSPGKKGAAHPDPSKTSVDTGQVSRPENPSQPASPRVTKCKARSPVRLPHEGSPSPGEKAAAPPDYSKTRSASETSTPHNTRRVAALRGAGPGAEGMTPAGAVLPGDPLTSQEQRQGAPGNHSKALEMTGIHAPESSQEPSLLEGADSVSSRAPQASLSMLPSTDNTKEACGHVSGHCCPGGSRESPVTDIDSFIKELDASAARSPSSQTGDSGSQEGSAQGHPPAGAGGGSSCRAEPVPGGQTSSPRRAWAAGAPAYPQWASQPSVLDSINPDKHFTVNKNFLSNYSRNFSSFHEDSTSLSGLGDSTEPSLSSMYGDAEDSSSDPESLTEAPRASARDGWSPPRSRVSLHKEDPSESEEEQIEICSTRGCPNPPSSPAHLPTQAAICPASAKVLSLKYSTPRESVASPREKAACLPGSYTSGPDSSQPSSLLEMSSQEHETHADISTSQNHRPSCAEETTEVTSASSAMENSPLSKVARHFHSPPIILSSPNMVNGLEHDLLDDETLNQYETSINAAASLSSFSVDVPKNGESVLENLHISESQDLDDLLQKPKMIARRPIMAWFKEINKHNQGTHLRSKTEKEQPLMPARSPDSKIQMVSSSQKKGVTVPHSPPQPKTNLENKDLSKKSPAEMLLTNGQKAKCGPKLKRLSLKGKAKVNSEAPAANAVKAGGTDHRKPLISPQTSHKTLSKAVSQRLHVADHEDPDRNTTAAPRSPQCVLESKPPLATSGPLKPSVSDTSIRTFVSPLTSPKPVPEQGMWSRFHMAVLSEPDRGCPTTPKSPKCRAEGRAPRADSGPVSPAASRNGMSVAGNRQSEPRLASHVAADTAQPRPTGEKGGNIMASDRLERTNQLKIVEISAEAVSETVCGNKPAESDRRGGCLAQGNCQEKSEIRLYRQVAESSTSHPSSLPSHASQAEQEMSRSFSMAKLASSSSSLQTAIRKAEYSQGKSSLMSDSRGVPRNSIPGGPSGEDHLYFTPRPATRTYSMPAQFSSHFGREGHPPHSLGRSRDSQVPVTSSVVPEAKASRGGLPSLANGQGIYSVKPLLDTSRNLPATDEGDIISVQETSCLVTDKIKVTRRHYCYEQNWPHESTSFFSVKQRIKSFENLANADRPVAKSGASPFLSVSSKPPIGRRSSGSIVSGSLGHPGDAAARLLRRSLSSCSENQSEAGTLLPQMAKSPSIMTLTISRQNPPETSSKGSDSELKKSLGPLGIPTPTMTLASPVKRNKSSVRHTQPSPVSRSKLQELRALSMPDLDKLCSEDYSAGPSAVLFKTELEITPRRSPGPPAGGVSCPEKGGNRACPGGSGPKTSAAETPSSASDTGEAAQDLPFRRSWSVNLDQLLVSAGDQQRLQSVLSSVGSKSTILTLIQEAKAQSENEEDVCFIVLNRKEGSGLGFSVAGGTDVEPKSITVHRVFSQGAASQEGTMNRGDFLLSVNGASLAGLAHGNVLKVLHQAQLHKDALVVIKKGMDQPRPSARQEPPTANGKGLLSRKTIPLEPGIGRSVAVHDALCVEVLKTSAGLGLSLDGGKSSVTGDGPLVIKRVYKGGAAEQAGIIEAGDEILAINGKPLVGLMHFDAWNIMKSVPEGPVQLLIRKHRNSS

SEQ ID NO: 638 - DNA, 1586 bp, Homo sapiens
gcgccccgcaggaagtgcttccctgggcggaagcttctgagcgtgatatagcggaagtgccttctcttccggtctttctggtctcggccgcagaagcgagatgacgaagggaacgtcatcgtttggaaagcgtcgcaataagacgcacacgttgtgccgccgctgtggctctaaggcctaccaccttcagaagtcgacctgtggcaaatgtggctaccctgccaagcgcaagagaaagtataactggagtgccaaggctaaaagacgaaataccaccggaactggtcgaatgaggcacctaaaaattgtataccgcagattcaggcatggattccgtgaaggaacaacacctaaacccaagagggcagctgttgcagcatccagttcatcttaagaatgtcaacgattagtcatgcaataaatgttctggttttaaaaaatacatatctggttttggtaaggtatttttaatcaattaggcttgtagtatcagtgaaatactgtaggtttagggactgggctagcttcatatcagatttacttgttaagtgactgttttggaatgtttacttttggactgggtttgtaacacggttaaaggcaatgagaaacaagcagaattccaggagtccttgaagcagagggcactggaagacaatatagcagattaaaatagcacagctcatgtggcataggtgggtattttagatgtttgagtaaatttgaaagagtatgatgtttaaattacctttagcaacatgttcatctgctatgctgtcatgactagggggatgattattagtcacatagagcttgggagtaccactggaaacgtatgggtaggagtttaggtggcttctgtttttcaaaagatgatcttatcctagtatctgtaatgctcacttggcacacctgacttgtgggctgtgtgtaaggtggctagctaagtgaaaaaagcctgctaggtgtgagtcaacttaagaatatgtaaataggtttgagaaaaagtagggcttgggtgcaagtaaagattgagcaggaaataaaggaaaatcaagtataatccctgagatttgtagactaaaggcaatgatgtgggactacttggtcgaatttttttagccctcaacttggtaattgggtgtttctgtgttaaagcactgaaacttgctgtcgtgccttcctagttttcgtggtttattgacagggttgggggttttttttgtttttttaaaatgaagggacaaagtcaactggactgctgagtgagagggcaggggcagttgaagggaacatgaattgctggaacagctacataaaatagtgatgtagccaagtcatgctatttaaattataattctccactgtgtttagaataacatctgaggttcttaacctggccttggaagggtatcacttttacttgtaacctggaatggctttataatgtgctagctaattgctactctcatcttgtattttaactcctaatttacccttcaggtctcagcttcagaacattcacttataaagaaaccctgctgattaaatctctcttgggcttcctcccaaaaaaaaaaaaaaaa

SEQ ID NO: 639 - protein, 97 aa, Homo sapiens [sequence omitted]

SEQ ID NO: 640 - DNA, 80 bp, Homo sapiens
agcttatcagtgatgttgtaaaaataaatgtctgaacatatgaatgcagtattgatttcagcatttaactgagataagcg

SEQ ID NO: 641 - DNA, 4097 bp, Homo sapiens
attctttttttaacttttacttattcattaggatgatttcataatatatttcctggtttagaggaaacaggaacaatggctaccgagagtactccctcagagatcatagaaagagaaagaaaaaagttgcttgaaatccttcaacatgatcctgattctatcttagacacgttaacttctcggaggctgatttctgaggaagagtatgagactctggagaatgttacagatctcctgaagaaaagtcggaagctgttaattttggtacagaaaaagggagaggcgacctgtcagcattttctcaagtgtttatttagtacttttccacagtcagctgccatttgcggcttaaggcatgaagttttaaaacatgagaatacagtacctcctcaatctatgggggcaagcagtaattcagaagatgctttttctcctggaataaaacagcctgaagcccctgagatcacagtgttcttcagtgagaaggaacacttggatttggaaacctctgagtttttcagggacaagaaaactagttatagggaaacagctttgtctgccaggaagaatgagaaggaatatgacacaccagaagtcacattatcatattcagttgagaaagttggatgtgaagttccagcaactattacatatataaaagatggacagagatatgaggagctagatgattctttatacttaggaaaagaggaatatctaggatctgttgacacccctgaagatgcagaagccactgtggaagaggaggtttatgatgacccagagcacgttggatatgatggtgaagaggacttcgagaattcagaaaccacagagttctctggtgaagaaccaagttatgagggatcagaaaccagcctttcattggaggaggaacaggagaaaagtatagaagaaagaaaaaaggtgtttaaagatgtcctgttatgtttgaacatggatagaagcagaaaggttctgccagattttgttaaacaattctccttagatcgaggatgtaagtggacccctgagagtccaggagacttagcctggaatttcctgatgaaagttcaagcacgagatgtgacggctagggattcaatcctcagtcacaaggttctggatgaagatagcaaggaggatttgctggctggagtggagaatttggaaattcgagacatacaaaccattaatccccttgacgtgctttgtgccaccatgctgtgttcagatagctctttgcaacgccaagtcatgtcaaacatgtatcagtgccagtttgctcttcccctgctactgccagatgcagaaaacaacaaaagcatcttaatgctgggggccatgaaagacattgtgaagaagcagtcaacacagttttcaggggggcctacagaggatacagaaaagtttctgactctcatgaagatgcctgtcatctcttttgtgcgtctaggatactgtagcttctctaagtccagaatcctcaacacacttctcagccctgcccagttgaaattacacaaaatctttcttcatcaagatttgcctcttttggtgcttccccggcaaatctctgatggcctggttgagataacatggtgttttcctgatagcgatgatagaaaggaaaacccctttttccaaaagcctgttgctctggctaatctccgtggaaatctagaaagcttttggactcagtttggttttttgatggaagtttcttcagctgtgttttttttcactgactgtttaggtgagaaggaatgggacttgctaatgtttttaggagaggctgccattgaaagatgctactttgttctcagttcccaagccagggagagtgaagaggctcaaatttttcagaggatactgaacttgaagccagcacagctactgttttgggagaggggagatgctggggatagaaggaagaacatggagggccttcaagctgccctccaggaagtgatgttctcttcttgcctcagatgtgtgtctgtggaggatatggccgccctggccagggagctggggattcaggtagatgaagactttgaaaacactcagagaattcaagtttcctctggagaaaacatggctgggacagctgaaggtgagggtcagcaaagacacagtcagctaaaaagctcatctaaaagccaggctctaatgccaattcaagagcctgggactcaatgtgagctcagccagaatcttcagaatctctatggtaccccagtattcaggcctgttctagagaactcctggctctttccaaccagaattggaggtaactttaaccatgtttccttgaaagcctcctgggttatgggccgcccctttgggtcagagcagaggcctaagtggttccatcctttgccttttcagaatgcaggggcccagggccgaggtaaaagttttggtattcaatccttccatccccagatattttattcaggtgaaagattcatgaaattttccagagttgctcggggatgtcactcgaatggaacatttgggagactgccaagacccatttgtcagcatgtacaggcctgccctgagagaccacaaatgatgggaactcttgaaaggtctagggcagtagcctccaagataggtcactcctattccctggattcacagccagcaagagcagtagggaagccatggcctcagcaagcttgcaccagggtaacagagttaactgaagcaactggaaaactgataagaacatcccatattggaaagcctcaccctcagtcctttcaaccagcagcagccacacaaaaactaagacctgcttctcagcaaggagtccagatgaagacacaaggtggggcttcaaatccagctctccaaatagggtcccatcccatgtgcaagagctctcagttcaaatccgatcagtccaacccatccacagtcaaacactcccagcctaaacccttccattctgtgccctctcaacctaaatcctctcagacaaaatcctgtcagtcccagccctcccaaactaaaccttctccatgcaaatctactcagcctaagccaagccagccctggcctccccagtctaagccttctcagcccagaccccctcaacctaagtcatcctcaaccaatccttcacaagctaaggcacaccactcaaaagcagggcagaagaggggagggaagcattaaagagctaactccagagatctataaagcatatcctttacccaggccattcctatcatatagtaagcagaagagttgccatgaaagtaaaagactactgtcattagcatgtaaaacaaagaaagatatacatgactgaattggatatctttgtttgtttgtttgagacagagtttcactcttgttgcccaggctggagtgcaatggcacgatctcggctcaccgcaacctctgcttcctggcttaaagtgattctcctgcctcagcctctcgagtagctgggattacaggcatgcaccaccacacccagctaattttgtatttttagtagaggcagggtttctccatgttggtcaggctggtcttgaactcccgacctcaggtgatccgcccacctaggcctctcaaagtgttgggattacgtgtgtaagccacagtgcccagcccgaattggatatctttaagatatctgtaagtgttatatccctaaccaagaagaaaaatatgaaaataattaagactagaatcaagcagtagataattgaatccaatcttgggtattattagataatgtataacttgcacccagggaatgggggtctatgagacaaccccacttggagaagaatggggttagggtctctaattgcaaagtgactgtacaataggacgaaagttgcctctgtgtctgagaaagtatcttagttgttggctgctccagaggtatctttgtcaaaagcttctggttcaatatcagccactgagcagataaccctgcttatttggtgtggttaaatcaactagcttctgctaatagccccaatttgcttgaatgggaaaactctctcatttgacccttataggtagaaataatgaattaacaaccaataaaattaatcatttggcattaa

SEQ ID NO: 642 - protein, 1037 aa, Homo sapiens
MATESTPSEIIERERKKLLEILQHDPDSILDTLTSRRLISEEEYETLENVTDLLKKSRKLLILVQKKGEATCQHFLKCLFSTFPQSAAICGLRHEVLKHENTVPPQSMGASSNSEDAFSPGIKQPEAPEITVFFSEKEHLDLETSEFFRDKKTSYRETALSARKNEKEYDTPEVTLSYSVEKVGCEVPATITYIKDGQRYEELDDSLYLGKEEYLGSVDTPEDAEATVEEEVYDDPEHVGYDGEEDFENSETTEFSGEEPSYEGSETSLSLEEEQEKSIEERKKVFKDVLLCLNMDRSRKVLPDFVKQFSLDRGCKWTPESPGDLAWNFLMKVQARDVTARDSILSHKVLDEDSKEDLLAGVENLEIRDIQTINPLDVLCATMLCSDSSLQRQVMSNMYQCQFALPLLLPDAENNKSILMLGAMKDIVKKQSTQFSGGPTEDTEKFLTLMKMPVISFVRLGYCSFSKSRILNTLLSPAQLKLHKIFLHQDLPLLVLPRQISDGLVEITWCFPDSDDRKENPFFQKPVALANLRGNLESFWTQFGFLMEVSSAVFFFTDCLGEKEWDLLMFLGEAAIERCYFVLSSQARESEEAQIFQRILNLKPAQLLFWERGDAGDRRKNMEGLQAALQEVMFSSCLRCVSVEDMAALARELGIQVDEDFENTQRIQVSSGENMAGTAEGEGQQRHSQLKSSSKSQALMPIQEPGTQCELSQNLQNLYGTPVFRPVLENSWLFPTRIGGNFNHVSLKASWVMGRPFGSEQRPKWFHPLPFQNAGAQGRGKSFGIQSFHPQIFYSGERFMKFSRVARGCHSNGTFGRLPRPICQHVQACPERPQMMGTLERSRAVASKIGHSYSLDSQPARAVGKPWPQQACTRVTELTEATGKLIRTSHIGKPHPQSFQPAAATQKLRPASQQGVQMKTQGGASNPALQIGSHPMCKSSQFKSDQSNPSTVKHSQPKPFHSVPSQPKSSQTKSCQSQPSQTKPSPCKSTQPKPSQPWPPQSKPSQPRPPQPKSSSTNPSQAKAHHSKAGQKRGGKH

SEQ ID NO: 643 - DNA, 4034 bp, Homo sapiens
agggagaggcagagaggcaggcagcctgctgggctcttcctgctgttgaaaacttacccggcccttacagaggaaatcttcctcctctcttctgccctgaatgttttcccaaacatgaaggtgataagcttattcattttggtgggatttataggagagttccaaagtttttcaagtgcctcctctccagtcaactgccagtgggacttctatgccccttggtcagaatgcaatggctgtaccaagactcagactcgcaggcggtcagttgctgtgtatgggcagtatggaggccagccttgtgttggaaatgcttttgaaacacagtcctgtgaacctacaagaggatgtccaacagaggagggatgtggagagcgtttcaggtgcttttcaggtcagtgcatcagcaaatcattggtttgcaatggggattctgactgtgatgaagacagtgctgatgaagacagatgtgaggactcagaaaggagaccttcctgtgatatcgataaacctcctcctaacatagaacttactggaaatggttacaatgaactcactggccagtttaggaacagagtcatcaataccaaaagttttggtggtcaatgtagaaaggtgtttagtggggatggaaaagatttctacaggctgagtggaaatgtcctgtcctatacattccaggtgaaaataaataatgattttaattatgaattttacaatagtacttggtcttatgtaaaacatacgtcgacagaacacacatcatctagtcggaagcgctccttttttagatcttcatcatcttcttcacgcagttatacttcacataccaatgaaatccataaaggaaagagttaccaactgctggttgttgagaacactgttgaagtggctcagttcattaataacaatccagaatttttacaacttgctgagccattctggaaggagctttcccacctcccctctctgtatgactacagtgcctaccgaagattaatcgaccagtacgggacacattatctgcaatctgggtcgttaggaggagaatacagagttctattttatgtggactcagaaaaattaaaacaaaatgattttaattcagtcgaagaaaagaaatgtaaatcctcaggttggcattttgtcgttaaattttcaagtcatggatgcaaggaactggaaaacgctttaaaagctgcttcaggaacccagaacaatgtattgcgaggagaaccgttcatcagagggggaggtgcaggcttcatatctggccttagttacctagagctggacaatcctgctggaaacaaaaggcgatattctgcctgggcagaatctgtgactaatcttcctcaagtcataaaacaaaagctgacacctttatatgagctggtaaaggaagtaccttgtgcctctgtgaaaaaactatacctgaaatgggctcttgaagagtatctggatgaatttgacccctgtcattgccggccttgtcaaaatggtggtttggctactgttgaggggacccattgtctgtgccattgcaaaccgtacacatttggtgcggcgtgtgagcaaggagtcctcgtagggaatcaagcaggaggggttgatggaggttggagttgctggtcctcttggagcccctgtgtccaagggaagaaaacaagaagccgtgaatgcaataacccacctcccagtgggggtgggagatcctgcgttggagaaacgacagaaagcacacaatgcgaagatgaggagctggagcacttgaggttgcttgaaccacattgctttcctttgtctttggttccaacagaattctgtccatcacctcctgccttgaaagatggatttgttcaagatgaaggtacaatgtttcctgtggggaaaaatgtagtgtacacttgcaatgaaggatactctcttattggaaacccagtggccagatgtggagaagatttacggtggcttgttggggaaatgcattgtcagaaaattgcctgtgttctacctgtactgatggatggcatacagagtcacccccaaaaacctttctacacagttggtgagaaggtgactgtttcctgttcaggtggcatgtccttagaaggtccttcagcatttctctgtggctccagccttaagtggagtcctgagatgaagaatgcccgctgtgtacaaaaagaaaatccgttaacacaggcagtgcctaaatgtcagcgctgggagaaactgcagaattcaagatgtgtttgtaaaatgccctacgaatgtggaccttccttggatgtatgtgctcaagatgagagaagcaaaaggatactgcctctgacagtttgcaagatgcatgttctccactgtcagggtagaaattacacccttactggtagggacagctgtactctgcctgcctcagctgagaaagcttgtggtgcctgcccactgtggggaaaatgtgatgctgagagcagcaaatgtgtctgccgagaagcatcggagtgcgaggaagaagggtttagcatttgtgtggaagtgaacggcaaggagcagacgatgtctgagtgtgaggcgggcgctctgagatgcagagggcagagcatctctgtcaccagcataaggccttgtgctgcggaaacccagtaggctcctggaggccctggtcagcttgcttggaatccagcaggcagctggggctgagtgaaaacatctgcacaactgggcactggacagcttttccttcttctccagtgtctaccttcctcctcaactcccagccatctgtataaacacaatcctttgttctcccaaatctgaatcgaattactcttttgcctcctttttaatgtcagtaaggatatgagcctttgcacaggctggctgcgtgttcttgaaataggtgttaccttctctgggccttggttttttaaaatctgtaaaattagaggattgcactagagaaacttgaatgctccattcaggcctatcattttattaagtatgattgacacagcccatgggccagaacacactctacaaaatgactaggataacagaaagaacgtgatctcctgattagagagggtggttttcctcaatggaaccaaatataaagaggacttgaacaaaaatgacagatacaaactatttctatcctgagtagtaatctcacacttcatcctatagagtcaaccaccacagataggaattccttattctttttttaatttttttaagacagagtctcactttgttgcccaggctggagcgcagtggggtgatctcatctccctgcaacctccgcctcctgggttcaagcgattcttgtgcctcagcttcccaagcagctgggattacaggtgcccgccaccacgcccagctaatttttgcatttttagtagagatggggtttcaccatgttggccacgctcgtctccaactcctgacctcaggtaatccgcctgccttggcctcccaaagtgctgggattacagacatgaaccaccacgcctggctggaatacttactcttgtcgggagattgaaccactaaaatgttagagcagaattcattatgctgtggtcacaggggtgtcttgtctgagaacaaatacaattcagtcttctctttggggttttagtatgtgtcaaacataggactggaagtttgcccctgttcttttttcttttgaaagaacatcagttcatgcctgaggcatgagtgactgtgcatttgagaatagttttccctattctgtggatacagtcccagagttttcagggagtacacaggtagattagtttgaagcattgaccttttatttattccttatttctctttcatcaaaacaaaacagcagctgtgggaggagaaatgagagggcttaaatgaaatttaaaataagctatattatacaaatactatctctgtattgttctgaccctggtaaatatatttcaaaacttcagatgacaaggattagaacactcattaaagatgctattcttcagaaaaaaaaaaaaaaaaaaaaaaaa

SEQ ID NO: 644 - protein, 843 aa, Homo sapiens
MKVISLFILVGFIGEFQSFSSASSPVNCQWDFYAPWSECNGCTKTQTRRRSVAVYGQYGGQPCVGNAFETQSCEPTRGCPTEEGCGERFRCFSGQCISKSLVCNGDSDCDEDSADEDRCEDSERRPSCDIDKPPPNIELTGNGYNELTGQFRNRVINTKSFGGQCRKVFSGDGKDFYRLSGNVLSYTFQVKINNDFNYEFYNSTWSYVKHTSTEHTSSSRKRSFFRSSSSSSRSYTSHTNEIHKGKSYQLLVVENTVEVAQFINNNPEFLQLAEPFWKELSHLPSLYDYSAYRRLIDQYGTHYLQSGSLGGEYRVLFYVDSEKLKQNDFNSVEEKKCKSSGWHFVVKFSSHGCKELENALKAASGTQNNVLRGEPFIRGGGAGFISGLSYLELDNPAGNKRRYSAWAESVTNLPQVIKQKLTPLYELVKEVPCASVKKLYLKWALEEYLDEFDPCHCRPCQNGGLATVEGTHCLCHCKPYTFGAACEQGVLVGNQAGGVDGGWSCWSSWSPCVQGKKTRSRECNNPPPSGGGRSCVGETTESTQCEDEELEHLRLLEPHCFPLSLVPTEFCPSPPALKDGFVQDEGTMFPVGKNVVYTCNEGYSLIGNPVARCGEDLRWLVGEMHCQKIACVLPVLMDGIQSHPQKPFYTVGEKVTVSCSGGMSLEGPSAFLCGSSLKWSPEMKNARCVQKENPLTQAVPKCQRWEKLQNSRCVCKMPYECGPSLDVCAQDERSKRILPLTVCKMHVLHCQGRNYTLTGRDSCTLPASAEKACGACPLWGKCDAESSKCVCREASECEEEGFSICVEVNGKEQTMSECEAGALRCRGQSISVTSIRPCAAETQ

SEQ ID NO: 645 - DNA, 1722 bp, Homo sapiens
gtccaccatcatccttcgggctcatttaacacttactatttctatactgtaaatggcaacaagattttccctacctcaacctgactttgagcaggagctgttgctggctaagcagcctgaacaattcacatgctcagacgcttgtgcttttttcacatggcccctccaggacacctctgcactgggctgcagctgcagggaaggccgaatgtgtccagtcactgctggagttgggaatggacagcaacctgcgggacatcaatgagagcacgcccttggcctatgccctgtactgcggtcacacggcgtgtgtcaaactcctctcccaagagagcagaacagagcctactcgaccccctccctcccagagcagtcggccccagaagaaggagagacggttcaacgtgctcaaccaaatattctgcaaaaacaagaaagaagagcagagagcccatcagaaggatcccagcagggaccgatacagagaggaggacacctcagaagtcaatgacatcatcaccacctttgatagcatcgtgggtaccaactgccaagaacagcctggtgatcaggtggctatggttgaatttaagaagaaaacctcagacaattcaaaatatctcttaccagaaaagaaaccgctggcccgtaaggggcttccaccaatcagaacgcagagtctcccacccatcaccctgggcaataacttcctaacagcctcccatagggccacttcccatgcaggcctgagctctgctcctcatcatatggcccagcgatctcagaaaagtcgaagtgagcaggatttattaaataacagaactggctgccagatgttactagataacccctggaagagtgattctaatcaggtattttcctacaaagtttggactgtgtcttcttctgataagctgctggacagattgctcagtgtccggcctggtcaccaagaggtctccgtgccaccacaccttcgccatctacataatccatcatcaggacaaaattttcagcatctttccccaaacagacacaaaatcagggatcttcctttcactcggaacaacctagctcccctaccagatcaaaaatttctatctggagaacctctgcggacaaaccgagtgcttcctgcaattccaagtcaacgaagacacagcacagcagcagaagagagtgaacattctgccaaccccaccagtgatgaaaattaactgtgggccactcgctgcagaaatgtagatgaatatgtattttcaactctcaaaggacaagattactccagtttgtaagaacgaagaccaatttagtaagctgcattctataagccatcagttttataactcgaaattctttattccaaataaagatactccctaaataagcacttagaatatttgggtgtgcatattaagtctgtgaatttctgtgacttccacatgccaaaattaaaagacaaaatatgttatcagtaggaaaactgagctatgtttggtttgctttgtggcatgtgcactgtttttttgttattgttctttggttgtttttttgctgaatgattttatgttttgggaaaaaaagtacgctttgctgaataaaagcaaaaaacaaaacaaaaaaaaaaccacatcccagacaaacatgtcttcacatttattgtcattctaacttgaactaatgaaacctatttaaaaataaattcctatgatcagtcacaaa

SEQ ID NO: 646 - protein, 326 aa, Homo sapiens
MDSNLRDINESTPLAYALYCGHTACVKLLSQESRTEPTRPPPSQSSRPQKKERRFNVLNQIFCKNKKEEQRAHQKDPSRDRYREEDTSEVNDIITTFDSIVGTNCQEQPGDQVAMVEFKKKTSDNSKYLLPEKKPLARKGLPPIRTQSLPPITLGNNFLTASHRATSHAGLSSAPHHMAQRSQKSRSEQDLLNNRTGCQMLLDNPWKSDSNQVFSYKVWTVSSSDKLLDRLLSVRPGHQEVSVPPHLRHLHNPSSGQNFQHLSPNRHKIRDLPFTRNNLAPLPDQKFLSGEPLRTNRVLPAIPSQRRHSTAAEESEHSANPTSDEN

SEQ ID NO: 647 - DNA, 2502 bp, Homo sapiens
acatgctctgtctggccctgtgaatcctcactcacccattcagatttctgttggtgtaaagcgacattccagctgctgaagctccgtgatctgctgtgtttttccagcccagatccaagagacctggatgctttttgccattctgatggtaaatgatgagacaggctaccatggatttcagcaccccttctgtgtttgatcagcaaagaggtgactcatctgaggaagttgacctgaccatggtttatcaagcagcctctaatggagatgtcaatgctctgactgcagtgattcgggaagacccttctatcctagaatgctgtgacagtgaaggatgcacgcccttgatgcatgcggtttctggacgtcaagcggacacagtgaagctgctgttgaagatgggagccaatattaacatgcaggatgcttatggccgcacaagtttatgcctggccacctacctgggctggcttgaaggctgtgtgagtctactcagaaacggtgccaagcacaatatcccagataaaaatggccgcctgccactgcatgctgccactgctgagcccgatatgaggctcctcacggtcctgttgcaacagtcgaacatcagcgagattaatcaccaggacaatgagggaatgacaccactccactgggcggctttccacaaccagcctcaacacacacaaatgctgctgaagaagggggcagaccccacccttgtggataaagactttaaaaccgctctccactgggcagtccagagtggaaataggattctgtgctccatcattctgagccatcaccaggggccgtccataatcaactatgatgatgagagtgggaagacatgtgtacatatcgcagcggcagcgggcttcagcgatattattcatgagctggcaagagtccctgagtgtaacctgcaggctctggatgtggatgacaggacacctctgcactgggctgcagctgcagggaaggccgaatgtgtccagtcactgctggagttgggaatggacagcaacctgcgggacatcaatgagagcacgcccttggcctatgccctgtactgcggtcacacggcgtgtgtcaaactcctctcccaagagagcagaacagagcctactcgaccccctccctcccagagcagtcggccccagaagaaggagagacggttcaacgtgctcaaccaaatattctgcaaaaacaagaaagaagagcagagagcccatcagaaggatcccagcagggaccgatacagagaggaggacacctcagaagtcaatgacatcatcaccacctttgatagcatcgtgggtaccaactgccaagaacagcctggtgatcaggtggctatggttgaatttaagaagaaaacctcagacaattcaaaatatctcttaccagaaaagaaaccgctggcccgtaaggggcttccaccaatcagaacgcagagtctcccacccatcaccctgggcaataacttcctaacagcctcccatagggccacttcccatgcaggcctgagctctgctcctcatcatatggcccagcgatctcagaaaagtcgaagtgagcaggatttattaaataacagaactggctgccagatgttactagataacccctggaagagtgattctaatcaggtattttcctacaaagtttggactgtgtcttcttctgataagctgctggacagattgctcagtgtccggcctggtcaccaagaggtctccgtgccaccacaccttcgccatctacataatccatcatcaggacaaaattttcagcatctttccccaaacagacacaaaatcagggatcttcctttcactcggaacaacctagctcccctaccagatcaaaaatttctatctggagaacctctgcggacaaaccgagtgcttcctgcaattccaagtcaacgaagacacagcacagcagcagaagagagtgaacattctgccaaccccaccagtgatgaaaattaactgtgggccactcgctgcagaaatgtagatgaatatgtattttcaactctcaaaggacaagattactccagtttgtaagaacgaagaccaatttagtaagctgcattctataagccatcagttttataactcgaaattctttattccaaataaagatactccctaaataagcacttagaatatttgggtgtgcatattaagtctgtgaatttctgtgacttccacatgccaaaattaaaagacaaaatatgttatcagtaggaaaactgagctatgtttggtttgctttgtggcatgtgcactgtttttttgttattgttctttggttgtttttttgctgaatgattttatgttttgggaaaaaaagtacgctttgctgaataaaagcaaaaaacaaaacaaaaaaaaaaccacatcccagacaaacatgtcttcacatttattgtcattctaacttgaactaatgaaacctatttaaaaataaattcctatgatcagtcacaaa

SEQ ID NO: 648 - protein, 614 aa, Homo sapiens
MMRQATMDFSTPSVFDQQRGDSSEEVDLTMVYQAASNGDVNALTAVIREDPSILECCDSEGCTPLMHAVSGRQADTVKLLLKMGANINMQDAYGRTSLCLATYLGWLEGCVSLLRNGAKHNIPDKNGRLPLHAATAEPDMRLLTVLLQQSNISEINHQDNEGMTPLHWAAFHNQPQHTQMLLKKGADPTLVDKDFKTALHWAVQSGNRILCSIILSHHQGPSIINYDDESGKTCVHIAAAAGFSDIIHELARVPECNLQALDVDDRTPLHWAAAAGKAECVQSLLELGMDSNLRDINESTPLAYALYCGHTACVKLLSQESRTEPTRPPPSQSSRPQKKERRFNVLNQIFCKNKKEEQRAHQKDPSRDRYREEDTSEVNDIITTFDSIVGTNCQEQPGDQVAMVEFKKKTSDNSKYLLPEKKPLARKGLPPIRTQSLPPITLGNNFLTASHRATSHAGLSSAPHHMAQRSQKSRSEQDLLNNRTGCQMLLDNPWKSDSNQVFSYKVWTVSSSDKLLDRLLSVRPGHQEVSVPPHLRHLHNPSSGQNFQHLSPNRHKIRDLPFTRNNLAPLPDQKFLSGEPLRTNRVLPAIPSQRRHSTAAEESEHSANPTSDEN

SEQ ID NO: 649 - DNA, 7783 bp, Homo sapiens
aatacttgttgcaataattgcccacgatagctgctcaaacaagagagttggaattcatctgtaaaaatcactacatgtaacgtaggagacaagaaaaatattaatgacagaagatctgcgaacatgatgcacgtgaataattttccctttagaaggcattcctggatatgttttgatgtggacaatggcacatctgcgggacggagtcccttggatcccatgaccagcccaggatccgggctaattctccaagcaaattttgtccacagtcaacgacgggagtccttcctgtatcgatccgacagcgattatgacctctctccaaagtctatgtcccggaactcctccattgccagtgatatacacggagatgacttgattgtgactccatttgctcaggtcttggccagtctgcgaactgtacgaaacaactttgctgcattaactaatttgcaagatcgagcacctagcaaaagatcacccatgtgcaaccaaccatccatcaacaaagccaccataacagaggaggcctaccagaaactggccagcgagaccctggaggagctggactggtgtctggaccagctagagaccctacagaccaggcactccgtcagtgagatggcctccaacaagtttaaaaggatgcttaatcgggagctcacccatctctctgaaatgagtcggtctggaaatcaagtgtcagagtttatatcaaacacattcttagataagcaacatgaagtggaaattccttctccaactcagaaggaaaaggagaaaaagaaaagaccaatgtctcagatcagtggagtcaagaaattgatgcacagctctagtctgactaattcaagtatcccaaggtttggagttaaaactgaacaagaagatgtccttgccaaggaactagaagatgtgaacaaatggggtcttcatgttttcagaatagcagagttgtctggtaaccggcccttgactgttatcatgcacaccatttttcaggaacgggatttattaaaaacatttaaaattccagtagatactttaattacatatcttatgactctcgaagaccattaccatgctgatgtggcctatcacaacaatatccatgctgcagatgttgtccagtctactcatgtgctattatctacacctgctttggaggctgtgtttacagatttggagattcttgcagcaatttttgccagtgcaatacatgatgtagatcatcctggtgtgtccaatcaatttctgatcaatacaaactctgaacttgccttgatgtacaatgattcctcagtcttagagaaccatcatttggctgtgggctttaaattgcttcaggaagaaaactgtgacattttccagaatttgaccaaaaaacaaagacaatctttaaggaaaatggtcattgacatcgtacttgcaacagatatgtcaaaacacatgaatctactggctgatttgaagactatggttgaaactaagaaagtgacaagctctggagttcttcttcttgataattattccgataggattcaggttcttcagaatatggtgcactgtgcagatctgagcaacccaacaaagcctctccagctgtaccgccagtggacggaccggataatggaggagttcttccgccaaggagaccgagagagggaacgtggcatggagataagccccatgtgtgacaagcacaatgcttccgtggaaaaatcacaggtgggcttcatagactatattgttcatcccctctgggagacatgggcagacctcgtccaccctgacgcccaggatattttggacactttggaggacaatcgtgaatggtaccagagcacaatccctcagagcccctctcctgcacctgatgacccagaggagggccggcagggtcaaactgagaaattccagtttgaactaactttagaggaagatggtgagtcagacacggaaaaggacagtggcagtcaagtggaagaagacactagctgcagtgactccaagactctttgtactcaagactcagagtctactgaaattccccttgatgaacaggttgaagaggaggcagtaggggaagaagaggaaagccagcctgaagcctgtgtcatagatgatcgttctcctgacacgtaacagtgcaaaaactttcatgccttttttttttttaagtagaaaaattgtttccaaagtgcatgtcacatgccacaaccacggtcacacctcactgtcatctgccaggacgtttgttgaacaaaactgaccttgactactcagtccagcgctcaggaatatcgtaaccagttttttcacctccatgtcatccgagcaaggtggacatcttcacgaacagcgtttttaacaagatttcagcttggtagagctgacaaagcagataaaatctactccaaattattttcaagagagtgtgactcatcaggcagcccaaaagtttattggacttggggtttctattcctttttatttgtttgcaatattttcagaagaaaggcattgcacagagtgaacttaatggacgaagcaacaaatatgtcaagaacaggacatagcacgaatctgttaccagtaggaggaggatgagccacagaaattgcataattttctaatttcaagtcttcctgatacatgactgaatagtgtggttcagtgagctgcactgacctctacattttgtatgatatgtaaaacagattttttgtagagcttacttttattattaaatgtattgaggtattatatttaaaaaaaactatgttcagaacttcatctgccactggttatttttttctaaggagtaacttgcaagttttcagtacaaatctgtgctacactggataaaaatctaatttatgaattttacttgcaccttatagttcatagcaattaactgatttgtagtgattcattgtttgttttatataccaatgacttccatattttaaaagagaaaaacaactttatgttgcaggaaaccctttttgtaagtctttattatttactttgcattttgtttcactctttccagataagcagagttgctcttcaccagtgtttttcttcatgtgcaaagtgactatttgttctataatacttttatgtgtgttatatcaaatgtgtcttaagcttcatgcaaactcagtcatcagttcgtgttgtctgaagcaagtgggagatatataaatacccagtagctaaaatggtcagtcttttttagatgttttcctacttagtatctcctaataacgttttgctgtgtcactagatgttcatttcacaagtgcatgtctttctaataatccacacatttcatgctctaataatccacacatttcatgctcatttttattgtttttacagccagttatagtaagaaaaaggtttttccccttgtgctgctttataatttagcgtgtgtctgaaccttatccatgtttgctagatgaggtcttgtcaaatatatcactaccattgtcaccggtgaaaagaaacaggtagttaagttagggttaacattcatttcaaccacgaggttgtatatcatgactagcttttactcttggtttacagagaaaagttaaacagccaactaggcagtttttaagaatattaacaatatattaacaaacaccaatacaactaatcctatttggttttaatgatttcaccatgggattaagaactatatcaggaacatccctgagaaacggttttaagtgtagcaactactcttccttaatggacagccacataacgtgtaggaagtcctttatcacttatcctcgatccataagcatatcttgcagaggggaactacttctttaaacacatggagggaaagaagatgatgccactggcaccagagggttagtactgtgatgcatcctaaaatatttattatattggtaaaaattctggttaaataaaaaattagagatcactcttggctgatttcagcaccaggaactgtattacagttttagagattaattcctagtgtttacctgattatagcagttggcatcatggggcatttaattctgactttatccccacgtcagccttaataaagtcttctttaccttctctatgaagactttaaagcccaaataatcatttttcacattgatattcaagaattgagatagatagaagccaaagtgggtatctgacaagtggaaaatcaaacgtttaagaagaattacaactctgaaaagcatttatatgtggaacttctcaaggagcctcctggggactggaaagtaagtcatcagccaggcaaatgactcatgctgaagagagtccccatttcagtcccctgagatctagctgatgcttagatcctttgaaataaaaattatgtctttataactctgatcttttacataaagcagaagaggaatcaactagttaattgcaaggtttctactctgtttcctctgtaaagatcagatggtaatctttcaaataagaaaaaaataaagacgtatgtttgaccaagtagtttcacaagaatatttgggaacttgtttcttttaattttatttgtccctgagtgaagtctagaaagaaaggtaaagagtctagagtttattcctctttccaaaacattctcattcctctcctccctacacttagtatttcccccacagagtgcctagaatcttaataatgaataaaataaaaagcagcaatatgtcattaacaaatccagacctgaaagggtaaagggtttataactgcactaataaagagaggctctttttttttcttccagtttgttggtttttaatggtaccgtgttgtaaagatacccactaatggacaatcaaattgcagaaaaggctcaatatccaagagacagggactaatgcactgtacaatctgcttatccttgcccttctctcttgccaaagtgtgcttcagaaatatatactgctttaaaaaagaataaaagaatatccttttacaagtggctttacatttcctaaaatgccataagaaaatgcaatatctgggtactgtatggggaaaaaaatgtccaagtttgtgtaaaaccagtgcatttcagcttgcaagttactgaacacaataatgctgttttaattttgttttatatcagttaaaattcacaataatgtagatagaacaaattacagacaaggaaagaaaaaacttgaatgaaatggattttacagaaagctttatgataatttttgaatgcattatttattttttgtgccatgcattttttttctcaccaaatgaccttacctgtaatacagtcttgtttgtctgtttacaaccatgtatttattgcaatgtacatactgtaatgttaattgtaaattatctgttcttattaaaacatcatcccatgatgggatggtgttgatatatttggaaactcttggtgagagaatgaatggtgtgtatacatactctgtacatttttcttttctcctgtaatatagtcttgtcaccttagagcttgtttatggaagattcaagaaaactataaaatacttaaagatatataaatttaaaaaaacatagctgcaggtctttggtcccagggctgtgccttaactttaaccaatattttcttctgttttgctgcatttgaaaggtaacagtggagctagggctgggcattttacatccaggcttttaattgattagaattctgccaataggtggattttacaaaaccacagacaacctctgaaagattctgagacccttttgagacagaagctcttaagtacttcttgccagggagcagcactgcatgtgtgatggttgtttgccatctgttgatcaggaactacttcagctacttgcatttgattatttcctttttttttttttttaactcggaaacacaactggggaaatatattctttcccagtgattataaacaatctttttcttttttttaagtccttttggcttctagagctcataggaaaatggacttgatttgaaattggagccagagtttactcgtgttggttatctattcatcagcttcctgacatgttaagagaatacattaaagagaaaatactgttttttaatcctaaaatttttcttccactaagataaaccaaatgtccttacatatatgtaaacccatctatttaaacgcaaaggtgggttgatgtcagtttacatagcagaaagcattcactatcctctaagatttgtttctgcaaaactttcattgctttagaattttaaaatttcaccttgtacaatggccagcccctaaagcaggaaacatttataatggattatatggaaacatcctcccagtacttgcccagcccttgaatcatgtggcttttcagtgaaaggaaagattctttttctaggaaaaatgagcctattttattttattttattttattttttgacacaaactgtagattttagcagccctggcccaaaggaatttgattacttttgttttaaacagtacaaaggggacactataattacaaaaacatccttaactgatttgagttgtttttatttctttggatatattttcagagtggtaaattgtgtgtgagaattacaaatgattattcttttagtggtttcttagcctctcttacagcccacggggatagtactgtacatcaataccttcatatgaaatttttatatgcaatgaaaataaaagcatgggttgattctgcctatttatgactcaatcttttacaaataaaagattattcattttaaattatagttcaatcagcatgtctcttaggatactgaacgtggttgaaatgaaaggatagtgacatcataagttagtactgatattcataaccaaataaagccaacttgagtaattttgctacattaaaaattaccaaaattacttagatggcctataagattaagcatggtgttttctaagcaagctttgaaaggggccttccatacttacttaattgaatattctgggatattgaaaattattcagatacttgacaattatttttggttacctactccgcaaactacaaagttttaaggactcaacaataagttaatgagacacagtgtttgctttcatggagcttacagtctggaggggacaaaggcttaaacaatactcatataattatatatgtgatcagtacaatgaaggagctcagtggggtaaataagcaggaacctgaacttgatctgttccggagggccacagaaggcttccttgaggccttgagaaagtgatttgcatctgagttctgaaggattgtaagaggtaactagggaaaaagttgacaggaagaggaaggggatccagacaagaaacatttgcaaagatcttgaggcataaatgagcttgagacatctggagaaactgaggaaaagtgagagagtaggcagggcctggagccgcagagccattgctaaccatcctgtgtgagatatcccccattctgtagctttattctcataaccctgctcaattttctttataacacttctcacagatttatatacgtgtttgtttttgttatctgtctctcccaccagaccacagctccatgagagcaaggtctttgcttaccaatatatcactagcacttaaaactatgcctggtacacagtaggttcttaatatgtgttgaatatagccatcaaattgatattggatataattcaatctgataagatattttgagatattaaagagtttttaacttgataccataaaaaaaaaaaaaaaaa

SEQ ID NO: 650 - protein, 673 aa, Homo sapiens
MMHVNNFPFRRHSWICFDVDNGTSAGRSPLDPMTSPGSGLILQANFVHSQRRESFLYRSDSDYDLSPKSMSRNSSIASDIHGDDLIVTPFAQVLASLRTVRNNFAALTNLQDRAPSKRSPMCNQPSINKATITEEAYQKLASETLEELDWCLDQLETLQTRHSVSEMASNKFKRMLNRELTHLSEMSRSGNQVSEFISNTFLDKQHEVEIPSPTQKEKEKKKRPMSQISGVKKLMHSSSLTNSSIPRFGVKTEQEDVLAKELEDVNKWGLHVFRIAELSGNRPLTVIMHTIFQERDLLKTFKIPVDTLITYLMTLEDHYHADVAYHNNIHAADVVQSTHVLLSTPALEAVFTDLEILAAIFASAIHDVDHPGVSNQFLINTNSELALMYNDSSVLENHHLAVGFKLLQEENCDIFQNLTKKQRQSLRKMVIDIVLATDMSKHMNLLADLKTMVETKKVTSSGVLLLDNYSDRIQVLQNMVHCADLSNPTKPLQLYRQWTDRIMEEFFRQGDRERERGMEISPMCDKHNASVEKSQVGFIDYIVHPLWETWADLVHPDAQDILDTLEDNREWYQSTIPQSPSPAPDDPEEGRQGQTEKFQFELTLEEDGESDTEKDSGSQVEEDTSCSDSKTLCTQDSESTEIPLDEQVEEEAVGEEEESQPEACVIDDRSPDT

SEQ ID NO: 651 - DNA, 7289 bp, Homo sapiens
gctgcaattcaagttggctgggggccggtagtgagatctagggctacttcaacaaaactttgctgcccttcctgctcctcttgtcttcttttctcctgataccttttgatgctctgcacatgttatttgcatagcaaaggcactaagctttccaggaagagagggcaccacttccacccccaataagtcttttttcccgtcttttctttcttttcctttccttttttggggggtggggagggagagaaagggggtttgcaaaggcagcatctcagagtgatagcctagatgtattgaaggcatctcttattctgccaaatcggaaagtcagttctctaaagcccgggttagccagaccatagggttttattctggctgcagaataactggctggtgtggctttgcaaaggggggcaaaaaataaaaaaataaaaaaaattaaaaaaagttagagaggagagggagtacgtgagtcgtccagtgcaatctctattgtctgaaacttactttttatcagaatttgaagatgaaaacggttaaaaaatggccatactttagtaactaatcagcctaatgctttgcttatgaaaacttttaccatcattatttttttcattttggattgagaaaatgaatccagatatagaagaaagtgcaggatgttggataaaagtggctcttaaacagtggaacatccaataactaatttgcaagaagttttaaagaaataaaattgttatgcttcgattttggtatggtattgactctttagcacataggtagccctcaaaaaaatcatccagttttctaaattatggaaattttgtggaagacgttgacctggattttgagcctcatcatggcttcatcggaatttcatagtgaccacaggctttcatacagttctcaagaggaattcctgacttatcttgaacactaccagctaactattccaataagggttgatcaaaatggagcatttctcagctttactgtgaaaaatgataaacactcaaggagaagacggagtatggaccctattgatccacagcaggcagtatctaagttattttttaaactttcagcctatggcaagcactttcatctaaacttgactctcaacacagattttgtgtccaaacattttacagtagaatattgggggaaagatggaccccagtggaaacatgattttttagacaactgtcattacacaggatatttgcaagatcaacgtagtacaactaaagtggctttaagcaactgtgttgggttgcatggtgttattgctacagaagatgaagagtattttatcgaacctttaaagaataccacagaggattccaagcattttagttatgaaaatggccaccctcatgttatttacaaaaagtctgcccttcaacaacgacatctgtatgatcactctcattgtggggtttcggatttcacaagaagtggcaaaccttggtggctgaatgacacatccactgtttcttattcactaccaattaacaacacacatatccaccacagacagaagagatcagtgagcattgaacggtttgtggagacattggtagtggcagacaaaatgatggtgggctaccatggccgcaaagacattgaacattacattttgagtgtgatgaatattgttgccaaactttaccgtgattccagcctaggaaacgttgtgaatattatagtggcccgcttaattgttctcacagaagatcagccaaacttggagataaaccaccatgcagacaagtccctcgatagcttctgtaaatggcagaaatccattctctcccaccaaagtgatggaaacaccattccagaaaatgggattgcccaccacgataatgcagttcttattactagatatgatatctgcacttataaaaataagccctgtggaacactgggcttggcctctgtggctggaatgtgtgagcctgaaaggagctgcagcattaatgaagacattggcctgggttcagcttttaccattgcacatgagattggtcacaattttggtatgaaccatgatggaattggaaattcttgtgggacgaaaggtcatgaagcagcaaaacttatggcagctcacattactgcgaataccaatcctttttcctggtctgcttgcagtcgagactacatcaccagctttctagattcaggccgtggtacttgccttgataatgagcctcccaagcgtgactttctttatccagctgtggccccaggtcaggtgtatgatgctgatgagcaatgtcgtttccagtatggagcaacctcccgccaatgtaaatatggggaagtgtgtagagagctctggtgtctcagcaaaagcaaccgctgtgtcaccaacagtattccagcagctgaggggacactgtgtcaaactgggaatattgaaaaagggtggtgttatcagggagattgtgttccttttggcacttggccccagagcatagatgggggctggggtccctggtcactatggggagagtgcagcaggacctgcgggggaggcgtctcctcatccctaagacactgtgacagtccagcaccttcaggaggtggaaaatattgccttggggaaaggaaacggtatcgctcctgtaacacagatccatgccctttgggttcccgagattttcgagagaaacagtgtgcagactttgacaatatgcctttccgaggaaagtattataactggaaaccctatactggaggtggggtaaaaccttgtgcattaaactgcttggctgaaggttataatttctacactgaacgtgctcctgcggtgatcgatgggacccagtgcaatgcggattcactggatatctgcatcaatggagaatgcaagcacgtaggctgtgataatattttgggatctgatgctagggaagatagatgtcgagtctgtggaggggacggaagcacatgtgatgccattgaagggttcttcaatgattcactgcccaggggaggctacatggaagtggtgcagataccaagaggctctgttcacattgaagttagagaagttgccatgtcaaagaactatattgctttaaaatctgaaggagatgattactatattaatggtgcctggactattgactggcctaggaaatttgatgttgctgggacagcttttcattacaagagaccaactgatgaaccagaatccttggaagctctaggtcctacctcagaaaatctcatcgtcatggttctgcttcaagaacagaatttgggaattaggtataagttcaatgttcccatcactcgaactggcagtggagataatgaagttggctttacatggaatcatcagccttggtcagaatgctcagctacttgtgctggaggtgtccaaagacaggaggtggtctgtaaaaggttggatgacaactccattgtccagaacaattactgtgatcctgacagtaagccacctgaaaatcaaagagcctgcaacactgagccctgcccacctgagtggttcattggggattggttggaatgcagcaagacttgtgatggtgggatgcgcacaagggcagtgctctgcatcaggaagatcggaccttctgaggaggagacgctggactacagtggttgtttaacacaccggcctgtcgaaaaagagccctgcaacaaccagtcatgtccaccacagtgggtggctttggactggtctgagtgtactccaaaatgtggtccaggattcaagcatcggattgttctgtgcaagagcagtgacctttctaagacattcccagctgcacaatgtccagaggaaagcaaacctcctgtccgcatccgctgcagtttgggccgctgccctcctcctcgctgggtcacaggagactggggccagtgttctgctcagtgtggccttggacagcagatgagaactgtgcagtgtctctcctacaccggacaggcatctagtgactgtctagaaactgttcggcctccatcaatgcagcagtgtgaaagcaaatgtgacagtacccccatttctaatactgaagagtgcaaagatgtgaataaagtggcttattgcccactggtgctgaagttcaagttctgcagtcgagcatacttcagacagatgtgttgtaagacctgccaaggacactgacccacagaaagccagagagagtgccttgtcatttcatcatggaaatgcatccatcaaagagagccacccagaggaagaggattgatgtccttgcaaatgcattaccctgtggaaaacgtaaccactggtcagccctagctgacaaaatttcaatattattttagcttctgtgaagtgggatttattgatccaaagtgctggacacggtattaggagggaatgccagattggagagatccaaacaacacagggagacttgcttactgtggagcgtttgtgttctttcgagtaaatccaatagcctgtttacctccttggaccattaagataatttttattatggacttagcaatgacactgaatccatttgtatttaaaactgtttaaaatgtagctgttatgacttggtcaactatggaagtgaagaaggttcagaattcttaagtcatagcttaaaaatatttactgtactttatctcactacaacagcaccacaatttaaattataaaacgggctttgaactataatttaaggagcaattataaatcaaaagtaatgaaagtttgtattatttttcttcattccacttaatttccttaggaataatcccctggttctgaacactgctgtgagccatatataaaactatattaaactgaacaataatgaggggcatagtttaaagcagtgcatcagttactgcagctgtgcaagtctataaactcagtgctgaaagactgtggccaacttgccattgtgcaagtaaagctgagatttccattaaaactttaagagaaaaacatttcaatttcatgcagaaaccagacctggggtatggtacagaccaaaggaccaggccctttgctgccaccacacaggatgccttagttcttatttgagtccctccaactcacttgtgtttacatcctccccagccacagcacggcttctgccctttggattgctgcacgtgtgttgagcttactgagatgataccatgcaaaagatagactggctcggtaaccaggcagacccttttgcagtttgttgacaattacgatgagttccagatgtcccttctttgatatggtagaagggcatttatttatatgagagcaaatgtgtgtgtgtgtttgcgggcgcttttaagtgtgtggatagatgagtgtgcttgcacataatgtgctatttctgtgagttttaaagtaggcaagggataataaccaaagaagaaaatttcatgaagactagacatcataaagcataattttaatagtcactcaaccaagtattttttattttttatggatactctgaatggcaattaaatgtgaaacccagtttcttgggcaagtcaaattctggaatcacatccacctaaattaaaatgactagctcgtattttccccatcttcaagtttcacatcctggtcatcaaaagactcgacagcaagacttagaatgaaaaagggtacttgtttatattaatattttttacttgaacacgtgtagcttgcagcaggttcttgatgaatgtgctttgtgtccaaaatgcctccccattgtacacaggtgtacaccatgcatgcaccaacacctaaaactcaaaactaaatggctattttgtaaggttaatactttcagttaaacagcatgtttgacttgattccatcatggtgctcttaaattacatgtcagtgcatcacatatatcatgatctaatgcagatgactaggctttttccaaaaggaagacagaccctcagacaccaaaagccaatctaaacaactcccaggtttgctgtggacaatcagcatggaatgttttctgcactctcagtcatgaccatctgtatcttgttacctgctttctctctcaacaccacagttctcaaccctgagccttccagagagagctattgatgatacaagaggaatcaccagggcccggatctaagatgcccttagaagaccagcccaagtgccgtcttagccattcagtgaagggcaaacagcccatgggtagtatggcccgagcactgaattcccttgcgccttttcaaagaacagttaacttggtgctaatgtgccctggtgaaataaataaaagatgggcagtttctgtggcattttaggcataggtttgcaatccagatctgattttctccaacataaatatcagctcatgttcttatttcaaaaagatttcttattaccgactaaaagctattttttacctcacctggaaactaccattgtgagggccatcccccaggcactgcacagcaccttggctgatgctggaagaggagggcagtcagtgtcacttctgggatgtgccccagcactgagaacaaaatgcaggcatcccccggggcagcatcagagtgcctttctagagggagccacgcacagaatgtaacaggatgaaacagtttcaagtaagccttgaattgaaacctgagtaggttaaaacaattctatttcatagcacatcacaatactgctgctactctgtagccacccccatggctacatgatgccctattcctaaataataacaatagcattgtcagtggaggctgggccaccatggcagaccttccaaaagtagtgagctacatagactacttagggaaccccagggaaactggtaccctacacctgggagcagtatctgccactgggataaagtcctactaaaaaaggaacggtaaatgtaccctaatgattaaaccccgtgagatacatatgatttccaaatagtccatttcattaggaacttttttgtttgaatgaatgtcacataggtatcctcagtaacacagaacgaaattacctttgtattattgtgattagttgttgcttattattttatactcagtaataatgtggtacactgttaatttttttgcttttgtaaattatattctaatttattgccatgtttcctaacacttgtcctacattcattctcctgcttgtaatgaaaatgaaaaaatcattgtaacacttgatggagtgaaattccacgccaggcacagaatttttttgacatagataatttagtaaaataaaaattcagcttataataatgataaaaaaaaaaaaaaaaaaaaaa

SEQ ID NO: 652 - protein, 1117 aa, Homo sapiens
MEILWKTLTWILSLIMASSEFHSDHRLSYSSQEEFLTYLEHYQLTIPIRVDQNGAFLSFTVKNDKHSRRRRSMDPIDPQQAVSKLFFKLSAYGKHFHLNLTLNTDFVSKHFTVEYWGKDGPQWKHDFLDNCHYTGYLQDQRSTTKVALSNCVGLHGVIATEDEEYFIEPLKNTTEDSKHFSYENGHPHVIYKKSALQQRHLYDHSHCGVSDFTRSGKPWWLNDTSTVSYSLPINNTHIHHRQKRSVSIERFVETLVVADKMMVGYHGRKDIEHYILSVMNIVAKLYRDSSLGNVVNIIVARLIVLTEDQPNLEINHHADKSLDSFCKWQKSILSHQSDGNTIPENGIAHHDNAVLITRYDICTYKNKPCGTLGLASVAGMCEPERSCSINEDIGLGSAFTIAHEIGHNFGMNHDGIGNSCGTKGHEAAKLMAAHITANTNPFSWSACSRDYITSFLDSGRGTCLDNEPPKRDFLYPAVAPGQVYDADEQCRFQYGATSRQCKYGEVCRELWCLSKSNRCVTNSIPAAEGTLCQTGNIEKGWCYQGDCVPFGTWPQSIDGGWGPWSLWGECSRTCGGGVSSSLRHCDSPAPSGGGKYCLGERKRYRSCNTDPCPLGSRDFREKQCADFDNMPFRGKYYNWKPYTGGGVKPCALNCLAEGYNFYTERAPAVIDGTQCNADSLDICINGECKHVGCDNILGSDAREDRCRVCGGDGSTCDAIEGFFNDSLPRGGYMEVVQIPRGSVHIEVREVAMSKNYIALKSEGDDYYINGAWTIDWPRKFDVAGTAFHYKRPTDEPESLEALGPTSENLIVMVLLQEQNLGIRYKFNVPITRTGSGDNEVGFTWNHQPWSECSATCAGGVQRQEVVCKRLDDNSIVQNNYCDPDSKPPENQRACNTEPCPPEWFIGDWLECSKTCDGGMRTRAVLCIRKIGPSEEETLDYSGCLTHRPVEKEPCNNQSCPPQWVALDWSECTPKCGPGFKHRIVLCKSSDLSKTFPAAQCPEESKPPVRIRCSLGRCPPPRWVTGDWGQCSAQCGLGQQMRTVQCLSYTGQASSDCLETVRPPSMQQCESKCDSTPISNTEECKDVNKVAYCPLVLKFKFCSRAYFRQMCCKTCQGH

SEQ ID NO: 653 - DNA, 1781 bp, Homo sapiens
gcagaagtccggggctggcaagcgcttcctgcgcagcgcctaggcgacctggagtttgtgacgctgtgatggtctagaggctggagattcaagatctgggtgccatcattttctggttctgttgatgaccctcttccaggttacatacagcttacatcttgcatcctcaagcgtttttcttataaggctaaaaattcacaaagcatatatcaatgaatcaggaggatctagatccggatagtactacagatgtgggagatgttacaaatactgaagaagaacttattagagaatgtgaagaaatgtggaaagatatggaagaatgtcagaataaattatcacttattggaactgaaacactcaccgattcaaatgctcagctatcattgttaattatgcaagtaaaatgtttaaccgctgaactcagtcaatggcagaaaaaaacacctgaaacaattcccttgactgaagacgttctcataacattaggaaaagaagagttccaaaagctgagacaagatcttgaaatggtactgtccactaaggagtcaaagaatgaaaagttaaaggaagacttagaaagggaacaacggtggttggatgaacagcaacagataatggaatctcttaatgtactacacagtgaattgaaaaataaggttgaaacattttctgaatcaagaatctttaatgaactgaaaactaaaatgcttaatataaaagaatataaggagaaactcttgagtaccttgggcgagtttctagaagaccattttcctctgcctgatagaagtgttaaaaagaaaaagaaaaacattcaagaatcatctgtaaacctgataacactgcatgaaatgttagagattcttataaatagattatttgatgttccacatgatccatatgtcaaaattagtgattccttttggccaccttatgttgagctgctgctgcgtaatggaattgccttgagacatccagaagatccaacccgaataagattagaagctttccatcagtaaaaggatgttttcttttttcacacagtaaaaattcttatcattcaaggatattggaaccacaggactatttggataaaaaacattatttgcaaattaatgcgcataggccatcttacttttattgcaaaatggcatgtgctgccatctattattcatttttaaatggtcatttcttattcagtgagtgctttagtgttttaaactatatggataagaatgcaggtagataatattctaggcataaaacatttaatgtaccttacctcatgcaatattctttggattctttgttgatttatgatattgctaatataatattttcttaaaatatataacaatatcttttatgcattttgagttccagctggtgcttctttatatttagaaattataatgggaaggtcatttaatttacagatggttttaaaattgaggtaatatctgaggtggcataatttaaaaatatttagcaaatttgtttcatatatactgtcttatttctagatttgtttaaaattggaatatgaaaaactaatggataaagctagcataaaattgatattttagtttgtattattaatatatcatgttaccttatatattaatctactcttgattctgctaattattaccaacaaaattgtattcatgacattttattaatcctctgtgaattttctgtaaataaaattatttctgaaaatctctaaaaaaaaaaaaaaaaaaaaaaagaaaaaaaaaaaaaaaaaaaaaaaaaaa

SEQ ID NO: 654 - protein, 269 aa, Homo sapiens
MNQEDLDPDSTTDVGDVTNTEEELIRECEEMWKDMEECQNKLSLIGTETLTDSNAQLSLLIMQVKCLTAELSQWQKKTPETIPLTEDVLITLGKEEFQKLRQDLEMVLSTKESKNEKLKEDLEREQRWLDEQQQIMESLNVLHSELKNKVETFSESRIFNELKTKMLNIKEYKEKLLSTLGEFLEDHFPLPDRSVKKKKKNIQESSVNLITLHEMLEILINRLFDVPHDPYVKISDSFWPPYVELLLRNGIALRHPEDPTRIRLEAFHQ

SEQ ID NO: 655 - DNA, 2110 bp, Homo sapiens
aacatggcggcggaaagtggtagcgattttcagcagagacgtagaaggcgccgggacccggaggaaccggaaaaaacagaactcagcgaaagagagctggcagtagcagtggcggtgtcccaggagaacgatgaggagaacgaagagcgctgggttggacctttacctgtggaggcaacactggccaagaagaggaaagtcttagagtttgaaagagtctatcttgataatctccccagtgcatccatgtatgagcgcagttacatgcatagagatgttatcacccatgtggtatgcaccaaaacagattttattattactgccagtcatgatggacatgtcaagttctggaaaaaaatagaagagggaattgaatttgttaaacattttcgtagtcacctgggagttattgagagtattgcagttagctctgagggagcattgttctgttctgtgggtgatgataaagcaatgaaggtgtttgatgtagtgaactttgacatgatcaacatgctgaaacttggctattttcctggacagtgtgagtggatctattgcccaggggatgcaatttcttcagttgctgcttccgaaaagagtacaggaaaaattttcatttatgatggccgaggagataaccagccacttcatatttttgacaaactccatacatcacctcttactcagatacggctaaacccagtttacaaagcagtagtgtcttctgacaaatctgggatgattgaatactggactgggcctcctcatgaatataaattccccaaaaatgtgaactgggaatataaaactgacactgatttatatgaatttgccaagtgtaaggcttatccaaccagcgtatgtttttcaccagatgggaagaaaatagctactattggttctgatagaaaagttagaattttcagatttgtaactggaaaactcatgagagtctttgatgaatcactaagcatgtttactgaactgcaacagatgaggcaacagttaccagacatggaatttggccgacgaatggctgtagaacgtgagttggagaaggttgatgctgtaagattaattaatatagtttttgatgaaactggacacttcgtgctgtatggaacaatgctgggcattaaagttataaatgtagagacaaaccggtgtgtgcggattttaggcaaacaagaaaatattagagtgatgcaattggctttgttccaggggatagccaaaaagcatcgtgctgcaactactatagaaatgaaagcttctgaaaatcctgttcttcagaatattcaagctgacccaacaatagtctgtacatcattcaaaaagaatagattttatatgtttaccaaacgagaaccagaagatacgaaaagtgcagattctgatcgagatgtttttaatgagaaaccttctaaagaagaagtcatggcagctactcaagctgaaggacctaaacgagtttcggacagtgccattatccacaccagcatgggagacattcacaccaaactttttcctgttgagtgccctaagacagtggaaaacttctgtgttcacagcagaaatggttattataatgggcatacatttcaccgtataattaagggctttatgattcagactggagatccaacaggtactggtatgggaggagaaagcatatggggaggagaatttgaagatgaatttcattcaacattacgacatgacaggccgtacacactcagcatggctaacgcgggatcaaatactaatggatcccagtttttcataacggtagtaccaacgccttggcttgataataagcatacagtatttggacgagtgactaaaggaatggaagttgtacagaggatctccaacgtcaaagtcaatcccaaaacagataagccctatgaggatgtcagcatcataaatattactgtcaagtaaaataagatttgttttaatgtacttgcaaataaaaatacaatattaaacagattattttacattaggaagcttaggacttgctgaatatacagatcatgtttcaaagatacagtatttttgtattttttattaaaggctattttttaaaaaaaaaaaaaaaaaaaaa

SEQ ID NO: 656 - protein, 646 aa, Homo sapiens
MAAESGSDFQQRRRRRRDPEEPEKTELSERELAVAVAVSQENDEENEERWVGPLPVEATLAKKRKVLEFERVYLDNLPSASMYERSYMHRDVITHVVCTKTDFIITASHDGHVKFWKKIEEGIEFVKHFRSHLGVIESIAVSSEGALFCSVGDDKAMKVFDVVNFDMINMLKLGYFPGQCEWIYCPGDAISSVAASEKSTGKIFIYDGRGDNQPLHIFDKLHTSPLTQIRLNPVYKAVVSSDKSGMIEYWTGPPHEYKFPKNVNWEYKTDTDLYEFAKCKAYPTSVCFSPDGKKIATIGSDRKVRIFRFVTGKLMRVFDESLSMFTELQQMRQQLPDMEFGRRMAVERELEKVDAVRLINIVFDETGHFVLYGTMLGIKVINVETNRCVRILGKQENIRVMQLALFQGIAKKHRAATTIEMKASENPVLQNIQADPTIVCTSFKKNRFYMFTKREPEDTKSADSDRDVFNEKPSKEEVMAATQAEGPKRVSDSAIIHTSMGDIHTKLFPVECPKTVENFCVHSRNGYYNGHTFHRIIKGFMIQTGDPTGTGMGGESIWGGEFEDEFHSTLRHDRPYTLSMANAGSNTNGSQFFITVVPTPWLDNKHTVFGRVTKGMEVVQRISNVKVNPKTDKPYEDVSIINITVK

SEQ ID NO: 657 - DNA, 3914 bp, Homo sapiens
gcgcagaggcctctgggtaggtggctcaaccccgcctctcagttgaggactctgaaggctgtttctgtggcgcttcccctgcgaggatggctaccctggttgtaaacaagctcggagcgggagtagacagtggccggcagggcagccgggggacagctgtagtgaaggtgctagagtgtggagtttgtgaagatgtcttttctttgcaaggagacaaagttccccgtcttttgctttgtggccataccgtctgtcatgactgtctcactcgcctacctcttcatggaagagcaatccgttgcccatttgatcgacaagtaacagacctaggtgattcaggtgtctggggattgaaaaaaaattttgctttattggagcttttggaacgactgcagaatgggcctattggtcagtatggagctgcagaagaatccattgggatatctggagagagcatcattcgttgtgatgaagatgaagctcaccttgcctctgtatattgcactgtgtgtgcaactcatttgtgctctgagtgttctcaagttactcattctacaaagacattagcaaagcacaggcgagttcctctagctgataaacctcatgagaaaactatgtgctctcagcaccaggtgcatgccattgagtttgtttgcttggaagaaggttgtcaaactagcccactcatgtgctgtgtctgcaaagaatatggaaaacaccagggtcacaagcattcagtattggaaccagaagctaatcagatccgagcatcaattttagatatggctcactgcatacggaccttcacagaggaaatctcagattattccagaaaattagttggaattgtgcagcacattgaaggaggagaacaaatcgtggaagatggaattggaatggctcacacagaacatgtaccagggactgcagagaatgcccggtcatgtattcgagcttatttttatgatctacatgaaactctgtgtcgtcaagaagaaatggctctaagtgttgttgatgctcatgttcgtgaaaaattgatttggctcaggcagcaacaagaagatatgactattttgttgtcagaggtttctgcagcctgcctccactgtgaaaagactttgcagcaggatgattgtagagttgtcttggcaaaacaggaaattacaaggttactggaaacattgcagaaacagcagcagcagtttacagaagttgcagatcacattcagttggatgccagcatccctgtcacttttacaaaggataatcgagttcacattggaccaaaaatggaaattcgggtcgttacgttaggattggatggtgctggaaaaactactatcttgtttaagttaaaacaggatgaattcatgcagcccattccaacaattggttttaacgtggaaactgtagaatataaaaatctaaaattcactatttgggatgtaggtggaaaacacaaattaagaccattgtggaaacattattacctcaatactcaagctgttgtgtttgttgtagatagcagtcatagagacagaattagtgaagcacacagcgaacttgcaaagttgttaacggaaaaagaactccgagatgctctgctcctgatttttgctaacaaacaggatgttgctggagcactgtcagtagaagaaatcactgaactactcagtctccataaattatgctgtggccgtagctggtatattcagggctgtgatgctcgaagtggtatgggactgtatgaagggttggactggctctcacggcaacttgtagctgctggagtattggatgttgcttgattttaaaggcagcagttgtttgaagttttgtggttaaaagtaactttgcacatagtatgttttaagaaattatacatctcaaaagatggtaatttaggatgcatatatatatatatatatataaaggaatcttggattgggaattcagtactttgctttaaaaaaattttgtggcagaattaaatttctaattgagcagattagattgaattaaatagaaacttattgaatatacattcttttaaaaagtatatttgttatttaagtttttcagataatatgtgaccaatatactgggaaagaggtagtcacagagaaagggtaagtgaaggtttattctttcagtgaaaaaagaatagccaattgagtgcctaatgagacctctgtgtgaagcaagtgaagtatagctgcttcttttaacctgccttttcactgaatgttggcagcatttagtagtagaaatgacagttgcttaatgaaatagaatccaaactacatatttggataataggattactttatgtttatgttcagagttaacagaacacctttaatgctaagaactataaggtacagaaaattaatactttatatagtgttttattaactttctcctacagcattttgtataaaacacaatgagggagtgaaatgttacccaattaggcttgtcaggttagtaataaactgaacagtaataaaactgtggaagtaattggatctgaatttatgaaagacccatttccaggactgaacctaggtcagagctctaaattggtccttctatttttcaacaaatttaaagtaatatttctttctaatataatattgcatcctttgtgggaatgactataggtaaaatgtagtaagtaacgcagaaccagggttggctttatttaaaagctagtgacctaaatagaaagcgaacttcaagagaagttgtaagtacagtggcaaatgcttattacttacttcaaactgtttcccaaaataagtgcatttattttgacaataaaacttaaggctgttcatgagaaggccttgaaaagttactctagaggaaaaatgtctaaagaaaaaaaaaattcaaaaagtttacattaattattcagtgttgtgagtaaataaaaatgtgtgctctttactgtttttcatttttaaagaatattattatggaagcacgatttatttaaataggtacattgagacttttttttttttaatgttctgatacattaggatgaagttaaatcttaaatcttattagttgaattgttgtaaggacagtgatgtctggtaacaagatgtgactttttggtagcactgttgtggttcattcttttcaaatctatttttgtttaaaaacaatacaagttttagaaaacaaagcattaaaaaaaaagcctatcagtattatgggcaatatgtaaataaataaatgtaatatttcatcctttatttttcaggtaaaaggtcatgctgttacaggtgtagtttgtgtgcataaataatacttccgaattaaattatttaatatttgactgatttcaataactgtgaaaaataaaaaaggtgttgtattgcttgtgagaacttgaactgtttactagttaattgaagaaaaagtgtaacactaaggtgaacttgcttcccttttcactaattttgctaaactttgtaatgcacattcttagcatataactgaacacagttgaaaaattgtgcctgattataatgtatgtataatggtaggtgtttgtgtgtgattcatttttaaagaaatatttttctcaagctcctattactatttgtggttgtattatttcactaatcattagttaagactgtgctagtcttccctgggaaactaagaagagagcttttttatatacagtatattagaattttcctagtagctgaatttctgtattaggtctaaatattactgtatgttatataaagcaggtatgtcaagtgtatagccgtagtctataattcaggaatgctttataaccatcagaagccattatttgcactacatatatgataagtatagacagcaataaaatgttaagatcatttttaagaaaaaaaaaaaaaaaa

SEQ ID NO: 658 - protein, 574 aa, Homo sapiens
MATLVVNKLGAGVDSGRQGSRGTAVVKVLECGVCEDVFSLQGDKVPRLLLCGHTVCHDCLTRLPLHGRAIRCPFDRQVTDLGDSGVWGLKKNFALLELLERLQNGPIGQYGAAEESIGISGESIIRCDEDEAHLASVYCTVCATHLCSECSQVTHSTKTLAKHRRVPLADKPHEKTMCSQHQVHAIEFVCLEEGCQTSPLMCCVCKEYGKHQGHKHSVLEPEANQIRASILDMAHCIRTFTEEISDYSRKLVGIVQHIEGGEQIVEDGIGMAHTEHVPGTAENARSCIRAYFYDLHETLCRQEEMALSVVDAHVREKLIWLRQQQEDMTILLSEVSAACLHCEKTLQQDDCRVVLAKQEITRLLETLQKQQQQFTEVADHIQLDASIPVTFTKDNRVHIGPKMEIRVVTLGLDGAGKTTILFKLKQDEFMQPIPTIGFNVETVEYKNLKFTIWDVGGKHKLRPLWKHYYLNTQAVVFVVDSSHRDRISEAHSELAKLLTEKELRDALLLIFANKQDVAGALSVEEITELLSLHKLCCGRSWYIQGCDARSGMGLYEGLDWLSRQLVAAGVLDVA

SEQ ID NO: 659 - DNA, 2429 bp, Homo sapiens
gcgcagaggcctctgggtaggtggctcaaccccgcctctcagttgaggactctgaaggctgtttctgtggcgcttcccctgcgaggatggctaccctggttgtaaacaagctcggagcgggagtagacagtggccggcagggcagccgggggacagctgtagtgaaggtgctagagtgtggagtttgtgaagatgtcttttctttgcaaggagacaaagttccccgtcttttgctttgtggccataccgtctgtcatgactgtctcactcgcctacctcttcatggaagagcaatccgttgcccatttgatcgacaagtaacagacctaggtgattcaggtgtctggggattgaaaaaaaattttgctttattggagcttttggaacgactgcagaatgggcctattggtcagtatggagctgcagaagaatccattgggatatctggagagagcatcattcgttgtgatgaagatgaagctcaccttgcctctgtatattgcactgtgtgtgcaactcatttgtgctctgagtgttctcaagttactcattctacaaagacattagcaaagcacaggcgagttcctctagctgataaacctcatgagaaaactatgtgctctcagcaccaggtgcatgccattgagtttgtttgcttggaagaaggttgtcaaactagcccactcatgtgctgtgtctgcaaagaatatggaaaacaccagggtcacaagcattcagtattggaaccagaagctaatcagatccgagcatcaattttagatatggctcactgcatacggaccttcacagaggaaatctcagattattccagaaaattagttggaattgtgcagcacattgaaggaggagaacaaatcgtggaagatggaattggaatggctcacacagaacatgtaccagggactgcagagaatgcccggtcatgtattcgagcttatttttatgatctacatgaaactctgtgtcgtcaagaagaaatggctctaagtgttgttgatgctcatgttcgtgaaaaattgatttggctcaggcagcaacaagaagatatgactattttgttgtcagaggtttctgcagcctgcctccactgtgaaaagactttgcagcaggatgattgtagagttgtcttggcaaaacaggaaattacaaggttactggaaacattgcagaaacagcagcagcagtttacagaagttgcagatcacattcagttggatgccagcatccctgtcacttttacaaaggataatcgagttcacattggaccaaaaatggaaattcgggtcgttacgttaggattggatggtgctggaaaaactactatcttgtttaagttaaaacaggatgaattcatgcagcccattccaacaattggttttaacgtggaaactgtagaatataaaaatctaaaattcactatttgggatgtaggtggaaaacacaaattaagaccattgtggaaacattattacctcaatactcaagctgttgtgtttgttgtagatagcagtcatagagacagaattagtgaagcacacagcgaacttgcaaagttgttaacggaaaaagaactccgagatgctctgctcctgatttttgctaacaaacaggatgttgctggagcactgtcagtagaagaaatcactgaactactcagtctccataaattatgctgtggccgtagctggtatattcagggctgtgatgctcgaagtgtttttcagataatatgtgaccaatatactgggaaagaggtagtcacagagaaagggtaaaaggtcatgctgttacaggtgtagtttgtgtgcataaataatacttccgaattaaattatttaatatttgactgatttcaataactgtgaaaaataaaaaaggtgttgtattgcttgtgagaacttgaactgtttactagttaattgaagaaaaagtgtaacactaaggtgaacttgcttcccttttcactaattttgctaaactttgtaatgcacattcttagcatataactgaacacagttgaaaaattgtgcctgattataatgtatgtataatggtaggtgtttgtgtgtgattcatttttaaagaaatatttttctcaagctcctattactatttgtggttgtattatttcactaatcattagttaagactgtgctagtcttccctgggaaactaagaagagagcttttttatatacagtatattagaattttcctagtagctgaatttctgtattaggtctaaatattactgtatgttatataaagcaggtatgtcaagtgtatagccgtagtctataattcaggaatgctttataaccatcagaagccattatttgcactacatatatgataagtatagacagcaataaaatgttaagatcatttttaagaaaaaaaaaaaaaaaa

SEQ ID NO: 660 - protein, 569 aa, Homo sapiens
MATLVVNKLGAGVDSGRQGSRGTAVVKVLECGVCEDVFSLQGDKVPRLLLCGHTVCHDCLTRLPLHGRAIRCPFDRQVTDLGDSGVWGLKKNFALLELLERLQNGPIGQYGAAEESIGISGESIIRCDEDEAHLASVYCTVCATHLCSECSQVTHSTKTLAKHRRVPLADKPHEKTMCSQHQVHAIEFVCLEEGCQTSPLMCCVCKEYGKHQGHKHSVLEPEANQIRASILDMAHCIRTFTEEISDYSRKLVGIVQHIEGGEQIVEDGIGMAHTEHVPGTAENARSCIRAYFYDLHETLCRQEEMALSVVDAHVREKLIWLRQQQEDMTILLSEVSAACLHCEKTLQQDDCRVVLAKQEITRLLETLQKQQQQFTEVADHIQLDASIPVTFTKDNRVHIGPKMEIRVVTLGLDGAGKTTILFKLKQDEFMQPIPTIGFNVETVEYKNLKFTIWDVGGKHKLRPLWKHYYLNTQAVVFVVDSSHRDRISEAHSELAKLLTEKELRDALLLIFANKQDVAGALSVEEITELLSLHKLCCGRSWYIQGCDARSVFQIICDQYTGKEVVTEKG

SEQ ID NO: 661 - DNA, 2400 bp, Homo sapiens
gcgcagaggcctctgggtaggtggctcaaccccgcctctcagttgaggactctgaaggctgtttctgtggcgcttcccctgcgaggatggctaccctggttgtaaacaagctcggagcgggagtagacagtggccggcagggcagccgggggacagctgtagtgaaggtgctagagtgtggagtttgtgaagatgtcttttctttgcaaggagacaaagttccccgtcttttgctttgtggccataccgtctgtcatgactgtctcactcgcctacctcttcatggaagagcaatccgttgcccatttgatcgacaagtaacagacctaggtgattcaggtgtctggggattgaaaaaaaattttgctttattggagcttttggaacgactgcagaatgggcctattggtcagtatggagctgcagaagaatccattgggatatctggagagagcatcattcgttgtgatgaagatgaagctcaccttgcctctgtatattgcactgtgtgtgcaactcatttgtgctctgagtgttctcaagttactcattctacaaagacattagcaaagcacaggcgagttcctctagctgataaacctcatgagaaaactatgtgctctcagcaccaggtgcatgccattgagtttgtttgcttggaagaaggttgtcaaactagcccactcatgtgctgtgtctgcaaagaatatggaaaacaccagggtcacaagcattcagtattggaaccagaagctaatcagatccgagcatcaattttagatatggctcactgcatacggaccttcacagaggaaatctcagattattccagaaaattagttggaattgtgcagcacattgaaggaggagaacaaatcgtggaagatggaattggaatggctcacacagaacatgtaccagggactgcagagaatgcccggtcatgtattcgagcttatttttatgatctacatgaaactctgtgtcgtcaagaagaaatggctctaagtgttgttgatgctcatgttcgtgaaaaattgatttggctcaggcagcaacaagaagatatgactattttgttgtcagaggtttctgcagcctgcctccactgtgaaaagactttgcagcaggatgattgtagagttgtcttggcaaaacaggaaattacaaggttactggaaacattgcagaaacagcagcagcagtttacagaagttgcagatcacattcagttggatgccagcatccctgtcacttttacaaaggataatcgagttcacattggaccaaaaatggaaattcgggtcgttacgttaggattggatggtgctggaaaaactactatcttgtttaagttaaaacaggatgaattcatgcagcccattccaacaattggttttaacgtggaaactgtagaatataaaaatctaaaattcactatttgggatgtaggtggaaaacacaaattaagaccattgtggaaacattattacctcaatactcaagctgttgtgtttgttgtagatagcagtcatagagacagaattagtgaagcacacagcgaacttgcaaagttgttaacggaaaaagaactccgagatgctctgctcctgatttttgctaacaaacaggatgttgctggagcactgtcagtagaagaaatcactgaactactcagtctccataaattatgctgtggccgtagctgtttttcagataatatgtgaccaatatactgggaaagaggtagtcacagagaaagggtaaaaggtcatgctgttacaggtgtagtttgtgtgcataaataatacttccgaattaaattatttaatatttgactgatttcaataactgtgaaaaataaaaaaggtgttgtattgcttgtgagaacttgaactgtttactagttaattgaagaaaaagtgtaacactaaggtgaacttgcttcccttttcactaattttgctaaactttgtaatgcacattcttagcatataactgaacacagttgaaaaattgtgcctgattataatgtatgtataatggtaggtgtttgtgtgtgattcatttttaaagaaatatttttctcaagctcctattactatttgtggttgtattatttcactaatcattagttaagactgtgctagtcttccctgggaaactaagaagagagcttttttatatacagtatattagaattttcctagtagctgaatttctgtattaggtctaaatattactgtatgttatataaagcaggtatgtcaagtgtatagccgtagtctataattcaggaatgctttataaccatcagaagccattatttgcactacatatatgataagtatagacagcaataaaatgttaagatcatttttaagaaaaaaaaaaaaaaaa

SEQ ID NO: 662 - protein, 546 aa, Homo sapiens
MATLVVNKLGAGVDSGRQGSRGTAVVKVLECGVCEDVFSLQGDKVPRLLLCGHTVCHDCLTRLPLHGRAIRCPFDRQVTDLGDSGVWGLKKNFALLELLERLQNGPIGQYGAAEESIGISGESIIRCDEDEAHLASVYCTVCATHLCSECSQVTHSTKTLAKHRRVPLADKPHEKTMCSQHQVHAIEFVCLEEGCQTSPLMCCVCKEYGKHQGHKHSVLEPEANQIRASILDMAHCIRTFTEEISDYSRKLVGIVQHIEGGEQIVEDGIGMAHTEHVPGTAENARSCIRAYFYDLHETLCRQEEMALSVVDAHVREKLIWLRQQQEDMTILLSEVSAACLHCEKTLQQDDCRVVLAKQEITRLLETLQKQQQQFTEVADHIQLDASIPVTFTKDNRVHIGPKMEIRVVTLGLDGAGKTTILFKLKQDEFMQPIPTIGFNVETVEYKNLKFTIWDVGGKHKLRPLWKHYYLNTQAVVFVVDSSHRDRISEAHSELAKLLTEKELRDALLLIFANKQDVAGALSVEEITELLSLHKLCCGRSCFSDNM

SEQ ID NO: 663 - DNA, 3117 bp, Homo sapiens
ttttaaaaaaaaaactccggcaacgttggcctttgggaggccgcgtattgttacctaggggtggtttcttttcctgcagtcgcgatgtgtgattgcagatggaaaacaaagtattttatgcctacgtttctaagatagaagaaatggacttgttgaaaagaagccagtttgtaaaggacacagtaggagaatttaaggtaccaccaccagagagaggttgagagtgcgtttgacttttggttttgccaaacgcgaggttttccgtttccttccggggcaagttgaacctgtccagcccccgtaggctgtgggtcaaaagtgccggtcaaaatggaagtgaatccccctaaacaggagcacctgctggcgctaaaagtgatgcggctgactaagcctactttattcaccaatatcccagtaacatgtgaagagaaagacttacctggagatctctttaaccagctgatgagagatgatccttcaaccgttaatggtgcagaagttttaatgttgggagaaatgctgactttaccacagaattttgggaatatatttttgggagagaccttttccagttatatcagcgttcataatgatagcaatcaagttgtaaaagacatattagtaaaagctgatcttcagacaagttctcagcgtttaaatctttcagcctccaatgctgcagtggctgaacttaaaccggattgttgtattgatgatgtcatacatcatgaagtcaaagaaattggaacacacatcttggtatgtgctgtgagttatacaactcaggctggagaaaaaatgtatttcagaaaattcttcaaatttcaggttctcaaaccattggatgtgaaaaccaaattttacaatgcagagagtgacctcagttctgtgactgatgaagtatttctggaagcccagattcagaatatgacaacctcacctatgtttatggagaaggtttcactggagccatctattatgtacaatgtaacagaattaaattcagtcagccaagctggagaatgtgtgtctacgtttgggtcaagagcatatttgcaaccaatggatacacgccagtacttatactgcctaaagccaaagaatgaatttgcagaaaaagcaggcatcattaagggagtaacagtaattggaaaattggatatagtatggaaaacaaatctaggtgaaaggggaaggttacagaccagccaacttcaaagaatggctccaggttatggagatgttaggttgtctttggaggcaataccagataccgtaaaccttgaagaaccttttcatattacctgtaaaataacaaactgcagtgaaaggactatggatctggttttggaaatgtgcaataccaattccatccactggtgtggaatttcaggaagacagctgggaaagctgcatccaagttcttcgctctgtcttgcccttactctgctttcttcagtacagggactgcaaagcatctctggcttaagactaacagacacattcttaaagagaacatatgaatatgatgacatcgcacaagtctgtgtggtatcttctgccattaaagtggaaagctgaaggaaacttccaatgttaggcttttcatttagtttcacagaactgctctttttgttacctttgtaaaatgatgacgtcaacaacgaagtaaatatgttacttaaattttctttcctgtaaaatggttaaaatattaaatatttgttttgaagagatctgattttatcttgtaatttatatttgaaatgaacatgtgtatattttctacacctattatttaatttcatttcattttagatgaccattggactttgttctccaaaagctgtgtatctgagaccatttgtccctagcaagttatctagaacacgagtcagcacactttttatgtaaggtacaagatactaaatattttaggctttgcaggccgtaaggtttctgtcacaaatactgaactctgccatcgtacttcaagagcagccagtaggcaaaaaaagtacagtggtgtacacaaaaagaagcagttggactcgggaagctgaggcaggagaatcacttgaaccggggaggcagaggttgcagttaagccgagatcatgctactgcactctagcctgagcgacagagtgagactctgtctcaaaaaaaaagaggcagctgggcagatttggcctgcagggtatagttggctgacctcaatctagaagatagagttgtttcttagaactttgtaatattttggttagaaatatttcagttaactccagttttttcctagctattcggtcagcagaaaaagtttgcttaaaacaaagggggtagtcctcttataacctgatatttgtcaacacagtataagctttctagttgttttcaaaattactgtaatggtttgtgtctgtatttgtatattatacctacaaacatacatatctttcagctactgaacacatcagaattggttttactttttaggttgttgattttttttaattaactattaactaagaataatacttattttctaattataagccaaaaacccctgggtttttttctcattgattaagccacttatttttataaggtatatttaaataattcccatcttctgatatgattttaaactctaaatcatgtgttactgttacaaaactttctctctccatgtaatcacacttagttatgagcaaagcagtgagaaagttgaggtgataaacaactttgcagcattaatgtaacaaaaagtttcagtatttgtcaggaaaacaaaagcttaggctgttaaataaaagctattctattttggtaagttgaaattcaagaatgtatatataatttcttaaatgtaagagtgcattaaatcaaatacaaaaattggtttttcaatgcatcattatttattgccataacaaattgtttggtccaaaatgaaagctatattcagaaggtttgcacctcaaaattgagtaataattaatgaaatgtctgtacaaaataaagtgcaagcagtgtaaaattgaagtctgtctttgtttcaaaatgattaagattaaatgatgaaataatattttataaaaaaaaaaaaaaaaaa

SEQ ID NO: 664 - protein, 417 aa, Homo sapiens
MEVNPPKQEHLLALKVMRLTKPTLFTNIPVTCEEKDLPGDLFNQLMRDDPSTVNGAEVLMLGEMLTLPQNFGNIFLGETFSSYISVHNDSNQVVKDILVKADLQTSSQRLNLSASNAAVAELKPDCCIDDVIHHEVKEIGTHILVCAVSYTTQAGEKMYFRKFFKFQVLKPLDVKTKFYNAESDLSSVTDEVFLEAQIQNMTTSPMFMEKVSLEPSIMYNVTELNSVSQAGECVSTFGSRAYLQPMDTRQYLYCLKPKNEFAEKAGIIKGVTVIGKLDIVWKTNLGERGRLQTSQLQRMAPGYGDVRLSLEAIPDTVNLEEPFHITCKITNCSERTMDLVLEMCNTNSIHWCGISGRQLGKLHPSSSLCLALTLLSSVQGLQSISGLRLTDTFLKRTYEYDDIAQVCVVSSAIKVES

SEQ ID NO: 665 - DNA, 5453 bp, Homo sapiens
tggccagaccctgccgcctgagagagagcacagcctggtgggttctggggtctacggcctaggggccggggaagtttgcgccgccgcgaccagtgctgcgatcccgagccgggctccagccccgaggaccaggggtcgggcgggcctgcctacggaaccccgcgggccagcagcagtcgtctcgcgtcctcctgcttggaaaagtgtttaagcttctaaaatgtcatctatcaagcacctggtttatgcagttattcgtttcttacgggaacaaagtcagatggacacttacacctcggatgaacaagaaagtttggaagttgcaattcagtgcttggagacagtttttaagatcagcccagaagatacacacctagcagtttcacagcctttgacagaaatgtttaccagttccttctgtaagaatgacgttctgcccctttcaaactcagtgcctgaagatgtgggaaaagctgaccaattaaaagatgaaggcaataaccacatgaaagaagaaaattatgctgctgcagtggattgttacacacaggcaatagaattggatcccaataatgcagtttactattgcaacagggctgctgctcagagcaaattaggtcactacacagatgcgataaaggattgtgaaaaagcaatagcaattgattcaaagtacagcaaggcctatgggagaatggggctggccctcactgccttgaataaatttgaagaagcagttacaagttatcaaaaggcattagatcttgaccctgaaaatgattcctataagtcaaatctgaaaatagcagaacagaagttaagagaggtatccagtcctacaggaactggactgagctttgacatggctagcttgataaataatccagccttcattagtatggcggcaagtttaatgcagaaccctcaagttcaacagctaatgtcaggaatgatgacaaatgccattgggggacctgctgctggagttgggggcctaactgacctgtcaagcctcatccaagcgggacagcagtttgctcagcagatacagcaacaaaatcctgaacttatagagcaactgagaaatcacatccggagcagatcattcagcagcagcgctgaagagcattcctgatttaaccaggggctcaagcccaagatacaaatggtttatggctatgaatgaagtatttgttgtagatagtaccccctccctccttcaaaaaaccaaacaccatatctgatgtgtgaaaataatggaggaaaacctcttgtgtatattcttaaagaataaatctgtttagacaataggtttatcacaaacaaactcaaaacataacatgactccttttgaaatgatcactagccatgttacgtgccaatatagcactgggataaggttccattttcaaacttctatcatatttgtatattagacttaatagcaaagcatatttattgaactctagtagggctatttgttggtaagctctttagctccaatttcccttaagcaaagttttttgagaagggaaatgacccaaaggaaaggtttcctatgctggttgagaagaagtgtacttgccactgagcagtatgtcaggaaagaaggaatattatctaggtttagctttgataagtgctattagtaatgaatatataacatgggaaccaatgttatctttaatgttgcttgttctggtgaacagagaatcttaagagctgttagaaagtagcacttgatgcaagggatgttttgaaaagaaaaaattggtaatgcgaatgtatagaaagtaaaggtaggatgctcaggttttctgcatagttcttaactaatcttgtctgcagtttggtattgataatattagcatggccacttatgctaaatacacaataagatacatttagaaatccttaatgtactggttaggtcagtggtacaactgtttgacttaattatcacaatttccccaatggtaaccttaccttggaaactatcaaatataaatatactttaactaagccagtgacctggtcctaagttaaggattttctaaatggtatttaattgtgtgcccataaacactgattttttttaaaaagaaaacttagtaattatttgatggataacaaaaagcatctatcactaacattgcttgttcatgtaatcttctgtgataatttggcttggcatgccagtcttataattaacataatttaaatttgatgcaatttaaatataacaggagacttaaaatattttattataaattagatgccatattagttagtggagaaaaggggcattaggtattaattgcatgggtctaactacattgatgatgagagtttaattccaactagagtatattttttgtttattaataatgaaattggtgctgacatgtaatgacttcacaagttttacgagggaaaactgaaaaaggaagtaatataaattttgtggggtttttttgagatggagtcttactcttttgccaggctagagtggtgttgcaatgtcagctcactgcaacctccacctcctggattcaagtgattctcgagccttaagctcccaagtagctgggattacgggcgcccaccaccacgcccagctaattttttttttttttttcttgagatggagtctctctctgtcgccaggctggagtgcagtggcgcaatcgcggctcactgcaacctctgcctcccgggttcaagtgattctcctgcctcagcctcctgagtagctgggattacaggcacgtgtcaccatgcccagctaatttttgtatttttagtagagacggggtttcaccatgtttgccaggattgtctcaatctcttgacctcgtgatccgcctgccttggcctcccaaatgctgggattacaggcgtgagccaccgtgcctggccgctaatttttgtttttaatggagagagttccaccgtatcggccaggctggtctcgaactcctgacctcaagtgatctgcccatcttggcccctcaaagtgctgggattagaggtgtgagccactgtgcctggccaggaagtaatatacaattaaatgagtaataatgcagatgattaggccttatagaacccttatcaaaagactaattggccgggcgctgtggctcatgcctgtaatcccagcactttgggaggccaaggcaggggggatcacctgaggtcaggagtttgagaccagcctggccaacatggtgaaacccacctctactgaaaatacaaaaattagcctggcttggtggcgggcacccgtagtcccagctacttgggaggctgaagcatgagaattgctcgaacctgagaggcagaggttgcagtgagccaagattgcgccactgcactccagcctgggtgacagagcaagactccatttcaaaaaaaaaaaaaaaaagaaaaagagactaagagactaattattttgtatcttgaagtttaaaatccaacttttctctttctcctttgtgacattagaacagtagttctataacttcattgtaagaatcacctggataattcattaaagatgcagattcagggccacgtgttcaattctgatacagtaggtcctgtaataaggcctaggaatggccatttttaaacagtacactaggtggttttgatacagatccaaggactctaatttagaggaacactaggttagaggtttctcagacctgcaaacacctaagcacctgggccaaacaaagctacaacgaagatctgtatgaagatatatagttctgcagaatttaaaaagagcacaatttaagtcttcggccctcagaagttaaattcatattccatctaagccaactttgattttcattaagttagaatgaactcctagtattccagtattacacagaacgaagtactactactaacacatagaagtcattactgtgatataaaaagcaaaatagatccttaattaaaaattagtcactcatattcagtgttgaataagaagttaaagtttctagcataactatcttgagtgcattaaaaatgcttttagagcaataagataagcttctagctgactgcctagaaaaacagaagatacaaattcagtgtcagaaatgaaagggaatacactacagacactatagttattaaaaggctaactagaaaacaccatgaccaactcaaggattgtatatttaacaacttagatgaaacagattccctataggatacaaactagaaagctcactgtagaaacagataacctaaacagaaccatatttattaaggaaattgagtttgtggttaagttaaaaaccttccagtaaagaaaactacaggcccagataacttccgtgatgaattttaccaaacacttaagggagaaataatatcaattctaaacaatctcttccaggaaacagaagaggaggaaatacttcccaactcattttatttgaccagtattacccagacaaagatactataagaaaaaaaactttaaaacaatgtcttcatgtgctaacatctgtagttaaattagccattctttttacatgaaataatgggaattggtatatttcttccatttcatttttctatttctttgctaatataccacctgtaacaaattcaatctagatgctatctgtccacttgcctacatttccattctattcaagccatttttgctcttcaagtaccttgatcactttggaatcatagcattgcaagctatttcaaaaaaagttgcgtggttggattgtgctagctacttttaaatttataaaaaatgccccatatattttcttgcttgtctgggaaatatagttgctatctaactagaaaaataagagggcattattaaagtaactctttaagcatcgtactaaatgtttgacttccattaaccatatttcttgtagtagctgtagctattatgatactgtgtaaaacagaacaggttctatatatgcaaatgacattttcatttaatgtaccaaattgtgtatctaacttttataatataggttaaacagatcctttctaagatggcattatttaatctttacttaaaactatgaaaaatatgtgtaagttattgtttataaacagaagagactataattaaaatatagagcagattccaagtgaccatcattttactttttagatttaaaacagaatgaaacagaagatttagtcataagaagatgcttgaaaaacaatccaagtatccaatgcagtggctataaaatattatttcatcatttaatcttaatcattttgaaacaaagacagacttcaattttacactgcttgcactttattttgtacagacatttcattaattattactcaattttgaggtgcaaaccttctgaatatagctttcattttggaccaaacaatttgttatggcaataaataatgatgcattgaaaaaccaa

SEQ ID NO: 666 - protein, 304 aa, Homo sapiens
MSSIKHLVYAVIRFLREQSQMDTYTSDEQESLEVAIQCLETVFKISPEDTHLAVSQPLTEMFTSSFCKNDVLPLSNSVPEDVGKADQLKDEGNNHMKEENYAAAVDCYTQAIELDPNNAVYYCNRAAAQSKLGHYTDAIKDCEKAIAIDSKYSKAYGRMGLALTALNKFEEAVTSYQKALDLDPENDSYKSNLKIAEQKLREVSSPTGTGLSFDMASLINNPAFISMAASLMQNPQVQQLMSGMMTNAIGGPAAGVGGLTDLSSLIQAGQQFAQQIQQQNPELIEQLRNHIRSRSFSSSAEEHS

SEQ ID NO: 667 - DNA, 2881 bp, Homo sapiens
gtggcctctgcggctaggccggctcgagactcccgggcgccgaggcgctgccgcccgcctcgccgccccacgccgaaggaccacgcgcccgccgccgccagcctctcagcgctcccatgatcgcccggtgccttttggctgtgcgaagcctccgcagagttggtggttccaggattttactcagaatgacgttaggaagagaagtgatgtctcctcttcaggcaatgtcttcctatactgtggctggcagaaatgttttaagatgggatctttcaccagagcaaattaaaacaagaactgaggagctcattgtgcagaccaaacaggtgtacgatgctgttggaatgctcggtattgaggaagtaacttacgagaactgtctgcaggcactggcagatgtagaagtaaagtatatagtggaaaggaccatgctagactttccccagcatgtatcctctgacaaagaagtacgagcagcaagtacagaagcagacaaaagactttctcgttttgatattgagatgagcatgagaggagatatatttgagagaattgttcatttacaggaaacctgtgatctggggaagataaaacctgaggccagacgatacttggaaaagtcaattaaaatggggaaaagaaatgggctccatcttcctgaacaagtacagaatgaaatcaaatcaatgaagaaaagaatgagtgagctatgtattgattttaacaaaaacctcaatgaggatgataccttccttgtattttccaaggctgaacttggtgctcttcctgatgatttcattgacagtttagaaaagacagatgatgacaagtataaaattaccttaaaatatccacactatttccctgtcatgaagaaatgttgtatccctgaaaccagaagaaggatggaaatggcttttaatacaaggtgcaaagaggaaaacaccataattttgcagcagctactcccactgcgaaccaaggtggccaaactactcggttatagcacacatgctgacttcgtccttgaaatgaacactgcaaagagcacaagccgcgtaacagcctttctagatgatttaagccagaagttaaaacccttgggtgaagcagaacgagagtttattttgaatttgaagaaaaaggaatgcaaagacaggggttttgaatatgatgggaaaatcaatgcctgggatctatattactacatgactcagacagaggaactcaagtattccatagaccaagagttcctcaaggaatacttcccaattgaggtggtcactgaaggcttgctgaacacctaccaggagttgttgggactttcatttgaacaaatgacagatgctcatgtttggaacaagagtgttacactttatactgtgaaggataaagctacaggagaagtattgggacagttctatttggacctctatccaagggaaggaaaatacaatcatgcggcctgcttcggtctccagcctggctgccttctgcctgatggaagccggatgatggcagtggctgccctcgtggtgaacttctcacagccagtggcaggtcgtccctctctcctgagacacgacgaggtgaggacttactttcatgagtttggtcacgtgatgcatcagatttgtgcacagactgattttgcacgatttagcggaacaaatgtggaaactgactttgtagaggtgccatcgcaaatgcttgaaaattgggtgtgggacgtcgattccctccgaagattgtcaaaacattataaagatggaagccctattgcagacgatctgcttgaaaaacttgttgcttctaggctggtcaacacaggtcttctgaccctgcgccagattgttttgagcaaagttgatcagtctcttcataccaacacatcgctggatgctgcaagtgaatatgccaaatactgctcagaaatattaggagttgcagctactccaggcacaaatatgccagctacctttggacatttggcagggggatacgatggccaatattatggatatctttggagtgaagtattttccatggatatgttttacagctgttttaaaaaagaagggataatgaatccagaggttggaatgaaatacagaaacctaatcctgaaacctgggggatctctggacggcatggacatgctccacaatttcttgaaacgtgagccaaaccaaaaagcgttcctaatgagtagaggcctgcatgctccgtgaactggggatctttggtagccgtccatgtctggaggacaagtcgacatcaccatgtgttactggcctggaaactgaagggagttttgcaagtgaaaatttagatttctattgacatccttttgttttctaattttaaaaattataaagatgtaaatggaattataaatactgtgacctaagaaaagacccactagaaagtaattgtactataaaatttcataaaactggatttgatttctttttatgaaagtttcatatgaatgtaacttgattttttactattataatctagataatatgatataagagggctaagaatttttaaattgaatcatatatatgatataatttgatccttcttgtatcttgaagttttgtacttgggatttctggactgataaatgaatcatcacattcttctggtaaatattttcttggagctctgtgtcaactttgatcctttgtctcccaggaaggtgtgacctctcctttgcctgcatacctcaaggccaggggaatatgcctcagtgatgcatttatctttgtatatcaggccgcatgattcccaactttctgccacacttaaattacgttcctccatttcagttttgtcttttctgtctaaagttcagtcaaagagtatcaaaaaa

SEQ ID NO: 668 - protein, 704 aa, Homo sapiens
MIARCLLAVRSLRRVGGSRILLRMTLGREVMSPLQAMSSYTVAGRNVLRWDLSPEQIKTRTEELIVQTKQVYDAVGMLGIEEVTYENCLQALADVEVKYIVERTMLDFPQHVSSDKEVRAASTEADKRLSRFDIEMSMRGDIFERIVHLQETCDLGKIKPEARRYLEKSIKMGKRNGLHLPEQVQNEIKSMKKRMSELCIDFNKNLNEDDTFLVFSKAELGALPDDFIDSLEKTDDDKYKITLKYPHYFPVMKKCCIPETRRRMEMAFNTRCKEENTIILQQLLPLRTKVAKLLGYSTHADFVLEMNTAKSTSRVTAFLDDLSQKLKPLGEAEREFILNLKKKECKDRGFEYDGKINAWDLYYYMTQTEELKYSIDQEFLKEYFPIEVVTEGLLNTYQELLGLSFEQMTDAHVWNKSVTLYTVKDKATGEVLGQFYLDLYPREGKYNHAACFGLQPGCLLPDGSRMMAVAALVVNFSQPVAGRPSLLRHDEVRTYFHEFGHVMHQICAQTDFARFSGTNVETDFVEVPSQMLENWVWDVDSLRRLSKHYKDGSPIADDLLEKLVASRLVNTGLLTLRQIVLSKVDQSLHTNTSLDAASEYAKYCSEILGVAATPGTNMPATFGHLAGGYDGQYYGYLWSEVFSMDMFYSCFKKEGIMNPEVGMKYRNLILKPGGSLDGMDMLHNFLKREPNQKAFLMSRGLHAP

SEQ ID NO: 669 - DNA, 1818 bp, Homo sapiens
acctgactgaaggaggccgcggacctgactgaaggaggccacggccacttctggttggcctcggggcgcgctggctcggctcttcctccgccctcgaggcccccgcagtcccatcattcagttccgtagggtcaccggcgcggcagtggcctcgcagggcgctgggtccctctccccagctctcctccccctggccgcgtcgccccgccctcgccgggctgggctgcggggtcaggggccgagcggagagggttatcatttaacatggaagaagatgagttcattggagaaaaaacattccaacgttattgtgcagaattcattaaacattcacaacagataggtgatagttgggaatggagaccatcaaaggactgttctgatggctacatgtgcaaaatacactttcaaattaagaatgggtctgtgatgtcacatctaggagcatctacccatggacagacatgtcttcccatggaggaggctttcgagctacccttggatgattgtgaagtgattgaaactgcagcagcgtccgaagtgattaaatatgagtatcatgtcttatattcctgtagctaccaagtgcctgtactttactttagggcaagctttttagatgggagacctttaactctgaaggacatatgggaaggagttcatgagtgctataagatgcgactgctacagggaccatgggacactattacgcaacaggaacatccaatacttgggcaacccttttttgtacttcatccctgcaagacgaatgaattcatgactcctgtattaaagaattctcagaaaatcaataagaatgtcaactatatcacatcatggctgagcattgtagggccagttgttgggctgaatctacctctgagttatgccaaagcaacgtctcaggatgaacgaaatgtcccttaacaagattcttctattgagtttaggaattgcggcacgaagaatgccaagagtttacctggccagccctggctttaataggactgataccatggaatatttcatctcaccaagatgtgacatggattatttttcccttggacacaaatgtctacagcaactggtgtttgataggctgaatgtttagaagaaacacttcaaagggatacatcatggccaggcatggtggctcacacctgtaatccaagcactttgggaggccaaggtgggagcatcacttgatcctgggagttcgagaccagcctgggcaacatggtgaaaccctgtcggtacaaaaaaatacaaaaatttgcctgtttatggtggtgtgttcctgtagtcccagctccccaggaggctgaggtgggaggttggctttaacccaggaggcagaggttgcagtgagctgagactgtgccactgcagtccagcctgggtgacagagccagacactgtctcgggaaaaaaaaaaaaaaagacacatcactataaatagcaaaaaaacaaatctaacttattaatactaggaataccaacattattagggcacttgcaggttattcttttctaggccaagtacttcacttccatttgtctgacatggagattgagggagaaatgtatttgtgtgttcattttaatgtaagatatataaaaattaaattactggatttacctgtccctgaaactggtgttataaacatgacctatcttaagtgattttcccacaatcaaactcaggaacaatagattatttctgttttactccaaaagagagagagagagtgagtgtgagtgtgtgtgtgtgtgtgtgtgtatgtgtgggtgtttgtgtagatagttgtaaaaaaaaaa

SEQ ID NO: 670 - protein, 220 aa, Homo sapiens
MEEDEFIGEKTFQRYCAEFIKHSQQIGDSWEWRPSKDCSDGYMCKIHFQIKNGSVMSHLGASTHGQTCLPMEEAFELPLDDCEVIETAAASEVIKYEYHVLYSCSYQVPVLYFRASFLDGRPLTLKDIWEGVHECYKMRLLQGPWDTITQQEHPILGQPFFVLHPCKTNEFMTPVLKNSQKINKNVNYITSWLSIVGPVVGLNLPLSYAKATSQDERNVP

SEQ ID NO: 671 - DNA, 2974 bp, Homo sapiens
agaagccccgcagccgccgcgcggagaacagcgacagccgagcgcccggtccgcctgtctgccggtgggtctgcctgcccgcgcagcagacccggggcggccgcgggagcccgcgccccgcccgccgcgcctctgccgggacccacccgcagcggagggctgagcccgccggcggctccccggagctcacccacctccgcgcgccggagcgcaggcaaaaggggaggaaaggctcctctctttagtcaccactctcgccctctccaagaatttgtttaacaaagcgctgaggaaagagaacgtcttcttgaattctttagtaggggcggagtctgctgctgccctgcgctgccacctcggctacactgccctccgcgacgacccctgaccagccggggtcacgtccgggagacgggatcatgaagcgctcggtagccgtctggctcttggtcgggctcagcctcggtgtcccccagttcggcaaaggtgatatttgtgatcccaatccatgtgaaaatggaggtatctgtttgccaggattggctgatggttccttttcctgtgagtgtccagatggcttcacagaccccaactgttctagtgttgtggaggttgcatcagatgaagaagaaccaacttcagcaggtccctgcactcctaatccatgccataatggaggaacctgtgaaataagtgaagcataccgaggggatacattcataggctatgtttgtaaatgtccccgaggatttaatgggattcactgtcagcacaacataaatgaatgcgaagttgagccttgcaaaaatggtggaatatgtacagatcttgttgctaactattcctgtgagtgcccaggcgaatttatgggaagaaattgtcaatacaaatgctcaggcccactgggaattgaaggtggaattatatcaaaccagcaaatcacagcttcctctactcaccgagctctttttggactccaaaaatggtatccctactatgcacgtcttaataagaaggggcttataaatgcgtggacagctgcagaaaatgacagatggccgtggattcagataaatttgcaaaggaaaatgagagttactggtgtgattacccaaggagccaagaggattggaagcccagagtatataaaatcctacaaaattgcctacagtaatgatggaaagacttgggcaatgtacaaagtgaaaggcaccaatgaagacatggtgtttcgtggaaacattgataacaacactccatatgctaactctttcacaccccccataaaagctcagtatgtaagactctatccccaagtttgtcgaagacattgcactttgcgaatggaacttcttggctgtgaactgtcgggttgttctgagcctctgggtatgaaatcaggacatatacaagactatcagatcactgcctccagcatcttcagaacgctcaacatggacatgttcacttgggaaccaaggaaagctcggctggacaagcaaggcaaagtgaatgcctggacctctggccacaatgaccagtcacaatggttacaggtggatcttcttgttccaaccaaagtgactggcatcattacacaaggagctaaagattttggtcatgtacagtttgttggctcctacaaactggcttacagcaatgatggagaacactggactgtataccaggatgaaaagcaaagaaaagataaggttttccagggaaattttgacaatgacactcacagaaaaaatgtcatcgaccctcccatctatgcacgacacataagaatccttccttggtcctggtacgggaggatcacattgcggtcagagctgctgggctgcacagaggaggaatgaggggaggctacatttcacaaccctcttccctatttccctaaaagtatctccatggaatgaactgtgcaaaatctgtaggaaactgaatggtttttttttttttttcatgaaaaagtgctcaaattatggtaggcaactaacggtgtttttaagggggtctaagcctgccttttcaatgatttaatttgattttattttatccgtcaaatctcttaagtaacaacacattaagtgtgaattacttttctctcattgtttcctgaattattcgcattggtagaaatatattagggaaagaaagtagccttctttttatagcaagagtaaaaaagtctcaaagtcatcaaataagagcaagagttgatagagcttttacaatcaatactcacctaattctgataaaaggaatactgcaatgttagcaataagtttttttcttctgtaatgactctacgttatcctgtttccctgtgcctaccaaacactgtcaatgtttattacaaaattttaaagaagaatatgtaacatgcagtactgatattataattctcattttactttcattatttctaataagagattatgtgacttctttttcttttagttctattctacattcttaatattgtatattacctgaataattcaatttttttctaattgaatttcctattagttgactaaaagaagtgtcatgtttactcatatatgtagaacatgactgcctatcagtagattgatctgtatttaatattcgttaattaaatctgcagttttatttttgaaggaagccataactatttaatttccaaataattgcttcataaagaatcccatactctcagtttgcacaaaagaacaaaaaatatatatgtctctttaaatttaaatcttcatttagatggtaattacatatccttatatttactttaaaaaatcggcttatttgtttattttataaaaaatttagcaaagaaatattaatatagtgctgcatagtttggccaagcatactcatcatttctttgttcagctccacatttcctgtgaaactaacatcttattgagatttgaaactggtggtagtttcccaggaaggcacaggtggagtt

SEQ ID NO: 672 - protein, 480 aa, Homo sapiens
MKRSVAVWLLVGLSLGVPQFGKGDICDPNPCENGGICLPGLADGSFSCECPDGFTDPNCSSVVEVASDEEEPTSAGPCTPNPCHNGGTCEISEAYRGDTFIGYVCKCPRGFNGIHCQHNINECEVEPCKNGGICTDLVANYSCECPGEFMGRNCQYKCSGPLGIEGGIISNQQITASSTHRALFGLQKWYPYYARLNKKGLINAWTAAENDRWPWIQINLQRKMRVTGVITQGAKRIGSPEYIKSYKIAYSNDGKTWAMYKVKGTNEDMVFRGNIDNNTPYANSFTPPIKAQYVRLYPQVCRRHCTLRMELLGCELSGCSEPLGMKSGHIQDYQITASSIFRTLNMDMFTWEPRKARLDKQGKVNAWTSGHNDQSQWLQVDLLVPTKVTGIITQGAKDFGHVQFVGSYKLAYSNDGEHWTVYQDEKQRKDKVFQGNFDNDTHRKNVIDPPIYARHIRILPWSWYGRITLRSELLGCTEEE

SEQ ID NO: 673 - DNA, 2310 bp, Homo sapiens
gcttcaatgccacggcctgaccggagtatccgccatggagtcgcagaaagaggcacgaacactccaggagcccgttgcgcggccttctggggcctcaagctctcagacgccgaacgacaaggagcggcgggagggcggcgcagtgccggcggcggctgccctgggcgcagaggcggacgacgacagtgcggacgggctgtgggagctgccggtggagccggccgagcggaggcctgagtgcacccgctgcagccggcctcagaaagtgtgtttgtgtccatttctcccagcgcaccctctgcatatctctacccacttgtacataattcagcatccagcagaggaaaacaaagtgttgcgtacagttcctctactagcagcatgcctcccccaggacaagtgtaaagtgaagatcggtcgtcgcttcagtgaagaaagagatcctgaactttcaactgtttgccggaagtctggtacattaatattatatccaggggctgaagctgctaatttggaagaatttatattagattctcctgtttatccttctacaatcatcatcattgatggtacatggagccaggctaaggacattttctataagaactccttgttccgacatcccaaacaggtgcaattaaaaactagcatttctagtcagtatgtaattcggatgcagccgactaatagatgcctttctacactggagtgtgcagctgttgctctttccatcttggagaaaaataattacatacaagagactttgcttcgccctcttcaagctttatgctcctttcaacttcagcatggtgcccaaattcgcctcagcaaggaacaccttctgaaaaatggattatatcctaaaccaatgccaaagaacaaacgcaaactcaggaaaatggaattgttaatgaatagtgttaaaatttagtacagttattcttttggtgctagcttaactgtcttcatctaacaataccaaattaagttttcatatagttaaggtctgtaggtttttgacttgctaaagaagaatgagaattgcatactaatcttacccagaagaaggaagtaaaccaaatattcataaatacaaataaacagaaattcactggctcactgaaaagcaggatttcctactgtacttgtttttaaaaatgtgcctctaatacatgttttcaaacccaaatttaaaatatgatttgttgttgtgataggttagaagttcttacttgtaaaatagaagaaaattgttgtagtggattggaacggtgttgtgtccattaatgtttataaataattaggtgtagaccaataatataagattcctacatcagtttgcagtcctgactttacagtttgaaataagtagcaaaagaaaattatgataatcaagtaatttattattttgtaaaatagtataaaggaataaggaaattttaagtattgtttaggggccaaatttgaactcagctaatatgatttaagcgctctattaattgccctgatttttaaagaggtgcatgtaattttgaaatagcacacattttcatttgtaatcactctggataaatttgtatttttcagtgttcattgaacaggcttattgactctggtaaacttattttattgatgttttcatatggaaaataataagtggaatatgatacaattgttattttcagaacatatttctttagggctatttaatataacctttttaacgagcaaaaactttccatttgagagaaaaaattcttcctgctctgtgggaaaatatttgctgagattttgtatagaataagagacatgtatgtaacatatatgtatattcagcacaagtctactgcaattatgtacacattttggcaagaagaggggattttgtttagtctttgtttatgacttctagagtttcctgtatctagtgttaagttgtaaggaaaaactaaacatgccatttaaaggtaaacttggtaactatttatagagcatacaccaatgattatttctcacagttttcatgatcatttgtttattatttacttggattagactcattaaaaggtataatgctggtcacaattagaatgctaatatttggggaaactatgcagaaaatattttaaaatattaaaagagtgctggcttctattgttgatttatttttggatttaaaaacaaattagggctgggcccattagctcacacctgtaatcccagcactttgggaggctgagatgtgagaattgcttgagcccaggagtttgagaccagcctgggcaatatggtgagactccatctccatac

SEQ ID NO: 674 - protein, 298 aa, Homo sapiens
MESQKEARTLQEPVARPSGASSSQTPNDKERREGGAVPAAAALGAEADDDSADGLWELPVEPAERRPECTRCSRPQKVCLCPFLPAHPLHISTHLYIIQHPAEENKVLRTVPLLAACLPQDKCKVKIGRRFSEERDPELSTVCRKSGTLILYPGAEAANLEEFILDSPVYPSTIIIIDGTWSQAKDIFYKNSLFRHPKQVQLKTSISSQYVIRMQPTNRCLSTLECAAVALSILEKNNYIQETLLRPLQALCSFQLQHGAQIRLSKEHLLKNGLYPKPMPKNKRKLRKMELLMNSVKI

SEQ ID NO: 675 - DNA, 2691 bp, Homo sapiens
gcttgcccgtcggtcgctagctcgctcggtgcgcgtcgtcccgctccatggcgctcttcgtgcggctgctggctctcgccctggctctggccctgggccccgccgcgaccctggcgggtcccgccaagtcgccctaccagctggtgctgcagcacagcaggctccggggccgccagcacggccccaacgtgtgtgctgtgcagaaggttattggcactaataggaagtacttcaccaactgcaagcagtggtaccaaaggaaaatctgtggcaaatcaacagtcatcagctacgagtgctgtcctggatatgaaaaggtccctggggagaagggctgtccagcagccctaccactctcaaacctttacgagaccctgggagtcgttggatccaccaccactcagctgtacacggaccgcacggagaagctgaggcctgagatggaggggcccggcagcttcaccatcttcgcccctagcaacgaggcctgggcctccttgccagctgaagtgctggactccctggtcagcaatgtcaacattgagctgctcaatgccctccgctaccatatggtgggcaggcgagtcctgactgatgagctgaaacacggcatgaccctcacctctatgtaccagaattccaacatccagatccaccactatcctaatgggattgtaactgtgaactgtgcccggctcctgaaagccgaccaccatgcaaccaacggggtggtgcacctcatcgataaggtcatctccaccatcaccaacaacatccagcagatcattgagatcgaggacacctttgagacccttcgggctgctgtggctgcatcagggctcaacacgatgcttgaaggtaacggccagtacacgcttttggccccgaccaatgaggccttcgagaagatccctagtgagactttgaaccgtatcctgggcgacccagaagccctgagagacctgctgaacaaccacatcttgaagtcagctatgtgtgctgaagccatcgttgcggggctgtctgtagagaccctggagggcacgacactggaggtgggctgcagcggggacatgctcactatcaacgggaaggcgatcatctccaataaagacatcctagccaccaacggggtgatccactacattgatgagctactcatcccagactcagccaagacactatttgaattggctgcagagtctgatgtgtccacagccattgaccttttcagacaagccggcctcggcaatcatctctctggaagtgagcggttgaccctcctggctcccctgaattctgtattcaaagatggaacccctccaattgatgcccatacaaggaatttgcttcggaaccacataattaaagaccagctggcctctaagtatctgtaccatggacagaccctggaaactctgggcggcaaaaaactgagagtttttgtttatcgtaatagcctctgcattgagaacagctgcatcgcggcccacgacaagagggggaggtacgggaccctgttcacgatggaccgggtgctgacccccccaatggggactgtcatggatgtcctgaagggagacaatcgctttagcatgctggtagctgccatccagtctgcaggactgacggagaccctcaaccgggaaggagtctacacagtctttgctcccacaaatgaagccttccgagccctgccaccaagagaacggagcagactcttgggagatgccaaggaacttgccaacatcctgaaataccacattggtgatgaaatcctggttagcggaggcatcggggccctggtgcggctaaagtctctccaaggtgacaagctggaagtcagcttgaaaaacaatgtggtgagtgtcaacaaggagcctgttgccgagcctgacatcatggccacaaatggcgtggtccatgtcatcaccaatgttctgcagcctccagccaacagacctcaggaaagaggggatgaacttgcagactctgcgcttgagatcttcaaacaagcatcagcgttttccagggcttcccagaggtctgtgcgactagcccctgtctatcaaaagttattagagaggatgaagcattagcttgaagcactacaggaggaatgcaccacggcagctctccgccaatttctctcagatttccacagagactgtttgaatgttttcaaaaccaagtatcacactttaatgtacatgggccgcaccataatgagatgtgagccttgtgcatgtgggggaggagggagagagatgtactttttaaatcatgttccccctaaacatggctgttaacccactgcatgcagaaacttggatgtcactgcctgacattcacttccagagaggacctatcccaaatgtggaattgactgcctatgccaagtccctggaaaaggagcttcagtattgtggggctcataaaacatgaatcaagcaatccagcctcatgggaagtcctggcacagtttttgtaaagcccttgcacagctggagaaatggcatcattataagctatgagttgaaatgttctgtcaaatgtgtctcacatctacacgtggcttggaggcttttatggggccctgtccaggtagaaaagaaatggtatgtagagcttagatttccctattgtgacagagccatggtgtgtttgtaataataaaaccaaagaaacata

SEQ ID NO: 676 - protein, 683 aa, Homo sapiens
MALFVRLLALALALALGPAATLAGPAKSPYQLVLQHSRLRGRQHGPNVCAVQKVIGTNRKYFTNCKQWYQRKICGKSTVISYECCPGYEKVPGEKGCPAALPLSNLYETLGVVGSTTTQLYTDRTEKLRPEMEGPGSFTIFAPSNEAWASLPAEVLDSLVSNVNIELLNALRYHMVGRRVLTDELKHGMTLTSMYQNSNIQIHHYPNGIVTVNCARLLKADHHATNGVVHLIDKVISTITNNIQQIIEIEDTFETLRAAVAASGLNTMLEGNGQYTLLAPTNEAFEKIPSETLNRILGDPEALRDLLNNHILKSAMCAEAIVAGLSVETLEGTTLEVGCSGDMLTINGKAIISNKDILATNGVIHYIDELLIPDSAKTLFELAAESDVSTAIDLFRQAGLGNHLSGSERLTLLAPLNSVFKDGTPPIDAHTRNLLRNHIIKDQLASKYLYHGQTLETLGGKKLRVFVYRNSLCIENSCIAAHDKRGRYGTLFTMDRVLTPPMGTVMDVLKGDNRFSMLVAAIQSAGLTETLNREGVYTVFAPTNEAFRALPPRERSRLLGDAKELANILKYHIGDEILVSGGIGALVRLKSLQGDKLEVSLKNNVVSVNKEPVAEPDIMATNGVVHVITNVLQPPANRPQERGDELADSALEIFKQASAFSRASQRSVRLAPVYQKLLERMKH

SEQ ID NO: 677 - DNA, 7096 bp, Homo sapiens
ccgggtcctgggcgagcgggcgccgtgcgcgtgtcccgcggccgagctgctaataaagttgcagcgaggagaagcgcagcgacggcgtcgggagagcgcgcctagccggctcgcgaaaaggaagctgttgaagttattgaagtacctgttgctatattctaagaaattaaaatgtccagaaatctgcctctaaatgggatctcactatgttgctcagactggacgtgattgaactcctgggctcaagtgagtctcccgaataactgggattacaggacttgacccaatgaaagaagcatatggcacttgtgaagataaatgttactcctccctttttaattggaacttctgcttaggacctgtgtatgacgtttcacctgtgatctgttctttcggtagccactgactttgagttacaggaaggtctccgaagatttgtgtcaaatgacgtcaatggccagcttgttttcttttactagtccagcagtaaagcgattgttgggctggaaacaaggtgatgaggaggagaaatgggcagaaaaggcagttgatgctttggtgaagaaactaaaaaagaaaaagggtgccatggaggaactggagaaagccttgagcagtccaggacagccgagtaaatgtgtcactattcccagatctttagatggacgcctgcaggtttctcacagaaaaggcttaccccatgttatatattgtcgtgtttggcgctggccggatttgcagagtcatcatgagctaaagccgttggatatttgtgaatttccttttggatctaagcaaaaagaagtttgtatcaacccataccactataagagagtggagagtccagtcttacctccagtattagtgcctcgtcataatgaattcaatccacaacacagccttctggttcagtttaggaacctgagccacaatgaaccacacatgccacaaaatgccacgtttccagattctttccaccagcccaacaacactccttttcccttatctccaaacagcccttatcccccttctcctgctagcagcacatatcccaactccccagcaagttctggaccaggaagtccatttcagctcccagctgatacgcctcctcctgcctatatgccacctgatgatcagatgggtcaagataattcccagcctatggatacaagcaataatatgattcctcagattatgcccagtatatccagcagggatgttcagcctgttgcctatgaagagcctaaacattggtgttcaatagtctactatgaattaaacaatcgtgttggagaagcttttcatgcatcttctactagtgtgttagtagatggattcacagatccttcaaataacaaaagtagattctgcttgggtttgttgtcaaatgttaatcgtaattcgacaattgaaaacactaggcgacatattggaaaaggtgttcatctgtactatgttggtggagaggtgtatgcggaatgcctcagtgacagcagcatatttgtacagagtaggaactgcaactttcatcatggctttcatcccaccactgtctgtaagattcccagcagctgcagcctcaaaatttttaacaatcaggagtttgctcagcttctggctcaatctgtcaaccatgggtttgaggcagtatatgagctcaccaaaatgtgtaccattcggatgagttttgtcaagggttggggagcagaatatcaccggcaggatgtaaccagcaccccatgttggattgagattcatcttcatgggcctcttcagtggctggataaagtccttactcagatgggctcccctctgaaccccatatcttctgtttcataatgcagaagtattcttttcaattatattgttagtggacttgttttaattttagagaaactttgagtacagatactgtgagcttacattgaaaacagatattacagcttatttttttctacataattgtgaccaatacatttgtattttgtgatgaatctacatttgtttgtattcatgttcatgtgattaactcttagaagtgttgtaaaagatgcagagtaagtattatgccccagttcagaaatttggcattgatcttaaactggaacatgcttttactttattgccctaacaattttttattaaatttatttgaaaatgcatcacatgatgaaaaattatagtagcttataagagggcatatacagtgaagagtaagttttccctcctactctcgatcttccagaagctgtacttttaccagtttctttgtcccaccaacttaaaaaaaaaaagtacaattcattgttttgcaaaagtgtatggtaggggcttaaaagaaactataaagttttatttgaatgaacactatgcactgctgtaactggtagtgttcagtaaaagcaaaatgatagttttctagatgacataaaatttacatttaatacagataagtgttcttcagtgtaatgtgacttcatgctatatatcttttgtaagacatttccttttttaaaaaaatttttgcaaataactgatctcaagtatatgtcatttactcaaaatctgtcataagcattactttatagctagtgacagtgcatgcacagccttgttcaactatgtttgctgcttttggacaatgttgcaagaactctatttttgacatgcattaatcttttattttgcacttttatgggtgacagtttttagcataacctttgataaaatacactcaagtgacttggacttagatgcttatccttacgtccttggtaccttttttgtattaacaaacactgcaatttatagattacatttgtaggaagttatgcttttttctggtttttgttttactttcaacctaggttataagactgttattctatagctccaacttaaggtgcctttttaattccctacagttttatgggtgttatcagtgctggagaatcatgtagttaatcccattgctcttacaagtgtcagcttacttgtatcagcctccctacgcaaggacctatgcactggagccgtaggaggctcttcagttgggccccaaggataaggctactgatttgatactaaatgaatcagcagtggatgtagggatagctgattttaaaacactcggctgggcacagtggctcacacctgtaatcccagcactttgggaggctgaggcaggcagatcatgatgtcaggagtttgagaccagcctggccaatatggtgaaaccctgtctctacaaaaaatacaaaaattagctgggcatggtggtgcgtgcctgaagtcccagctactcgggaagctgaggcagaagaatcacttgaacctgggaggcggaggttgtggtgagccgagatcgcaccactgcactccagcctgggcgacagagcgagactctgcctcaaaaaacaaaacaaaacaaaacactcacccatcaacgaatatagactcttctctcatttatcgatgatcctctttttccattttttaagtacttatgtggaagctagtctcccaaaacacaatctttagagagaaaagacatgaacgaactccaaaatatccatttaatcaatcatgtttttggctttggataaagaactttgaaccagtttttttctcaggagctgtcaaatggacacttaattatgacatgagaatgaagaaattattttggaaaaaaaaaatgacctaatttacctatcagtgaaagctttattttctggtgccttttgaaagtatatggagtcatatcattcttctgtttaaaatgttagtttggtttgactttccactttgtcctttctgctcttgtgaagaaaaaaaaaagcattttcgaggaaagaattatgcaatttcttttgttttctgtgtcattatttattgctttttcaatgtgcagccagtggatggttttagttctttcagatgaactgccatttgtgtttcagctcacagttctttgctgggtaaaagaaatactttctgacagtcacctgagccttaaatgtaagtattacatgacatgcattctgtttcttccagagttctgtctgccacacgaaagagaatatttgcttacttgatagaactttggcattttcatcattcttttacttaaccaggcttatggcatgatctctggaacaaatttgtaggaaaaaattactccaattgaatgactgatgtatgtaatcaacttcattgggctgcagtaaactagtggaaattagagagttgttttattggtgttttctactgtgagttaattaaaaattgtttttatttggggtcattatgtcacagtcttgagttaacaagatcttacgtgattggccttttctttgttttctcttaggagttgtgtctcatgaatgacagtactaaagctattaacaactaagagtttgacagagaactataagcctgttgtatctcctaaaagttgtcaactccccacccttggactttaaatgaaaattttattcagtccagctattcttacagtccctaaggattttcatatatctatgtataggagataaaatttgctagtaagatttttaaaaactggctagtgaaaggaaagtacctctgaaagaaaccattttagcaaattatggttatatgttttaatttaatctacagaatgttttatagtaaaattctagcaccactagaataatcacatagcatgtacaatatatttatgctggctgaaaagacagaatctgggaataataaaattgcaaccagtttggtaatgcaaacagcagaatagaatgaaatctcagtaatgaattaaagcaacaaaaagatattgattggcaaaaagcaagatataagagattcatttgcttaacatttctacataatatttatggtctggtcagtattggtctggtcagtattgcctggctgacgtgaaatgtaaactagtaggcgtgttattgatctgctaaaactaaccctctttttaagaggagatttaaggaagacgtcaatcaaaatgtcaaatatgtgtgtcagaatataaataatttttcacattgtattgttgctatataaaaaaaataatagaattggttgggtttctgaggtgaaatccagagtaagagtactagacagttcaacaagccacatctaatggcacagatagaggatgtagctattttatacctttcataacatttgagagtaagatatccttcaggatgtgaagtgattattaagtactcatacctgaaatctgttgtcaagattagaactggggttcatgttaaaaaccttccatattacctgagggtacctgtggggaacagttccttcccctgtgtggtagtattttgttggaagagaatgtttatacaaaaaatgaaattcttccaacagcagagaaactctaaaaagtttgatagtacctatcaaagtgctgtacttctgtgatagagaacatctgatgtaccaatttagatctatttctttatactttttctaatcaattgcttaatagtactttggatgattatcacctttgccacttaaaatatataaatatcctttttacttcatgaggaaggaagaattttttgataattactgagttcagccttttgtgatgacttatattttggacttacattttaactttaaagaatgtcagatcccttctttgtcttactagttaaatcctcacctaatctcttgggtatgaatataaatgtgtgtcatcgttatattgttcagctagatgagcaagtatcttagggtagtaggtagcctggtggttttagaagtgtttggtgatttttatggagagagttttcctaagtggtggtttataggtggtatcagatattattagggcagctttttggggagtaatctcaggtctcccagagcagcagcatttttctcattgatataagtaagattcttaggagcttttcttatcacacaagatgcctgaatcgaatgtgagaattgaaggcatttcttctgcataaacaaagaattctacctgctggacagaaacctggaaagttctttggaattcgctgaattacagtttagtatgtcctgattacagagtgacaatatttatcaagcctttgttatattggattatcttctctcttaaaatacaactgtattataattgaaatgacagcccaaaattggatggtttaccaaaaccaatgaaagggatttcacacatcaatttttatttctgttttgaagagcacatgctatataataattgctagtagcaactgcagtaaaacaggtgataagttattttctctgaaaagatccagtcctagagcaggattcttcgatcattcatggcagagtgaaaaaggtttgtatggttcttgtccaaataactcagttcttaaaattcttaaaatgatcgtaaaccattatcctttaaaggtttatttgaagatgctgttaaagtacagaattttgtgtacaggtagatttttccgtccctcattaatagtgccttcttaattaatacagactggtgttagctataacaaaactccagtaaggccaaagaatcccaagttctttgtggaaaaaaaaaaaaaatcttttagggtcagattttcccttctaatatcattgaagatgatgttgcattgatttattcataaagtattttaactataggaactctagaagataatggttaggcaagtgattttttttttaaatatggttggcgtaagttgtattttgaaattcacttattttaaaatcgaagaggattgtaatcatggaaatagaatgtttgtatctacctgcccacattttcttaaaaagatatttcatatacagataatgaagaccaagctagtggctgcactgtaggtctgctgcttatttgtatttgttgtgcttctgtttatgttgtagaagctgaaattctagcaacatgcttcaattctgttattttgatacttatgaaaatgtattaggttttactatattgtgcttttgaaagccataactcttaagaactttgtttttgcatattgtttgctaattctttactttaataaacctcaaaacctgc

SEQ ID NO: 678 - protein, 465 aa, Homo sapiens
MTSMASLFSFTSPAVKRLLGWKQGDEEEKWAEKAVDALVKKLKKKKGAMEELEKALSSPGQPSKCVTIPRSLDGRLQVSHRKGLPHVIYCRVWRWPDLQSHHELKPLDICEFPFGSKQKEVCINPYHYKRVESPVLPPVLVPRHNEFNPQHSLLVQFRNLSHNEPHMPQNATFPDSFHQPNNTPFPLSPNSPYPPSPASSTYPNSPASSGPGSPFQLPADTPPPAYMPPDDQMGQDNSQPMDTSNNMIPQIMPSISSRDVQPVAYEEPKHWCSIVYYELNNRVGEAFHASSTSVLVDGFTDPSNNKSRFCLGLLSNVNRNSTIENTRRHIGKGVHLYYVGGEVYAECLSDSSIFVQSRNCNFHHGFHPTTVCKIPSSCSLKIFNNQEFAQLLAQSVNHGFEAVYELTKMCTIRMSFVKGWGAEYHRQDVTSTPCWIEIHLHGPLQWLDKVLTQMGSPLNPISSVS

SEQ ID NO: 679 - DNA, 6937 bp, Homo sapiens
ccgggtcctgggcgagcgggcgccgtgcgcgtgtcccgcggccgagctgctaataaagttgcagcgaggagaagcgcagcgacggcgtcgggagagcgcgcctagccggctcgcgagacttgacccaatgaaagaagcatatggcacttgtgaagataaatgttactcctccctttttaattggaacttctgcttaggacctgtgtatgacgtttcacctgtgatctgttctttcggtagccactgactttgagttacaggaaggtctccgaagatttgtgtcaaatgacgtcaatggccagcttgttttcttttactagtccagcagtaaagcgattgttgggctggaaacaaggtgatgaggaggagaaatgggcagaaaaggcagttgatgctttggtgaagaaactaaaaaagaaaaagggtgccatggaggaactggagaaagccttgagcagtccaggacagccgagtaaatgtgtcactattcccagatctttagatggacgcctgcaggtttctcacagaaaaggcttaccccatgttatatattgtcgtgtttggcgctggccggatttgcagagtcatcatgagctaaagccgttggatatttgtgaatttccttttggatctaagcaaaaagaagtttgtatcaacccataccactataagagagtggagagtccagtcttacctccagtattagtgcctcgtcataatgaattcaatccacaacacagccttctggttcagtttaggaacctgagccacaatgaaccacacatgccacaaaatgccacgtttccagattctttccaccagcccaacaacactccttttcccttatctccaaacagcccttatcccccttctcctgctagcagcacatatcccaactccccagcaagttctggaccaggaagtccatttcagctcccagctgatacgcctcctcctgcctatatgccacctgatgatcagatgggtcaagataattcccagcctatggatacaagcaataatatgattcctcagattatgcccagtatatccagcagggatgttcagcctgttgcctatgaagagcctaaacattggtgttcaatagtctactatgaattaaacaatcgtgttggagaagcttttcatgcatcttctactagtgtgttagtagatggattcacagatccttcaaataacaaaagtagattctgcttgggtttgttgtcaaatgttaatcgtaattcgacaattgaaaacactaggcgacatattggaaaaggtgttcatctgtactatgttggtggagaggtgtatgcggaatgcctcagtgacagcagcatatttgtacagagtaggaactgcaactttcatcatggctttcatcccaccactgtctgtaagattcccagcagctgcagcctcaaaatttttaacaatcaggagtttgctcagcttctggctcaatctgtcaaccatgggtttgaggcagtatatgagctcaccaaaatgtgtaccattcggatgagttttgtcaagggttggggagcagaatatcaccggcaggatgtaaccagcaccccatgttggattgagattcatcttcatgggcctcttcagtggctggataaagtccttactcagatgggctcccctctgaaccccatatcttctgtttcataatgcagaagtattcttttcaattatattgttagtggacttgttttaattttagagaaactttgagtacagatactgtgagcttacattgaaaacagatattacagcttatttttttctacataattgtgaccaatacatttgtattttgtgatgaatctacatttgtttgtattcatgttcatgtgattaactcttagaagtgttgtaaaagatgcagagtaagtattatgccccagttcagaaatttggcattgatcttaaactggaacatgcttttactttattgccctaacaattttttattaaatttatttgaaaatgcatcacatgatgaaaaattatagtagcttataagagggcatatacagtgaagagtaagttttccctcctactctcgatcttccagaagctgtacttttaccagtttctttgtcccaccaacttaaaaaaaaaaagtacaattcattgttttgcaaaagtgtatggtaggggcttaaaagaaactataaagttttatttgaatgaacactatgcactgctgtaactggtagtgttcagtaaaagcaaaatgatagttttctagatgacataaaatttacatttaatacagataagtgttcttcagtgtaatgtgacttcatgctatatatcttttgtaagacatttccttttttaaaaaaatttttgcaaataactgatctcaagtatatgtcatttactcaaaatctgtcataagcattactttatagctagtgacagtgcatgcacagccttgttcaactatgtttgctgcttttggacaatgttgcaagaactctatttttgacatgcattaatcttttattttgcacttttatgggtgacagtttttagcataacctttgataaaatacactcaagtgacttggacttagatgcttatccttacgtccttggtaccttttttgtattaacaaacactgcaatttatagattacatttgtaggaagttatgcttttttctggtttttgttttactttcaacctaggttataagactgttattctatagctccaacttaaggtgcctttttaattccctacagttttatgggtgttatcagtgctggagaatcatgtagttaatcccattgctcttacaagtgtcagcttacttgtatcagcctccctacgcaaggacctatgcactggagccgtaggaggctcttcagttgggccccaaggataaggctactgatttgatactaaatgaatcagcagtggatgtagggatagctgattttaaaacactcggctgggcacagtggctcacacctgtaatcccagcactttgggaggctgaggcaggcagatcatgatgtcaggagtttgagaccagcctggccaatatggtgaaaccctgtctctacaaaaaatacaaaaattagctgggcatggtggtgcgtgcctgaagtcccagctactcgggaagctgaggcagaagaatcacttgaacctgggaggcggaggttgtggtgagccgagatcgcaccactgcactccagcctgggcgacagagcgagactctgcctcaaaaaacaaaacaaaacaaaacactcacccatcaacgaatatagactcttctctcatttatcgatgatcctctttttccattttttaagtacttatgtggaagctagtctcccaaaacacaatctttagagagaaaagacatgaacgaactccaaaatatccatttaatcaatcatgtttttggctttggataaagaactttgaaccagtttttttctcaggagctgtcaaatggacacttaattatgacatgagaatgaagaaattattttggaaaaaaaaaatgacctaatttacctatcagtgaaagctttattttctggtgccttttgaaagtatatggagtcatatcattcttctgtttaaaatgttagtttggtttgactttccactttgtcctttctgctcttgtgaagaaaaaaaaaagcattttcgaggaaagaattatgcaatttcttttgttttctgtgtcattatttattgctttttcaatgtgcagccagtggatggttttagttctttcagatgaactgccatttgtgtttcagctcacagttctttgctgggtaaaagaaatactttctgacagtcacctgagccttaaatgtaagtattacatgacatgcattctgtttcttccagagttctgtctgccacacgaaagagaatatttgcttacttgatagaactttggcattttcatcattcttttacttaaccaggcttatggcatgatctctggaacaaatttgtaggaaaaaattactccaattgaatgactgatgtatgtaatcaacttcattgggctgcagtaaactagtggaaattagagagttgttttattggtgttttctactgtgagttaattaaaaattgtttttatttggggtcattatgtcacagtcttgagttaacaagatcttacgtgattggccttttctttgttttctcttaggagttgtgtctcatgaatgacagtactaaagctattaacaactaagagtttgacagagaactataagcctgttgtatctcctaaaagttgtcaactccccacccttggactttaaatgaaaattttattcagtccagctattcttacagtccctaaggattttcatatatctatgtataggagataaaatttgctagtaagatttttaaaaactggctagtgaaaggaaagtacctctgaaagaaaccattttagcaaattatggttatatgttttaatttaatctacagaatgttttatagtaaaattctagcaccactagaataatcacatagcatgtacaatatatttatgctggctgaaaagacagaatctgggaataataaaattgcaaccagtttggtaatgcaaacagcagaatagaatgaaatctcagtaatgaattaaagcaacaaaaagatattgattggcaaaaagcaagatataagagattcatttgcttaacatttctacataatatttatggtctggtcagtattggtctggtcagtattgcctggctgacgtgaaatgtaaactagtaggcgtgttattgatctgctaaaactaaccctctttttaagaggagatttaaggaagacgtcaatcaaaatgtcaaatatgtgtgtcagaatataaataatttttcacattgtattgttgctatataaaaaaaataatagaattggttgggtttctgaggtgaaatccagagtaagagtactagacagttcaacaagccacatctaatggcacagatagaggatgtagctattttatacctttcataacatttgagagtaagatatccttcaggatgtgaagtgattattaagtactcatacctgaaatctgttgtcaagattagaactggggttcatgttaaaaaccttccatattacctgagggtacctgtggggaacagttccttcccctgtgtggtagtattttgttggaagagaatgtttatacaaaaaatgaaattcttccaacagcagagaaactctaaaaagtttgatagtacctatcaaagtgctgtacttctgtgatagagaacatctgatgtaccaatttagatctatttctttatactttttctaatcaattgcttaatagtactttggatgattatcacctttgccacttaaaatatataaatatcctttttacttcatgaggaaggaagaattttttgataattactgagttcagccttttgtgatgacttatattttggacttacattttaactttaaagaatgtcagatcccttctttgtcttactagttaaatcctcacctaatctcttgggtatgaatataaatgtgtgtcatcgttatattgttcagctagatgagcaagtatcttagggtagtaggtagcctggtggttttagaagtgtttggtgatttttatggagagagttttcctaagtggtggtttataggtggtatcagatattattagggcagctttttggggagtaatctcaggtctcccagagcagcagcatttttctcattgatataagtaagattcttaggagcttttcttatcacacaagatgcctgaatcgaatgtgagaattgaaggcatttcttctgcataaacaaagaattctacctgctggacagaaacctggaaagttctttggaattcgctgaattacagtttagtatgtcctgattacagagtgacaatatttatcaagcctttgttatattggattatcttctctcttaaaatacaactgtattataattgaaatgacagcccaaaattggatggtttaccaaaaccaatgaaagggatttcacacatcaatttttatttctgttttgaagagcacatgctatataataattgctagtagcaactgcagtaaaacaggtgataagttattttctctgaaaagatccagtcctagagcaggattcttcgatcattcatggcagagtgaaaaaggtttgtatggttcttgtccaaataactcagttcttaaaattcttaaaatgatcgtaaaccattatcctttaaaggtttatttgaagatgctgttaaagtacagaattttgtgtacaggtagatttttccgtccctcattaatagtgccttcttaattaatacagactggtgttagctataacaaaactccagtaaggccaaagaatcccaagttctttgtggaaaaaaaaaaaaaatcttttagggtcagattttcccttctaatatcattgaagatgatgttgcattgatttattcataaagtattttaactataggaactctagaagataatggttaggcaagtgattttttttttaaatatggttggcgtaagttgtattttgaaattcacttattttaaaatcgaagaggattgtaatcatggaaatagaatgtttgtatctacctgcccacattttcttaaaaagatatttcatatacagataatgaagaccaagctagtggctgcactgtaggtctgctgcttatttgtatttgttgtgcttctgtttatgttgtagaagctgaaattctagcaacatgcttcaattctgttattttgatacttatgaaaatgtattaggttttactatattgtgcttttgaaagccataactcttaagaactttgtttttgcatattgtttgctaattctttactttaataaacctcaaaacctgc

SEQ ID NO: 680 - protein, 465 aa, Homo sapiens; identical to SEQ ID NO: 678

SEQ ID NO: 681 - DNA, 7012 bp, Homo sapiens
ccgggtcctgggcgagcgggcgccgtgcgcgtgtcccgcggccgagctgctaataaagttgcagcgaggagaagcgcagcgacggcgtcgggagagcgcgcctagccggctcgcgaaaaggaagctgttgaagttattgaagtacctgttgctatattctaagaaattaaaatgtccagaaatctgcctctgacttgacccaatgaaagaagcatatggcacttgtgaagataaatgttactcctccctttttaattggaacttctgcttaggacctgtgtatgacgtttcacctgtgatctgttctttcggtagccactgactttgagttacaggaaggtctccgaagatttgtgtcaaatgacgtcaatggccagcttgttttcttttactagtccagcagtaaagcgattgttgggctggaaacaaggtgatgaggaggagaaatgggcagaaaaggcagttgatgctttggtgaagaaactaaaaaagaaaaagggtgccatggaggaactggagaaagccttgagcagtccaggacagccgagtaaatgtgtcactattcccagatctttagatggacgcctgcaggtttctcacagaaaaggcttaccccatgttatatattgtcgtgtttggcgctggccggatttgcagagtcatcatgagctaaagccgttggatatttgtgaatttccttttggatctaagcaaaaagaagtttgtatcaacccataccactataagagagtggagagtccagtcttacctccagtattagtgcctcgtcataatgaattcaatccacaacacagccttctggttcagtttaggaacctgagccacaatgaaccacacatgccacaaaatgccacgtttccagattctttccaccagcccaacaacactccttttcccttatctccaaacagcccttatcccccttctcctgctagcagcacatatcccaactccccagcaagttctggaccaggaagtccatttcagctcccagctgatacgcctcctcctgcctatatgccacctgatgatcagatgggtcaagataattcccagcctatggatacaagcaataatatgattcctcagattatgcccagtatatccagcagggatgttcagcctgttgcctatgaagagcctaaacattggtgttcaatagtctactatgaattaaacaatcgtgttggagaagcttttcatgcatcttctactagtgtgttagtagatggattcacagatccttcaaataacaaaagtagattctgcttgggtttgttgtcaaatgttaatcgtaattcgacaattgaaaacactaggcgacatattggaaaaggtgttcatctgtactatgttggtggagaggtgtatgcggaatgcctcagtgacagcagcatatttgtacagagtaggaactgcaactttcatcatggctttcatcccaccactgtctgtaagattcccagcagctgcagcctcaaaatttttaacaatcaggagtttgctcagcttctggctcaatctgtcaaccatgggtttgaggcagtatatgagctcaccaaaatgtgtaccattcggatgagttttgtcaagggttggggagcagaatatcaccggcaggatgtaaccagcaccccatgttggattgagattcatcttcatgggcctcttcagtggctggataaagtccttactcagatgggctcccctctgaaccccatatcttctgtttcataatgcagaagtattcttttcaattatattgttagtggacttgttttaattttagagaaactttgagtacagatactgtgagcttacattgaaaacagatattacagcttatttttttctacataattgtgaccaatacatttgtattttgtgatgaatctacatttgtttgtattcatgttcatgtgattaactcttagaagtgttgtaaaagatgcagagtaagtattatgccccagttcagaaatttggcattgatcttaaactggaacatgcttttactttattgccctaacaattttttattaaatttatttgaaaatgcatcacatgatgaaaaattatagtagcttataagagggcatatacagtgaagagtaagttttccctcctactctcgatcttccagaagctgtacttttaccagtttctttgtcccaccaacttaaaaaaaaaaagtacaattcattgttttgcaaaagtgtatggtaggggcttaaaagaaactataaagttttatttgaatgaacactatgcactgctgtaactggtagtgttcagtaaaagcaaaatgatagttttctagatgacataaaatttacatttaatacagataagtgttcttcagtgtaatgtgacttcatgctatatatcttttgtaagacatttccttttttaaaaaaatttttgcaaataactgatctcaagtatatgtcatttactcaaaatctgtcataagcattactttatagctagtgacagtgcatgcacagccttgttcaactatgtttgctgcttttggacaatgttgcaagaactctatttttgacatgcattaatcttttattttgcacttttatgggtgacagtttttagcataacctttgataaaatacactcaagtgacttggacttagatgcttatccttacgtccttggtaccttttttgtattaacaaacactgcaatttatagattacatttgtaggaagttatgcttttttctggtttttgttttactttcaacctaggttataagactgttattctatagctccaacttaaggtgcctttttaattccctacagttttatgggtgttatcagtgctggagaatcatgtagttaatcccattgctcttacaagtgtcagcttacttgtatcagcctccctacgcaaggacctatgcactggagccgtaggaggctcttcagttgggccccaaggataaggctactgatttgatactaaatgaatcagcagtggatgtagggatagctgattttaaaacactcggctgggcacagtggctcacacctgtaatcccagcactttgggaggctgaggcaggcagatcatgatgtcaggagtttgagaccagcctggccaatatggtgaaaccctgtctctacaaaaaatacaaaaattagctgggcatggtggtgcgtgcctgaagtcccagctactcgggaagctgaggcagaagaatcacttgaacctgggaggcggaggttgtggtgagccgagatcgcaccactgcactccagcctgggcgacagagcgagactctgcctcaaaaaacaaaacaaaacaaaacactcacccatcaacgaatatagactcttctctcatttatcgatgatcctctttttccattttttaagtacttatgtggaagctagtctcccaaaacacaatctttagagagaaaagacatgaacgaactccaaaatatccatttaatcaatcatgtttttggctttggataaagaactttgaaccagtttttttctcaggagctgtcaaatggacacttaattatgacatgagaatgaagaaattattttggaaaaaaaaaatgacctaatttacctatcagtgaaagctttattttctggtgccttttgaaagtatatggagtcatatcattcttctgtttaaaatgttagtttggtttgactttccactttgtcctttctgctcttgtgaagaaaaaaaaaagcattttcgaggaaagaattatgcaatttcttttgttttctgtgtcattatttattgctttttcaatgtgcagccagtggatggttttagttctttcagatgaactgccatttgtgtttcagctcacagttctttgctgggtaaaagaaatactttctgacagtcacctgagccttaaatgtaagtattacatgacatgcattctgtttcttccagagttctgtctgccacacgaaagagaatatttgcttacttgatagaactttggcattttcatcattcttttacttaaccaggcttatggcatgatctctggaacaaatttgtaggaaaaaattactccaattgaatgactgatgtatgtaatcaacttcattgggctgcagtaaactagtggaaattagagagttgttttattggtgttttctactgtgagttaattaaaaattgtttttatttggggtcattatgtcacagtcttgagttaacaagatcttacgtgattggccttttctttgttttctcttaggagttgtgtctcatgaatgacagtactaaagctattaacaactaagagtttgacagagaactataagcctgttgtatctcctaaaagttgtcaactccccacccttggactttaaatgaaaattttattcagtccagctattcttacagtccctaaggattttcatatatctatgtataggagataaaatttgctagtaagatttttaaaaactggctagtgaaaggaaagtacctctgaaagaaaccattttagcaaattatggttatatgttttaatttaatctacagaatgttttatagtaaaattctagcaccactagaataatcacatagcatgtacaatatatttatgctggctgaaaagacagaatctgggaataataaaattgcaaccagtttggtaatgcaaacagcagaatagaatgaaatctcagtaatgaattaaagcaacaaaaagatattgattggcaaaaagcaagatataagagattcatttgcttaacatttctacataatatttatggtctggtcagtattggtctggtcagtattgcctggctgacgtgaaatgtaaactagtaggcgtgttattgatctgctaaaactaaccctctttttaagaggagatttaaggaagacgtcaatcaaaatgtcaaatatgtgtgtcagaatataaataatttttcacattgtattgttgctatataaaaaaaataatagaattggttgggtttctgaggtgaaatccagagtaagagtactagacagttcaacaagccacatctaatggcacagatagaggatgtagctattttatacctttcataacatttgagagtaagatatccttcaggatgtgaagtgattattaagtactcatacctgaaatctgttgtcaagattagaactggggttcatgttaaaaaccttccatattacctgagggtacctgtggggaacagttccttcccctgtgtggtagtattttgttggaagagaatgtttatacaaaaaatgaaattcttccaacagcagagaaactctaaaaagtttgatagtacctatcaaagtgctgtacttctgtgatagagaacatctgatgtaccaatttagatctatttctttatactttttctaatcaattgcttaatagtactttggatgattatcacctttgccacttaaaatatataaatatcctttttacttcatgaggaaggaagaattttttgataattactgagttcagccttttgtgatgacttatattttggacttacattttaactttaaagaatgtcagatcccttctttgtcttactagttaaatcctcacctaatctcttgggtatgaatataaatgtgtgtcatcgttatattgttcagctagatgagcaagtatcttagggtagtaggtagcctggtggttttagaagtgtttggtgatttttatggagagagttttcctaagtggtggtttataggtggtatcagatattattagggcagctttttggggagtaatctcaggtctcccagagcagcagcatttttctcattgatataagtaagattcttaggagcttttcttatcacacaagatgcctgaatcgaatgtgagaattgaaggcatttcttctgcataaacaaagaattctacctgctggacagaaacctggaaagttctttggaattcgctgaattacagtttagtatgtcctgattacagagtgacaatatttatcaagcctttgttatattggattatcttctctcttaaaatacaactgtattataattgaaatgacagcccaaaattggatggtttaccaaaaccaatgaaagggatttcacacatcaatttttatttctgttttgaagagcacatgctatataataattgctagtagcaactgcagtaaaacaggtgataagttattttctctgaaaagatccagtcctagagcaggattcttcgatcattcatggcagagtgaaaaaggtttgtatggttcttgtccaaataactcagttcttaaaattcttaaaatgatcgtaaaccattatcctttaaaggtttatttgaagatgctgttaaagtacagaattttgtgtacaggtagatttttccgtccctcattaatagtgccttcttaattaatacagactggtgttagctataacaaaactccagtaaggccaaagaatcccaagttctttgtggaaaaaaaaaaaaaatcttttagggtcagattttcccttctaatatcattgaagatgatgttgcattgatttattcataaagtattttaactataggaactctagaagataatggttaggcaagtgattttttttttaaatatggttggcgtaagttgtattttgaaattcacttattttaaaatcgaagaggattgtaatcatggaaatagaatgtttgtatctacctgcccacattttcttaaaaagatatttcatatacagataatgaagaccaagctagtggctgcactgtaggtctgctgcttatttgtatttgttgtgcttctgtttatgttgtagaagctgaaattctagcaacatgcttcaattctgttattttgatacttatgaaaatgtattaggttttactatattgtgcttttgaaagccataactcttaagaactttgtttttgcatattgtttgctaattctttactttaataaacctcaaaacctgc

SEQ ID NO: 682 - protein, 465 aa, Homo sapiens; identical to SEQ ID NO: 678

SEQ ID NO: 683 - DNA, 1696 bp, Homo sapiens
cgccagaaagctcagtctcctgctcaaaacaggagcgcagcagccggagggagtggggacaagctcgctgaacactgggcgtctcgacagggaccagagcctgcaggactgttccgagacgctgcggtggcggcggcgccggaggacgcggaggactccctggccacccgccctccgtgcgctctgccaccgggcgctcagcagagaccccgggctgcggctgcacttgctgagtgcctctccccgccgccgcagcccagaggcgcccagcacctggagctcactggagctgagggtccgagctgagcgggctgttgtaaagccgaaaggcgagtcagtgactgggacctctgtcctggtggcgacggagagaaacagtgagcccgaggggcgcgggcacagaactgtccagctccgagaactggggtccgccagccggcggggaaagcagctgagcgcggaggcgagtgagcggacgcgtcccggggtctttgcagtccccgccggccccaaggcaccgactctcggtcagttgggcgcggcagggcgggaggggcgcgccatggaggcgccgggtcgcgccagtatgctccaggccaagtgaagcggtccggctggggtcggcgggacccgcgggccatgtacggcgacatattcaacgccacgggcggccccgaggcggcggtaggcagcgcgctggccccaggagccacggtcaaggcagaaggcgctttgccgctggagctggccactgcgcgcggtatgagggacggcgcggccacaaagcccgacctgcccacctacctgctgctcttcttcctgctgctgctctcggtggcgctcgtcgtcctcttcatcggttgccagctgcgccattcggccttcgccgcgctgccccacgaccgctcgctgcgcgacgcccgcgcgccctggaagacgcggccggtgtagcttgggactgagccacggccgccgggcgccccgtcccgacctagccaagagcagccagcttgagcctggtagggagggcacgacaccggggatcgctggcccctgggaacacggtgccctgacccaaagacccttcctgaactagagtggcaacccgagaggaaagggagaccgaggcgtcgggagcctgtgtagggtctcgatcccagtacctgtaggtaccgtgattctgatcccctggccaaatctttcttcctctggacagagggtccagtcgggaaaccttcccgaaagacggcggtcgggtcgggaaaccttcctgaaagacggcgcgccagcccgtcttgcttgctcgccgcctgctgacttccttactttgcacacggaaggggcaggaaccgcaagcgtgcaactagcctggagctacccgtctggactcgcaggccctgtggctgtttcccacagctgctacggcctctcttgctccttgacaccgaggaggaccccactaggatccgagcgtcgtgaactcacctgaactttggaaggttggcactggggggccgcatccccctgggaaatgactgaacgcggggtttcagtgggtcccgcctgggtctaaggacccagtttcttctgtgagcacgggcagtgggaggccggtggaaaggcgcaggggcccacctacgcgtctcacatcttcaggggcgcatttctacaataaaaactcacccaattagaccta

SEQ ID NO: 684 - DNA, 2589 bp, Homo sapiens
atgttgaggaacagcaccttcaaaaacatgcagcgccggcacacaacgctgagggagaagggccgtcgccaggccatccggggtcccgcctacatgttcaacgagaagggcaccagtctgacgcccgaggaggagcgcttcctggactcggctgagtatggcaacatcccggtggtccggaaaatgctggaggagtccaagacccttaacttcaactgtgtggactacatggggcagaacgctctgcagctggccgtgggcaacgagcacctagaggtcacggagctgctgctgaagaaggagaacctggcacgggtgggggacgcgctgctgctggccatcagcaagggctatgtgcgcatcgtggaggccatcctcaaccacccggccttcgcgcagggccagcgcctgacgctcagcccgctggaacaggagctgcgcgacgacgacttctatgcctacgacgaggacggcacgcgcttctcccacgacatcacgcccatcatcctggcggcgcactgccaggagtatgagatcgtgcacatcctgctgctcaagggcgcccgcatcgagcggccccacgactacttctgcaagtgcaatgagtgcaccgagaaacagcggaaagactccttcagccactcgcgctcgcgcatgaacgcctacaaaggactggcgagtgctgcctacttgtccctgtccagcgaagaccctgtcctcaccgccctggagctcagcaacgagttagccagactagccaacattgagactgaatttaagaacgattacaggaagttatctatgcaatgcaaggattttgtagtgggcgtgctggacctgtgccgagacacagaagaggtggaagcaattttaaacggtgatgtgaacttccaagtctggtccgaccaccaccgtccaagtctgagccggatcaaactcgccattaaatatgaagtcaagaagttcgttgctcatcctaactgtcagcagcaattgcttaccatgtggtatgaaaatctctcaggcttacgtcaacagtctatcgctgtgaaattcctggctgtctttggagtctccataggcctcccttttctcgccatagcctattggattgctccgtgcagcaagctaggacgaaccctgaggagccctttcatgaagtttgtagctcatgcagtttcttttacaatcttcttgggattattagttgtgaatgcatctgaccgatttgaaggtgttaaaaccctgccaaacgaaaccttcacagactacccaaaacaaatcttcagagtgaaaaccacacagttctcctggacagaaatgctcattatgaagtgggtcttaggaatgatttggtccgaatgcaaggaaatctgggaggaggggccacgggagtacgtgctgcacttgtggaacctgctagatttcgggatgctgtccatcttcgtggcctccttcacagcacgcttcatggccttcctgaaggccacggaggcacagctgtacgtggaccagcacgtgcaggacgacacgctgcacaatgtctcgcttccgccggaagtggcatacttcacctacgccagggacaagtggtggccttcagaccctcagatcatatcggaagggctctacgcgatagccgtcgtgctgagcttctctcgcattgcatacattctgccagccaacgagagttttgggcccctgcagatctcgctagggagaactgtgaaagatatcttcaagttcatggtcattttcatcatggtatttgtggccttcatgattgggatgttcaacctgtactcttactaccgaggtgccaaatacaacccagcgtttacaacggttgaagaaagttttaaaactttgttttggtccatattcggcttatctgaagtaatctcagtggtgctgaaatacgaccacaaattcatcgagaacattggctacgttctctacggcgtttataacgtcaccatggtggtagtgttgctcaacatgctaatagccatgataaacaactcctatcaggaaattgaggaggatgcagatgtggaatggaagttcgcccgagcaaaactctggctgtcttactttgatgaaggaagaactctacctgctccttttaatctagtgccaagtcctaaatcattttattatctcataatgagaatcaagatgtgcctcataaaactctgcaaatctaaggccaaaagctgtgaaaatgaccttgaaatgggcatgctgaattccaaattcaagaagactcgctaccaggctggcatgaggaattctgaaaatctgacagcaaataacactttgagcaagcccaccagataccagaaaatcatgaaacggctcataaaaagatacgtcctgaaagcccaggtggacagagaaaatgacgaagtcaatgaaggcgagctgaaggaaatcaagcaagatatctccagcctgcgctatgagcttcttgaggaaaaatctcaagctactggtgagctggcagacctgattcaacaactcagcgagaagtttggaaagaacttaaacaaagaccacctgagggtgaacaagggcaaagacatttag

SEQ ID NO: 685 - protein, 862 aa, Homo sapiens
MLRNSTFKNMQRRHTTLREKGRRQAIRGPAYMFNEKGTSLTPEEERFLDSAEYGNIPVVRKMLEESKTLNFNCVDYMGQNALQLAVGNEHLEVTELLLKKENLARVGDALLLAISKGYVRIVEAILNHPAFAQGQRLTLSPLEQELRDDDFYAYDEDGTRFSHDITPIILAAHCQEYEIVHILLLKGARIERPHDYFCKCNECTEKQRKDSFSHSRSRMNAYKGLASAAYLSLSSEDPVLTALELSNELARLANIETEFKNDYRKLSMQCKDFVVGVLDLCRDTEEVEAILNGDVNFQVWSDHHRPSLSRIKLAIKYEVKKFVAHPNCQQQLLTMWYENLSGLRQQSIAVKFLAVFGVSIGLPFLAIAYWIAPCSKLGRTLRSPFMKFVAHAVSFTIFLGLLVVNASDRFEGVKTLPNETFTDYPKQIFRVKTTQFSWTEMLIMKWVLGMIWSECKEIWEEGPREYVLHLWNLLDFGMLSIFVASFTARFMAFLKATEAQLYVDQHVQDDTLHNVSLPPEVAYFTYARDKWWPSDPQIISEGLYAIAVVLSFSRIAYILPANESFGPLQISLGRTVKDIFKFMVIFIMVFVAFMIGMFNLYSYYRGAKYNPAFTTVEESFKTLFWSIFGLSEVISVVLKYDHKFIENIGYVLYGVYNVTMVVVLLNMLIAMINNSYQEIEEDADVEWKFARAKLWLSYFDEGRTLPAPFNLVPSPKSFYYLIMRIKMCLIKLCKSKAKSCENDLEMGMLNSKFKKTRYQAGMRNSENLTANNTLSKPTRYQKIMKRLIKRYVLKAQVDRENDEVNEGELKEIKQDISSLRYELLEEKSQATGELADLIQQLSEKFGKNLNKDHLRVNKGKDI

SEQ ID NO: 686 - DNA, 4841 bp, Homo sapiens
agcacatcgctgcgggctcacaaagcggccagacgctcggcggcggcgtgtggcaggagcgcaggggcgcgagccggcgatcagccttcccggcgaccgtgccgcgggagctcgagcaactcggactaggggacccgggccggcccccaagatgccggcgatcgcggtgttggcggcggccgccgcggcgtggtgcttcctccaagtcgagagccggcacctggacgcgctcgccggaggcgcgggccccaaccacggcaatttcctagacaatgaccagtggctgagcaccgtctcccagtacgaccgggacaagtactggaaccgctttcgagacgatgattatttcagaaactggaatcccaacaagccctttgaccaagccctggacccatccaaggacccctgcctgaaggtaaaatgcagccctcacaaagtgtgtgtgacccaggactaccagaccgccctgtgtgtcagccgcaagcacctgctccccaggcaaaagaaggggaacgtggcccagaaacactgggttggaccttcgaatttggtcaagtgcaagccctgtcccgtggcacagtcagccatggtctgcggctcagatggccactcctacacatccaagtgcaaattggagttccatgcttgttctactggcaaaagcctcgccaccctctgtgatgggccctgtccctgtctcccagagcctgagccaccaaagcacaaggcagaaaggagtgcctgcacagacaaggagttgcggaaccttgcctcccggctgaaggattggtttggagctctccacgaggatgcgaacagagtcatcaagcccaccagctccaacacagcccaaggcaggtttgacactagcatcctgcccatctgcaaggactccctgggctggatgttcaacaagttggacatgaactatgacctcctgcttgacccttcagagatcaatgccatctacctggataagtacgagccctgtatcaagcctcttttcaactcgtgtgactccttcaaggatggcaagctttctaacaatgagtggtgctactgcttccagaagcctggaggtctcccttgccagaatgaaatgaacagaattcagaagctgagtaaggggaaaagcctgttgggggccttcatacctcggtgtaatgaggagggctattacaaagccacacagtgccacggcagcacggggcagtgctggtgtgtggacaaatatgggaatgagttggctggctccaggaaacagggtgctgtgagctgtgaagaggagcaggaaacctcaggggattttggcagtggtgggtccgtggtcctgctggatgacctagaatatgaacgggagctgggaccaaaggacaaagaggggaagctgagggtgcacacccgagccgtgacagaggatgatgaggatgaggatgatgacaaagaggatgaggtcgggtacatatggtagtgcccacaagaaagaggacacaagttttgcacaaaattgcaagtcacttcctattcctgcatttgtatctaagactccaaggcaccaaggtctcttctccattgttgctctctatacccgacctaaggtttggaagacaactgcttgttcccagaggattctgattttgcatatgtttgtatgggagaaagggtgttgtgttttttttttgttgttgtttattttttggatagggaagtcattggcttaattagagcctccttcctttctgtgagatttttccaacaagcatgtgatttacgtggaattctgacagtgcagggagccccaaccctcttaaatgtcaaagaccctttttgattacccacactggtggttattacagcatggttcccagccttacagtgtctaagtgcttctcttgtgtcctgtagatgttgtgaaaaagaaaaaaacaaaaaatacaccacactgtactttttccccctgcccccgttactgccggtgattattattaaaaattagtttttttcacatcattatatctggcttcctataaacaacagccttaattcagtcaagactccctttggggaattcattttattaaaaattggtgtctggatacttccctgtacatgcataaatatgcatgcatgtacagaaagactgtatgtgtgtgccttgcacacacacccatacctctcagaaaaagtgtttgggtatcttaaaaactcgaaaaacaatgataaatttctcagcttgtccagacctggaacaaaatttctggaataagaaatttgtattaaagtccttttttgcactaacagttggctcttgtagcctgcaggctgaggaagtctcttctctgtgcatcagcagagttactgaaagcctctgattgagaaaaaacctccgtctgcctaaatcacttttctcgcagaagccatgcgactcccacacgacacgggcagcttcacaagccatctctttcatttctgcttgaagccccttggctgcagcaatcctgtctgccataggtttcttccttccttacctactcaagggctttttctaaggcatgcacacatatctcctgttctctgagagtaccatggtgttccttaaaagaagaaaatttctaattctgaactcaatgttttgcttttactccctttctactgacaaatcatgataagggcacaaaagctgtacagatttttttttttaaccactcaatcccaaatggaggcctacaaagaacatcgtaataacacatggaagcaaaccctgggtttttaagagcaaattctgtccccccctcactcccccaagtgacaagatactaatgaagaaagttcttcaccatagtgtttgttttaactaaactcattggagtctagttccaaatttggtagggtcatcatctctacattccttaggatttctctccctatcaagctggcccagatacaagtaccaaacagtagtctctgaagttcccccatttccttcagtaccagtctataagctactgtccgccactgattttcatttatcagggtgtcctaatcagaatcagccacccaagcaagcctctctggcccacatatctatctcttgccttcccccatgaacttcagcctgtccacacaaaagccacataaactcaagcaagaaatatgttcagccaaaacatgattatagtggcagctgaccaatcccccatcccaaattgaccatttagatgtaccaactcaccttaaattagcatgttccaatccagtcggcattgcctgaatacagtagcatcatacctatagttggtcttagataagaaatgaactacttgatatagcaaagtcctttggcttcgtaaataaccctgaggttttgtacttactttccccataggaagacagaccataggcaaactctgttttgggatctcaactccatcacctttgtttcaatattttttttctctcttgaacaaaactgagataatttagaaaacaggtgcttaattgcaataaaattactatgaagtatattaaaaatcacgacattgtaaaatctcactttagatcatcaaagaaaaccattgttactatctcctttgagcttaggaaaatgtacaagagaacaaattaaaattgaaaaattgatttcacttagaaaaacttctaggaacagggtgaaccactgattttaatttgcctaattatcttatgacaagtatcaaattaagatgacacttaaagatccttagcattaacttaatgatggagaagagtgctcaatagacagttcccagtaaggtaatgagatgccattttcagagacattctaagaagatattttgattcattaaaacattaaataaaaagccctcctcagattggaacccccaaatcgatggagccacattaataatacttttcatgcctcactttgacatgacagcattcgatttttttaaagatctttaatactttccatgagtactaaagattgtaatgagttaccttatccttagaagtagaatgtttgctttcttcttcttggaaatagtcctccaaaaagtccacttgtaccagtgacaagaagtcacttgtatagtgaccaagtacacataaaatactgattataaaaatattgtaataaaccacttcctcatttgatacaggtattaagctgaatcctcactaattcacttttgaaaagttcttaatgaacagttttattcttattccatgaacagctcttttaatacaatttccttggtatccaacttaaatcccagaattttgttccaccatggttagttatttgccatatgaatgtattcttgtttctaccaatattctaggcatgagaataccttaatactgagttggagattttgtatctgtttctcctcctttacgcccattttcctacccacagcagcaaatgacaacgtgtctgtccaggtctgtccccctgctcatcccaggatgccactcacatttttttcttcttgttaccttgaccacgctgtacagtaacatccaagagcccattctacagtgggtggttttggtctttttataactttttctcaaagtcactgatgtttgttcctgttaaatgtatagcattgtaatgagagcccatcaaatcctgagtgtcagtttgttgtccctattgtagatgaaatagtgatgtagcaaaaacctagtaaattctgaatgcttttccacgtagacttatctggaatgtgaacacaactctttggttaatagtaaatgcttaactgtagtcctgagtaggtgcatttctgtctgtctcaataaattttactttgtctgcaaaaaaaaaaaaaaaa

SEQ ID NO: 687 - protein, 439 aa, Homo sapiens
MPAIAVLAAAAAAWCFLQVESRHLDALAGGAGPNHGNFLDNDQWLSTVSQYDRDKYWNRFRDDDYFRNWNPNKPFDQALDPSKDPCLKVKCSPHKVCVTQDYQTALCVSRKHLLPRQKKGNVAQKHWVGPSNLVKCKPCPVAQSAMVCGSDGHSYTSKCKLEFHACSTGKSLATLCDGPCPCLPEPEPPKHKAERSACTDKELRNLASRLKDWFGALHEDANRVIKPTSSNTAQGRFDTSILPICKDSLGWMFNKLDMNYDLLLDPSEINAIYLDKYEPCIKPLFNSCDSFKDGKLSNNEWCYCFQKPGGLPCQNEMNRIQKLSKGKSLLGAFIPRCNEEGYYKATQCHGSTGQCWCVDKYGNELAGSRKQGAVSCEEEQETSGDFGSGGSVVLLDDLEYERELGPKDKEGKLRVHTRAVTEDDEDEDDDKEDEVGYIW

SEQ ID NO: 688 - DNA, 4366 bp, Homo sapiens
tgcattctttgccccaaaactctttcctttggttgtgctaagaggtgatgcccaaggtgcaccacctttcaagaactggatcatgaacaactttatcctcctggaagaacagctcatcaagaaatcccaacaaaagagaagaacttctccctcgaactttaaagtccgcttctttgtgttaaccaaagccagcctggcatactttgaagatcgtcatgggaagaagcgcacgctgaaggggtccattgagctctcccgaatcaaatgtgttgagattgtgaaaagtgacatcagcatcccatgccactataaatacccgtttcaggtggtgcatgacaactacctcctatatgtgtttgctccagatcgtgagagccggcagcgctgggtgctggcccttaaagaagaaacgaggaataataacagtttggtgcctaaatatcatcctaatttctggatggatgggaagtggaggtgctgttctcagctggagaagcttgcaacaggctgtgcccaatatgatccaaccaagaatgcttcaaagaagcctcttcctcctactcctgaagacaacaggcgaccactttgggaacctgaagaaactgtggtcattgccttatatgactaccaaaccaatgatcctcaggaactcgcactgcggcgcaacgaagagtactgcctgctggacagttctgagattcactggtggagagtccaggacaggaatgggcatgaaggatatgtaccaagcagttatctggtggaaaaatctccaaataatctggaaacctatgagtggtacaataagagtatcagccgagacaaagctgaaaaacttcttttggacacaggcaaagaaggagccttcatggtaagggattccaggactgcaggaacatacaccgtgtctgttttcaccaaggctgttgtaagtgagaacaatccctgtataaagcattatcacatcaaggaaacaaatgacaatcctaagcgatactatgtggctgaaaagtatgtgttcgattccatccctcttctcatcaactatcaccaacataatggaggaggcctggtgactcgactccggtatccagtttgttttgggaggcagaaagccccagttacagcagggctgagatacgggaaatgggtgatcgacccctcagagctcacttttgtgcaagagattggcagtgggcaatttgggttggtgcatctgggctactggctcaacaaggacaaggtggctatcaaaaccattcgggaaggggctatgtcagaagaggacttcatagaggaggctgaagtaatgatgaaactctctcatcccaaactggtgcagctgtatggggtgtgcctggagcaggcccccatctgcctggtgtttgagttcatggagcacggctgcctgtcagattatctacgcacccagcggggactttttgctgcagagaccctgctgggcatgtgtctggatgtgtgtgagggcatggcctacctggaagaggcatgtgtcatccacagagacttggctgccagaaattgtttggtgggagaaaaccaagtcatcaaggtgtctgactttgggatgacaaggttcgttctggatgatcagtacaccagttccacaggcaccaaattcccggtgaagtgggcatccccagaggttttctctttcagtcgctatagcagcaagtccgatgtgtggtcatttggtgtgctgatgtgggaagttttcagtgaaggcaaaatcccgtatgaaaaccgaagcaactcagaggtggtggaagacatcagtaccggatttcggttgtacaagccccggctggcctccacacacgtctaccagattatgaatcactgctggaaagagagaccagaagatcggccagccttctccagactgctgcgtcaactggctgaaattgcagaatcaggactttagtagagactgagtaccaggccacgggctgcagatcctgaatggaggaaggatatgtcctcattccatagagcattagaagctgccaccagcccaggaccctccagaggcagcctggcctgtggcatcagtccctgagtcaccatggaagcagcatcctgaccacagctggcagtcaagccacagctggagggtcagccaccaagctgggagctgagccagaacaggagtgatgtctctgcccttcctctagcctcttgtcacatgtggtgcacaaacctcaacctgacagctttcagacagcattcttgcacttcttagcaacagagagagacatgagtaagacccagattgctatttttattgttatttttaacatgaatctaaagtttatggttccagggactttttatttgacccaacaacacagtatcccaggatatggaggcaaggggaacaaagagcatgagtctttttccaagaaaactggtgagttaagtaagattagagtgagtgtgctctgttgctgtgatgctgtcagccacagcttcctgccgtagagaatgatagagcagctgctcacacaggaggccggatattctgagaagcagctttatgaggttttacagagtatgctgctacctctctccttgaagggagcatggcgagacccattggatggattggggtgaacagttcaggtcccatgcttggagcattgggtatctgatgtctgcaccagaacaagagaacctctgacggtggagaaccatgtggtgcaagaagagatcttaggtctcttcttttataccaagctcatcttttataccaagctgtgcaggtgactatgcctcctcttctgcacagaatgcttccaccagcatcctgagaagaaatgattacttctgaaaaacatccttttttccagcctctgggaatcagccccccctctctgcactatccgatcctcatcaacagagggcagcattgtgttggtcaatgttcccttggcgagcaattgaaacttgtttaggccctagggttgagcaattttaaggttgagactccaagtctcctaaaattctaggagagaaataaagagtctgtttttgctcaaaccatcaggatggaaacagtcaggcactgactggggtgcttccaagaggcatgagagtgcctactctggcttgagcacttctatatgcaaggtgaatatgtactgagctaggagacttccctgcaaaatctctgttcaccctgggttcacatccccatgaggtaatattattattcccattttacaaataatgtaactgaggctttaaaaagccaagacatctgcccaaagtgatggaactagaaagtctagagctggtattctagcccaaatctgtctgaccgcaatacacagattctttattcctattcgacactggcttctactgaaaatgaaacggattgcagagggaataaatacaaagatggaaagccagtaaagaagtcagtatagaaccactagcgaatagtgttgctctggcacagaccactgtggttgatggcatggccctccaacttggaataggattttccttttcctattctgtatccttaccttggtcatgttaatgactttggagttattcagttaatgaccctttaattctcacaaccaaccagtcatgttgcttgaagccatttatagacgagcttcaaagcaactttaaaagattcttctgtagaagtatgagttcttcctttaattatcattccaactttcagctgtagtcttcttgaacacttcatgaggagggacattccctgatataagagaggatggtgttgcaattggctctttctaaatcatgtgacgttttgactggcttgagattcagatgcataatttttaattataattattgtgaagtggagagcctcaagataaaactctgtcattcagaagatgattttactcagcttatccaaaattatctctgtttactttttagaattttgtacattatcttttgggatccttaattagagatgatttctggaacattcagtctagaaagaaaacattggaattgactgatctctgtggtttggtttagaaaattcccctgtgcatggtattacctttttcaagctcagattcatctaatcctcaactgtacatgtgtacattcttcacctcctggtgccctatcccgcaaaatgggcttcctgcctggtttttctcttctcacattttttaaatggtcccctgtgtttgtagagaactcccttatacagagttttggttctagttttatttcgtagattttgcattttgtaccttttgagactatgtatttatatttggatcagatgcatatttattaatgtacagtcactgctagtgttcaaaataaaaatgttacaaat

SEQ ID NO: 689 - protein, 620 aa, Homo sapiens
MNNFILLEEQLIKKSQQKRRTSPSNFKVRFFVLTKASLAYFEDRHGKKRTLKGSIELSRIKCVEIVKSDISIPCHYKYPFQVVHDNYLLYVFAPDRESRQRWVLALKEETRNNNSLVPKYHPNFWMDGKWRCCSQLEKLATGCAQYDPTKNASKKPLPPTPEDNRRPLWEPEETVVIALYDYQTNDPQELALRRNEEYCLLDSSEIHWWRVQDRNGHEGYVPSSYLVEKSPNNLETYEWYNKSISRDKAEKLLLDTGKEGAFMVRDSRTAGTYTVSVFTKAVVSENNPCIKHYHIKETNDNPKRYYVAEKYVFDSIPLLINYHQHNGGGLVTRLRYPVCFGRQKAPVTAGLRYGKWVIDPSELTFVQEIGSGQFGLVHLGYWLNKDKVAIKTIREGAMSEEDFIEEAEVMMKLSHPKLVQLYGVCLEQAPICLVFEFMEHGCLSDYLRTQRGLFAAETLLGMCLDVCEGMAYLEEACVIHRDLAARNCLVGENQVIKVSDFGMTRFVLDDQYTSSTGTKFPVKWASPEVFSFSRYSSKSDVWSFGVLMWEVFSEGKIPYENRSNSEVVEDISTGFRLYKPRLASTHVYQIMNHCWKERPEDRPAFSRLLRQLAEIAESGL

SEQ ID NO: 690 - DNA, 6791 bp, Homo sapiens
ggacccgccgcagagccaggtaagcggccctcgcaggcctcgggccgggcacggggactaggatgccgccggggacggggatgaggccgtgaggatgcgcgaagggccgccccctctcccggcccgcggggggcgctcggcgctgtgcccgggctagcccgaggcccggcctcaggccccacgcggcccctttccccctcggacccaccgtgcgtcccgcggcacggaccctctgcccgggaggcgcgggcacatcgcggagctccggcgcggcggcgggggagccgcagcagcaggtgcgcggcctgggccggagccgccagcccgggaggaggcggtgctaatctcagggaccggagacacctgcagcggccgcgagcccggcagcggcgacatcctcgagtccagtgcagaatacagaaactgcagccatgaccacgcacgtcaccctggaagatgccctgtccaacgtggacctgcttgaagagcttcccctccccgaccagcagccatgcatcgagcctccaccttcctccatcatgtaccaggctaactttgacacaaactttgaggacaggaatgcatttgtcacgggcattgcaaggtacattgagcaggctacagtccactccagcatgaatgagatgctggaggaaggacatgagtatgcggtcatgctgtacacctggcgcagctgttcccgggccattccccaggtgaaatgcaacgagcagcccaaccgagtagagatctatgagaagacagtagaggtgctggagccggaggtcaccaagctcatgaagttcatgtattttcagcgcaaggccatcgagcggttctgcagcgaggtgaagcggctgtgccatgccgagcgcaggaaggactttgtctctgaggcctacctcctgacccttggcaagttcatcaacatgtttgctgtcctggatgagctaaagaacatgaagtgcagcgtcaagaatgaccactctgcctacaagagggcagcacagttcctgcggaagatggcagatccccagtctatccaggagtcgcagaacctttccatgttcctggccaaccacaacaggatcacccagtgtctccaccagcaacttgaagtgatcccaggctatgaggagctgctggctgacattgtcaacatctgtgtggattactacgagaacaagatgtacctgactcccagtgagaaacatatgctcctcaaggtgatgggctttggcctctacctaatggatggaaatgtcagtaacatttacaaactggatgccaagaagagaattaatcttagcaaaattgataaattctttaagcagctgcaggtggtgccccttttcggcgacatgcagatagagctggccagatacattaagaccagtgctcactatgaagagaacaagtccaagtggacgtgcacccagagcagcatcagcccccagtacaatatctgcgagcagatggttcagatccgggatgaccacatccgcttcatctccgagctcgctcgctacagcaacagtgaggtggtgacgggctcagggctggacagccagaagtcagacgaggagtatcgcgagctcttcgacctagccctgcggggtctgcagcttctatccaagtggagcgcccacgtcatggaggtgtactcttggaagctggttcatcccacagacaagttctgcaacaaggactgtcctggcaccgcggaggaatatgagagagccacacgctacaattacaccagtgaggaaaaatttgccttcgttgaggtgatcgccatgatcaaaggcctgcaggtgctcatgggcaggatggagagcgtcttcaaccaggccatcaggaacaccatctacgcggcattgcaggacttcgcccaggtgacgctgcgtgagcccctgcggcaggcggtacggaagaagaagaatgtcctcatcagcgtcctacaggcaattcgaaagaccatctgtgactgggagggagggcgagagccccctaatgacccatgcttgagaggggagaaggaccccaaaggtggatttgatatcaaggtgccccggcgtgctgtggggccatccagcacacagctgtacatggtgcggaccatgcttgaatcactcattgcagacaaaagcggctccaagaagaccctgaggagcagcctggatggacccattgtcctcgccatagaggactttcacaaacagtccttcttcttcacacatctgctcaacatcagtgaagccctgcagcagtgttgtgacctctcccagctctggttccgagaattcttcctggagttaaccatgggccgacgaatccagttccccatcgagatgtccatgccctggattctaacggaccatatcctggaaaccaaagaaccttccatgatggagtatgtcctctaccctctggatctgtacaacgacagcgcctactatgctctgaccaagtttaaaaagcagttcctgtacgatgagatagaagctgaggtgaacctgtgttttgatcagtttgtctacaagctggcagaccagatctttgcttactacaaagccatggctggcagtgtcctgttggataaacgttttcgagctgagtgtaagaattatggcgtcatcattccgtatccaccgtccaatcgctatgaaacactgctgaagcagagacacgtccagctgttgggtagatcaattgacttgaacagactcattacccagcgcatctctgccgccatgtataaatccttggaccaagctatcagccgctttgagagtgaggacctgacctccattgtggagctggagtggctgctggagattaaccggctcacgcatcggctgctctgtaagcatatgacgctggacagcttcgatgccatgttccgagaggccaatcacaatgtgtccgccccctatggccgtatcaccctgcatgtcttctgggaactgaactttgactttctccccaactactgctacaatgggtccactaaccgttttgtgcggactgccattcctttcacccaagaaccacaacgagacaaacctgccaacgtccagccttattacctctatggatccaagcctctcaacattgcctacagccacatctacagctcctacaggaatttcgtggggccacctcatttcaagactatctgcagactcctgggttatcagggcatcgctgtggtcatggaggaactgctaaagattgtgaagagcttgctccaaggaaccattctccagtatgtgaaaacactgatagaggtgatgcccaagatatgccgcttgccccgacatgagtatggctccccagggatcctggagttcttccaccaccagctgaaggacatcattgagtacgcagagctcaaaacagacgtgttccagagcctgagggaagtgggcaatgccatcctcttctgcctcctcatagagcaagctctgtctcaggaggaggtctgcgatttgctccatgccgcacccttccaaaacatcttgcctagagtctacatcaaagagggggagcgcctggaggtccggatgaaacgtctggaagccaagtatgccccgctccacctggtccctctgatcgagcggctggggacccctcagcaaatcgccattgctcgcgagggtgacctcctgaccaaggagcggctgtgctgtggcctgtccatgttcgaggtcatcctgacccgcattcggagctacctgcaggaccccatctggcggggcccaccgcccaccaatggcgtcatgcacgtcgatgagtgtgtggagttccaccggctgtggagcgccatgcagttcgtgtactgcatccctgtgggaaccaacgagttcacagctgagcagtgtttcggcgatggcttgaactgggctggttgctccatcattgtcctgctgggccagcagcgtcgctttgacctgttcgacttctgttaccacctgctaaaagtgcagaggcaggacgggaaggatgaaatcattaagaatgtgcccctgaagaagatggccgaccggatcaggaagtatcagatcttgaacaatgaggtttttgccatcctgaacaaatacatgaagtccgtggagacagacagttccactgtggagcatgtgcgctgcttccagccacccatccaccagtccttggccaccacttgctaagcagaagatcctgcagacccttatctggaggaggaagagaagcaggagagagaaagccacagccagcctgccataggatccaactggacaacgtgtgggatggacctggaaacaagcacctccccaaacacatcaccactccctagggcggggcctgtgcatgctctcccatgacatctccatgctggtttctccatagcataaatgaaaaaaaaaaaaaaaaagtaaacagggcagtgtgtgctttttcttttctcccccctcaactatattaagaactcctagtttcaccctttctccatcccatcatcccacctatctgtggttgcttcccaagacctcctcccaagatagacatctcctacccagtgcccttgtgtgaccccaggactcaagtctcagactgtgaacagatgtggccatgcccagagacgccagcctggccagaagggcatgcctcagcttactacttcatctctcctggttccctccctgcagtgccccgggtgtcatcttctcccactctgggtaccagggattctaccacataggcttcccaaagccccattctaactcccctctctcagggaagccctagagagaggtccaaaaagcattcacagctgtatcacactctatgcaggtggggtaggagactgatcaggcctgctgtggggaagcagtatgtatgaacacagccagaaatgtcatagtccaaacaggatgctttcaggccatctcagctgcttgatggtgagatggttcccttattccttcaggaaaggcttagcattgggccacataggggaagcagctttgaacaaatcagtcatagcactgcctatagcattagccagtgaccaaattagggacaacgtcttggcacagaattgcttatcaaggaacatttccacaagaaagaaaatattaaggggttatttccacagaagcccaaaacgtcttggaaacacagaggtgaggaggaggaatagtaattgtcaatgagcttttaataccaagatacaccccctgcccccaaagaagagtcctcttttagggaatcagaaccttcattgtcctagaagctgaaagattcttggaacattttagcttttactctcaacttgctgttctctttacattccttaagttagactttcgggtgtggcttctctcccaggggtaacatttacttccattttctagactgaaccaaaagtcttctgcagaatctcccaccgagtgtggtaagaaggaaggacaaaaggctttaggatataaatttcatgttacagagcatgtcattgtcaaaggaaatctgtggccctgagattttaagaacataaaatgtgacatttgatatttctccagcccagggaagtaagatggttagcaatggttgccttaatcaaatggtcccatttttaaccccaaaggaagtgcccacagcaagaggtttgtgtgatgcacttatgtcctccggtgaggaaagggggccacatatgaaaggccccttaggtcagatcctgagagtagcacatttgagtgcagattcctgggccccacctcaaacctactaattctgaatctctgggaatagggccaggaaatctgccctttctacaaactacccaagttgttctgttgcacatcaatgtttgggaaccactgctgtaagggaatcattctggtcaccttgagctttgagctaccactaagccatgaaagaaaatacatcatacagggaagagagaagggaggaggttccaagtagtaactggcagatcctcctgtctggaggtaccaccttctattctggtttctgacttttccttcttgatgaccatagatgtgttccagaggcaaaagagacacattatcccagatggcagaacatgctttcaaaacatataaaatgtcaaagttccagatccttctacatctttagtcctgtctgaggatggtagctggctctctgtagctgatagatggctagagttccatccaaatccttgaccacgacttcatggagatttgaataatctatttgatgagatttctatttcaataacccacctctctcaccccacattcatatccctaaatttgaccctctgggccgagtcacattaccttcaggagacttgatcccagtagactgaggtcttccctttcagcagaaagatttcatttccctggcttgccagtggcactgatttccgaacacccaatgagtttaatattctttcctccttggcattactgccccagcctctttttattttttttgtgtgtgtctaataaccaggaaaaaaataaagcttaggttttaaaaagttttaaaaataatctgtttcagaaactgtcaaatgtaccatatttgtattaagagttgttgggaatttttgtacaatgaatttacatttatttatggtgacatatttacgcttgtgatcaaataatgatgttaaattcttaaatcatatttgctatgcagctgaagatgatattttgatttgtattttgggggtacctgtgttgagttgataaacatttccatcttcattaaaactgcttccaaactagtaaaaccagcaa

SEQ ID NO: 691 - protein, 1253 aa, Homo sapiens
MTTHVTLEDALSNVDLLEELPLPDQQPCIEPPPSSIMYQANFDTNFEDRNAFVTGIARYIEQATVHSSMNEMLEEGHEYAVMLYTWRSCSRAIPQVKCNEQPNRVEIYEKTVEVLEPEVTKLMKFMYFQRKAIERFCSEVKRLCHAERRKDFVSEAYLLTLGKFINMFAVLDELKNMKCSVKNDHSAYKRAAQFLRKMADPQSIQESQNLSMFLANHNRITQCLHQQLEVIPGYEELLADIVNICVDYYENKMYLTPSEKHMLLKVMGFGLYLMDGNVSNIYKLDAKKRINLSKIDKFFKQLQVVPLFGDMQIELARYIKTSAHYEENKSKWTCTQSSISPQYNICEQMVQIRDDHIRFISELARYSNSEVVTGSGLDSQKSDEEYRELFDLALRGLQLLSKWSAHVMEVYSWKLVHPTDKFCNKDCPGTAEEYERATRYNYTSEEKFAFVEVIAMIKGLQVLMGRMESVFNQAIRNTIYAALQDFAQVTLREPLRQAVRKKKNVLISVLQAIRKTICDWEGGREPPNDPCLRGEKDPKGGFDIKVPRRAVGPSSTQLYMVRTMLESLIADKSGSKKTLRSSLDGPIVLAIEDFHKQSFFFTHLLNISEALQQCCDLSQLWFREFFLELTMGRRIQFPIEMSMPWILTDHILETKEPSMMEYVLYPLDLYNDSAYYALTKFKKQFLYDEIEAEVNLCFDQFVYKLADQIFAYYKAMAGSVLLDKRFRAECKNYGVIIPYPPSNRYETLLKQRHVQLLGRSIDLNRLITQRISAAMYKSLDQAISRFESEDLTSIVELEWLLEINRLTHRLLCKHMTLDSFDAMFREANHNVSAPYGRITLHVFWELNFDFLPNYCYNGSTNRFVRTAIPFTQEPQRDKPANVQPYYLYGSKPLNIAYSHIYSSYRNFVGPPHFKTICRLLGYQGIAVVMEELLKIVKSLLQGTILQYVKTLIEVMPKICRLPRHEYGSPGILEFFHHQLKDIIEYAELKTDVFQSLREVGNAILFCLLIEQALSQEEVCDLLHAAPFQNILPRVYIKEGERLEVRMKRLEAKYAPLHLVPLIERLGTPQQIAIAREGDLLTKERLCCGLSMFEVILTRIRSYLQDPIWRGPPPTNGVMHVDECVEFHRLWSAMQFVYCIPVGTNEFTAEQCFGDGLNWAGCSIIVLLGQQRRFDLFDFCYHLLKVQRQDGKDEIIKNVPLKKMADRIRKYQILNNEVFAILNKYMKSVETDSSTVEHVRCFQPPIHQSLATTC

SEQ ID NO: 692 - DNA, 6498 bp, Homo sapiens
cggggccggggcggggccgagcgcggcgcagcggagcggggcagagcatcctgcgccccggcgcggggccctgcggtagcctcaggcccctcccctggacccgccgcagagccagtgcagaatacagaaactgcagccatgaccacgcacgtcaccctggaagatgccctgtccaacgtggacctgcttgaagagcttcccctccccgaccagcagccatgcatcgagcctccaccttcctccatcatgtaccaggctaactttgacacaaactttgaggacaggaatgcatttgtcacgggcattgcaaggtacattgagcaggctacagtccactccagcatgaatgagatgctggaggaaggacatgagtatgcggtcatgctgtacacctggcgcagctgttcccgggccattccccaggtgaaatgcaacgagcagcccaaccgagtagagatctatgagaagacagtagaggtgctggagccggaggtcaccaagctcatgaagttcatgtattttcagcgcaaggccatcgagcggttctgcagcgaggtgaagcggctgtgccatgccgagcgcaggaaggactttgtctctgaggcctacctcctgacccttggcaagttcatcaacatgtttgctgtcctggatgagctaaagaacatgaagtgcagcgtcaagaatgaccactctgcctacaagagggcagcacagttcctgcggaagatggcagatccccagtctatccaggagtcgcagaacctttccatgttcctggccaaccacaacaggatcacccagtgtctccaccagcaacttgaagtgatcccaggctatgaggagctgctggctgacattgtcaacatctgtgtggattactacgagaacaagatgtacctgactcccagtgagaaacatatgctcctcaaggtgatgggctttggcctctacctaatggatggaaatgtcagtaacatttacaaactggatgccaagaagagaattaatcttagcaaaattgataaattctttaagcagctgcaggtggtgccccttttcggcgacatgcagatagagctggccagatacattaagaccagtgctcactatgaagagaacaagtccaagtggacgtgcacccagagcagcatcagcccccagtacaatatctgcgagcagatggttcagatccgggatgaccacatccgcttcatctccgagctcgctcgctacagcaacagtgaggtggtgacgggctcagggctggacagccagaagtcagacgaggagtatcgcgagctcttcgacctagccctgcggggtctgcagcttctatccaagtggagcgcccacgtcatggaggtgtactcttggaagctggttcatcccacagacaagttctgcaacaaggactgtcctggcaccgcggaggaatatgagagagccacacgctacaattacaccagtgaggaaaaatttgccttcgttgaggtgatcgccatgatcaaaggcctgcaggtgctcatgggcaggatggagagcgtcttcaaccaggccatcaggaacaccatctacgcggcattgcaggacttcgcccaggtgacgctgcgtgagcccctgcggcaggcggtacggaagaagaagaatgtcctcatcagcgtcctacaggcaattcgaaagaccatctgtgactgggagggagggcgagagccccctaatgacccatgcttgagaggggagaaggaccccaaaggtggatttgatatcaaggtgccccggcgtgctgtggggccatccagcacacagctgtacatggtgcggaccatgcttgaatcactcattgcagacaaaagcggctccaagaagaccctgaggagcagcctggatggacccattgtcctcgccatagaggactttcacaaacagtccttcttcttcacacatctgctcaacatcagtgaagccctgcagcagtgttgtgacctctcccagctctggttccgagaattcttcctggagttaaccatgggccgacgaatccagttccccatcgagatgtccatgccctggattctaacggaccatatcctggaaaccaaagaaccttccatgatggagtatgtcctctaccctctggatctgtacaacgacagcgcctactatgctctgaccaagtttaaaaagcagttcctgtacgatgagatagaagctgaggtgaacctgtgttttgatcagtttgtctacaagctggcagaccagatctttgcttactacaaagccatggctggcagtgtcctgttggataaacgttttcgagctgagtgtaagaattatggcgtcatcattccgtatccaccgtccaatcgctatgaaacactgctgaagcagagacacgtccagctgttgggtagatcaattgacttgaacagactcattacccagcgcatctctgccgccatgtataaatccttggaccaagctatcagccgctttgagagtgaggacctgacctccattgtggagctggagtggctgctggagattaaccggctcacgcatcggctgctctgtaagcatatgacgctggacagcttcgatgccatgttccgagaggccaatcacaatgtgtccgccccctatggccgtatcaccctgcatgtcttctgggaactgaactttgactttctccccaactactgctacaatgggtccactaaccgttttgtgcggactgccattcctttcacccaagaaccacaacgagacaaacctgccaacgtccagccttattacctctatggatccaagcctctcaacattgcctacagccacatctacagctcctacaggaatttcgtggggccacctcatttcaagactatctgcagactcctgggttatcagggcatcgctgtggtcatggaggaactgctaaagattgtgaagagcttgctccaaggaaccattctccagtatgtgaaaacactgatagaggtgatgcccaagatatgccgcttgccccgacatgagtatggctccccagggatcctggagttcttccaccaccagctgaaggacatcattgagtacgcagagctcaaaacagacgtgttccagagcctgagggaagtgggcaatgccatcctcttctgcctcctcatagagcaagctctgtctcaggaggaggtctgcgatttgctccatgccgcacccttccaaaacatcttgcctagagtctacatcaaagagggggagcgcctggaggtccggatgaaacgtctggaagccaagtatgccccgctccacctggtccctctgatcgagcggctggggacccctcagcaaatcgccattgctcgcgagggtgacctcctgaccaaggagcggctgtgctgtggcctgtccatgttcgaggtcatcctgacccgcattcggagctacctgcaggaccccatctggcggggcccaccgcccaccaatggcgtcatgcacgtcgatgagtgtgtggagttccaccggctgtggagcgccatgcagttcgtgtactgcatccctgtgggaaccaacgagttcacagctgagcagtgtttcggcgatggcttgaactgggctggttgctccatcattgtcctgctgggccagcagcgtcgctttgacctgttcgacttctgttaccacctgctaaaagtgcagaggcaggacgggaaggatgaaatcattaagaatgtgcccctgaagaagatggccgaccggatcaggaagtatcagatcttgaacaatgaggtttttgccatcctgaacaaatacatgaagtccgtggagacagacagttccactgtggagcatgtgcgctgcttccagccacccatccaccagtccttggccaccacttgctaagcagaagatcctgcagacccttatctggaggaggaagagaagcaggagagagaaagccacagccagcctgccataggatccaactggacaacgtgtgggatggacctggaaacaagcacctccccaaacacatcaccactccctagggcggggcctgtgcatgctctcccatgacatctccatgctggtttctccatagcataaatgaaaaaaaaaaaaaaaaagtaaacagggcagtgtgtgctttttcttttctcccccctcaactatattaagaactcctagtttcaccctttctccatcccatcatcccacctatctgtggttgcttcccaagacctcctcccaagatagacatctcctacccagtgcccttgtgtgaccccaggactcaagtctcagactgtgaacagatgtggccatgcccagagacgccagcctggccagaagggcatgcctcagcttactacttcatctctcctggttccctccctgcagtgccccgggtgtcatcttctcccactctgggtaccagggattctaccacataggcttcccaaagccccattctaactcccctctctcagggaagccctagagagaggtccaaaaagcattcacagctgtatcacactctatgcaggtggggtaggagactgatcaggcctgctgtggggaagcagtatgtatgaacacagccagaaatgtcatagtccaaacaggatgctttcaggccatctcagctgcttgatggtgagatggttcccttattccttcaggaaaggcttagcattgggccacataggggaagcagctttgaacaaatcagtcatagcactgcctatagcattagccagtgaccaaattagggacaacgtcttggcacagaattgcttatcaaggaacatttccacaagaaagaaaatattaaggggttatttccacagaagcccaaaacgtcttggaaacacagaggtgaggaggaggaatagtaattgtcaatgagcttttaataccaagatacaccccctgcccccaaagaagagtcctcttttagggaatcagaaccttcattgtcctagaagctgaaagattcttggaacattttagcttttactctcaacttgctgttctctttacattccttaagttagactttcgggtgtggcttctctcccaggggtaacatttacttccattttctagactgaaccaaaagtcttctgcagaatctcccaccgagtgtggtaagaaggaaggacaaaaggctttaggatataaatttcatgttacagagcatgtcattgtcaaaggaaatctgtggccctgagattttaagaacataaaatgtgacatttgatatttctccagcccagggaagtaagatggttagcaatggttgccttaatcaaatggtcccatttttaaccccaaaggaagtgcccacagcaagaggtttgtgtgatgcacttatgtcctccggtgaggaaagggggccacatatgaaaggccccttaggtcagatcctgagagtagcacatttgagtgcagattcctgggccccacctcaaacctactaattctgaatctctgggaatagggccaggaaatctgccctttctacaaactacccaagttgttctgttgcacatcaatgtttgggaaccactgctgtaagggaatcattctggtcaccttgagctttgagctaccactaagccatgaaagaaaatacatcatacagggaagagagaagggaggaggttccaagtagtaactggcagatcctcctgtctggaggtaccaccttctattctggtttctgacttttccttcttgatgaccatagatgtgttccagaggcaaaagagacacattatcccagatggcagaacatgctttcaaaacatataaaatgtcaaagttccagatccttctacatctttagtcctgtctgaggatggtagctggctctctgtagctgatagatggctagagttccatccaaatccttgaccacgacttcatggagatttgaataatctatttgatgagatttctatttcaataacccacctctctcaccccacattcatatccctaaatttgaccctctgggccgagtcacattaccttcaggagacttgatcccagtagactgaggtcttccctttcagcagaaagatttcatttccctggcttgccagtggcactgatttccgaacacccaatgagtttaatattctttcctccttggcattactgccccagcctctttttattttttttgtgtgtgtctaataaccaggaaaaaaataaagcttaggttttaaaaagttttaaaaataatctgtttcagaaactgtcaaatgtaccatatttgtattaagagttgttgggaatttttgtacaatgaatttacatttatttatggtgacatatttacgcttgtgatcaaataatgatgttaaattcttaaatcatatttgctatgcagctgaagatgatattttgatttgtattttgggggtacctgtgttgagttgataaacatttccatcttcattaaaactgcttccaaactagtaaaaccagcaa

SEQ ID NO: 693 - protein, 1253 aa, Homo sapiens; identical to SEQ ID NO: 691

SEQ ID NO: 694 - DNA, 6615 bp, Homo sapiens
ggaagggcctcttcctctgtgagaattcagcattttgcaaccatccaaaaatgttgagggcatgctttgcttccagggcagacagagcagcacagtgagcatgggacacaggatccctgacttgctgtgtgcccttaaaccagccactacctctctgacgttcaaaattgagcaatggaaggcagcctgcccaactgttacctgcctgtcatcatgaaagcctgcggatgagtgcagaatacagaaactgcagccatgaccacgcacgtcaccctggaagatgccctgtccaacgtggacctgcttgaagagcttcccctccccgaccagcagccatgcatcgagcctccaccttcctccatcatgtaccaggctaactttgacacaaactttgaggacaggaatgcatttgtcacgggcattgcaaggtacattgagcaggctacagtccactccagcatgaatgagatgctggaggaaggacatgagtatgcggtcatgctgtacacctggcgcagctgttcccgggccattccccaggtgaaatgcaacgagcagcccaaccgagtagagatctatgagaagacagtagaggtgctggagccggaggtcaccaagctcatgaagttcatgtattttcagcgcaaggccatcgagcggttctgcagcgaggtgaagcggctgtgccatgccgagcgcaggaaggactttgtctctgaggcctacctcctgacccttggcaagttcatcaacatgtttgctgtcctggatgagctaaagaacatgaagtgcagcgtcaagaatgaccactctgcctacaagagggcagcacagttcctgcggaagatggcagatccccagtctatccaggagtcgcagaacctttccatgttcctggccaaccacaacaggatcacccagtgtctccaccagcaacttgaagtgatcccaggctatgaggagctgctggctgacattgtcaacatctgtgtggattactacgagaacaagatgtacctgactcccagtgagaaacatatgctcctcaaggtgatgggctttggcctctacctaatggatggaaatgtcagtaacatttacaaactggatgccaagaagagaattaatcttagcaaaattgataaattctttaagcagctgcaggtggtgccccttttcggcgacatgcagatagagctggccagatacattaagaccagtgctcactatgaagagaacaagtccaagtggacgtgcacccagagcagcatcagcccccagtacaatatctgcgagcagatggttcagatccgggatgaccacatccgcttcatctccgagctcgctcgctacagcaacagtgaggtggtgacgggctcagggctggacagccagaagtcagacgaggagtatcgcgagctcttcgacctagccctgcggggtctgcagcttctatccaagtggagcgcccacgtcatggaggtgtactcttggaagctggttcatcccacagacaagttctgcaacaaggactgtcctggcaccgcggaggaatatgagagagccacacgctacaattacaccagtgaggaaaaatttgccttcgttgaggtgatcgccatgatcaaaggcctgcaggtgctcatgggcaggatggagagcgtcttcaaccaggccatcaggaacaccatctacgcggcattgcaggacttcgcccaggtgacgctgcgtgagcccctgcggcaggcggtacggaagaagaagaatgtcctcatcagcgtcctacaggcaattcgaaagaccatctgtgactgggagggagggcgagagccccctaatgacccatgcttgagaggggagaaggaccccaaaggtggatttgatatcaaggtgccccggcgtgctgtggggccatccagcacacagctgtacatggtgcggaccatgcttgaatcactcattgcagacaaaagcggctccaagaagaccctgaggagcagcctggatggacccattgtcctcgccatagaggactttcacaaacagtccttcttcttcacacatctgctcaacatcagtgaagccctgcagcagtgttgtgacctctcccagctctggttccgagaattcttcctggagttaaccatgggccgacgaatccagttccccatcgagatgtccatgccctggattctaacggaccatatcctggaaaccaaagaaccttccatgatggagtatgtcctctaccctctggatctgtacaacgacagcgcctactatgctctgaccaagtttaaaaagcagttcctgtacgatgagatagaagctgaggtgaacctgtgttttgatcagtttgtctacaagctggcagaccagatctttgcttactacaaagccatggctggcagtgtcctgttggataaacgttttcgagctgagtgtaagaattatggcgtcatcattccgtatccaccgtccaatcgctatgaaacactgctgaagcagagacacgtccagctgttgggtagatcaattgacttgaacagactcattacccagcgcatctctgccgccatgtataaatccttggaccaagctatcagccgctttgagagtgaggacctgacctccattgtggagctggagtggctgctggagattaaccggctcacgcatcggctgctctgtaagcatatgacgctggacagcttcgatgccatgttccgagaggccaatcacaatgtgtccgccccctatggccgtatcaccctgcatgtcttctgggaactgaactttgactttctccccaactactgctacaatgggtccactaaccgttttgtgcggactgccattcctttcacccaagaaccacaacgagacaaacctgccaacgtccagccttattacctctatggatccaagcctctcaacattgcctacagccacatctacagctcctacaggaatttcgtggggccacctcatttcaagactatctgcagactcctgggttatcagggcatcgctgtggtcatggaggaactgctaaagattgtgaagagcttgctccaaggaaccattctccagtatgtgaaaacactgatagaggtgatgcccaagatatgccgcttgccccgacatgagtatggctccccagggatcctggagttcttccaccaccagctgaaggacatcattgagtacgcagagctcaaaacagacgtgttccagagcctgagggaagtgggcaatgccatcctcttctgcctcctcatagagcaagctctgtctcaggaggaggtctgcgatttgctccatgccgcacccttccaaaacatcttgcctagagtctacatcaaagagggggagcgcctggaggtccggatgaaacgtctggaagccaagtatgccccgctccacctggtccctctgatcgagcggctggggacccctcagcaaatcgccattgctcgcgagggtgacctcctgaccaaggagcggctgtgctgtggcctgtccatgttcgaggtcatcctgacccgcattcggagctacctgcaggaccccatctggcggggcccaccgcccaccaatggcgtcatgcacgtcgatgagtgtgtggagttccaccggctgtggagcgccatgcagttcgtgtactgcatccctgtgggaaccaacgagttcacagctgagcagtgtttcggcgatggcttgaactgggctggttgctccatcattgtcctgctgggccagcagcgtcgctttgacctgttcgacttctgttaccacctgctaaaagtgcagaggcaggacgggaaggatgaaatcattaagaatgtgcccctgaagaagatggccgaccggatcaggaagtatcagatcttgaacaatgaggtttttgccatcctgaacaaatacatgaagtccgtggagacagacagttccactgtggagcatgtgcgctgcttccagccacccatccaccagtccttggccaccacttgctaagcagaagatcctgcagacccttatctggaggaggaagagaagcaggagagagaaagccacagccagcctgccataggatccaactggacaacgtgtgggatggacctggaaacaagcacctccccaaacacatcaccactccctagggcggggcctgtgcatgctctcccatgacatctccatgctggtttctccatagcataaatgaaaaaaaaaaaaaaaaagtaaacagggcagtgtgtgctttttcttttctcccccctcaactatattaagaactcctagtttcaccctttctccatcccatcatcccacctatctgtggttgcttcccaagacctcctcccaagatagacatctcctacccagtgcccttgtgtgaccccaggactcaagtctcagactgtgaacagatgtggccatgcccagagacgccagcctggccagaagggcatgcctcagcttactacttcatctctcctggttccctccctgcagtgccccgggtgtcatcttctcccactctgggtaccagggattctaccacataggcttcccaaagccccattctaactcccctctctcagggaagccctagagagaggtccaaaaagcattcacagctgtatcacactctatgcaggtggggtaggagactgatcaggcctgctgtggggaagcagtatgtatgaacacagccagaaatgtcatagtccaaacaggatgctttcaggccatctcagctgcttgatggtgagatggttcccttattccttcaggaaaggcttagcattgggccacataggggaagcagctttgaacaaatcagtcatagcactgcctatagcattagccagtgaccaaattagggacaacgtcttggcacagaattgcttatcaaggaacatttccacaagaaagaaaatattaaggggttatttccacagaagcccaaaacgtcttggaaacacagaggtgaggaggaggaatagtaattgtcaatgagcttttaataccaagatacaccccctgcccccaaagaagagtcctcttttagggaatcagaaccttcattgtcctagaagctgaaagattcttggaacattttagcttttactctcaacttgctgttctctttacattccttaagttagactttcgggtgtggcttctctcccaggggtaacatttacttccattttctagactgaaccaaaagtcttctgcagaatctcccaccgagtgtggtaagaaggaaggacaaaaggctttaggatataaatttcatgttacagagcatgtcattgtcaaaggaaatctgtggccctgagattttaagaacataaaatgtgacatttgatatttctccagcccagggaagtaagatggttagcaatggttgccttaatcaaatggtcccatttttaaccccaaaggaagtgcccacagcaagaggtttgtgtgatgcacttatgtcctccggtgaggaaagggggccacatatgaaaggccccttaggtcagatcctgagagtagcacatttgagtgcagattcctgggccccacctcaaacctactaattctgaatctctgggaatagggccaggaaatctgccctttctacaaactacccaagttgttctgttgcacatcaatgtttgggaaccactgctgtaagggaatcattctggtcaccttgagctttgagctaccactaagccatgaaagaaaatacatcatacagggaagagagaagggaggaggttccaagtagtaactggcagatcctcctgtctggaggtaccaccttctattctggtttctgacttttccttcttgatgaccatagatgtgttccagaggcaaaagagacacattatcccagatggcagaacatgctttcaaaacatataaaatgtcaaagttccagatccttctacatctttagtcctgtctgaggatggtagctggctctctgtagctgatagatggctagagttccatccaaatccttgaccacgacttcatggagatttgaataatctatttgatgagatttctatttcaataacccacctctctcaccccacattcatatccctaaatttgaccctctgggccgagtcacattaccttcaggagacttgatcccagtagactgaggtcttccctttcagcagaaagatttcatttccctggcttgccagtggcactgatttccgaacacccaatgagtttaatattctttcctccttggcattactgccccagcctctttttattttttttgtgtgtgtctaataaccaggaaaaaaataaagcttaggttttaaaaagttttaaaaataatctgtttcagaaactgtcaaatgtaccatatttgtattaagagttgttgggaatttttgtacaatgaatttacatttatttatggtgacatatttacgcttgtgatcaaataatgatgttaaattcttaaatcatatttgctatgcagctgaagatgatattttgatttgtattttgggggtacctgtgttgagttgataaacatttccatcttcattaaaactgcttccaaactagtaaaaccagcaa

SEQ ID NO: 695 - protein, 1253 aa, Homo sapiens; identical to SEQ ID NO: 691

SEQ ID NO: 696 - DNA, 2126 bp, Homo sapiens
aatgatgctgatctgaagaaatgaataatgtgagcattaggggcggcagtgggattactcagtgttgagagaaacaacacggaaagcccagagcagaggagggagaaggccccattctctcagctttaatctactgcacctcggagggcagagctctaaccagacacgctgcaagcatcagaatcgggatgaacatcgaggtggggaacatttcttatacaggagccatcatctcctggtcgtcctcggagccctgcctggaggactattaccatattatgtacaggcccaactggaacagcatcttctctggctatcttcgctacagcttccaccacgaggagaaggtgcctcgaacgatcagctccgtggtgctggaacatcttgccccttccactctctacttcctgtgcatcagctgtaagaaggctgccttcccttacaggcactactgcaccatgttccacaccctggataagagtccgctggctcctggaagctccctggtagacccccagatctccctttgggtgctgatggccattctgctggcctgcttcacagccgtcttggccttcatctgcctccagttctggtgtgtccgttgccatgagccgcgatggtcttacagggctggccacatggaggaggccaatgggttggtgagatggccagaggaggccccggatcttggtcagagggaggaagacctgcaggggctccccctggtggaaatgccacgcaagaactccagagatggagctgaactggatcccgaagccaaccaggatgcccctgatgcgggtgccttacagagggggggtggtgacccacccgctatactgcctcattgtggggaatgagagtggggaggagagcgcccgcatcatgtagcctaaagctttccacacagtaggtcgtttgtacaaatgtgtctatagactacccatttctctcccatcaaacgtcactgctattgtaggtcacctgggttggatgaatgccccatgacaaagcttctcaagctggaaaatgtatcccccagggtatgccaaggcacaaacgaggcatctcagcagcagcgtccactcggaggacacagttaagaattgaaagcattgttttaacattaaaacaaacatggatatgttataaagtagaaagcaaaaatttgcatgacaaataaaacacagcacttgaaggaaacacttgagttacaagtaggctctcagaggtacacttttgggcaaaggtagatgtccagtttcctctgcccttgaggggattatttggaaataatttgggattatttggaaataatttgtgagaacccttgctctggagtgttttccaacttttaggcaatcacataccaccgctctctattttttaaaaccatggattatcttcactattattaataatactttcctttaaattgactcattttttaagcgtaaacttattttcaaagacagccttatattactccataagtgaaaaaccagcaccctcctgctgcaaacagaagggaagagacataagaataaacatcatgaaaacaagataatattaaataatctgacttagcttctattgcctgccagtgattctgagcttaatgcctgcttgcttgtctttgataaaaagggagatccagtgttggagaggtaataaagacatattagcaccaatatttgtctttctccttgatatagcataaggtttgaaagagaatcgaaaagggaagtgctgtttttactttgcgagtcagtgttagttaaatgccatgtctgtgaaccacctcaaatgctgtcagtcagcttcccttgatttgagaaaattgtcttgaccagactaggcaggctgttctggagaagacgcctgtactctccaagcatcatccaagaccttcccagtaccctcttatatctatagagcacaaaatcccagaatcacaggacgacactgcagtgaatcaactaagaaacagcaggagctgagaagccaagacgagaagccccacatccctattcccttgcctacctcatgcattccctgctcggcacccagacttttgcccccattcctgctacttgtgaacaaataaagattcatatactcac

SEQ ID NO: 697 - protein, 224 aa, Homo sapiens
MNIEVGNISYTGAIISWSSSEPCLEDYYHIMYRPNWNSIFSGYLRYSFHHEEKVPRTISSVVLEHLAPSTLYFLCISCKKAAFPYRHYCTMFHTLDKSPLAPGSSLVDPQISLWVLMAILLACFTAVLAFICLQFWCVRCHEPRWSYRAGHMEEANGLVRWPEEAPDLGQREEDLQGLPLVEMPRKNSRDGAELDPEANQDAPDAGALQRGGGDPPAILPHCGE

SEQ ID NO: 698 - DNA, 2370 bp, Homo sapiens
agtctctccttgtaccctccccctgcctcgatgatattactcccccagacttggaagccgctgccagagtgacgctttgatggtatctgcaagcgtttttgctgatcttatctctgccccctgaatattaattccctaatctggtagcaatccatctccccagtgaaggacctactagaggcaggtggggggagccaccatcagatcataagcataagaataatacaaaggggagggattcttctgcaaccaagaggcaagaggcgagagaaggaaaaaaaaaaaagcgatgagttcgccaaatatatggagcacaggaagctcagtctactcgactcctgtattttcacagaaaatgacggtgtggattctgctcctgctgtcgctctaccctggcttcactagccagaaatctgatgatgactatgaagattatgcttctaacaaaacatgggtcttgactccaaaagttcctgagggtgatgtcactgtcatcttaaacaacctgctggaaggatatgacaataaacttcggcctgatataggagtgaagccaacgttaattcacacagacatgtatgtgaatagcattggtccagtgaacgctatcaatatggaatacactattgatatattttttgcgcaaacgtggtatgacagacgtttgaaatttaacagcaccattaaagtcctccgattgaacagcaacatggtggggaaaatctggattccagacactttcttcagaaattccaaaaaagctgatgcacactggatcaccacccccaacaggatgctgagaatttggaatgatggtcgagtgctctacaccctaaggttgacaattgatgctgagtgccaattacaattgcacaactttccaatggatgaacactcctgccccttggagttctccagttatggctatccacgtgaagaaattgtttatcaatggaagcgaagttctgttgaagtgggcgacacaagatcctggaggctttatcaattctcatttgttggtctaagaaataccaccgaagtagtgaagacaacttccggagattatgtggtcatgtctgtctactttgatctgagcagaagaatgggatactttaccatccagacctatatcccctgcacactcattgtcgtcctatcctgggtgtctttctggatcaataaggatgctgttccagccagaacatctttaggtatcaccactgtcctgacaatgaccaccctcagcaccattgcccggaaatcgctccccaaggtctcctatgtcacagcgatggatctctttgtatctgtttgtttcatctttgtcttctctgctctggtggagtatggcaccttgcattattttgtcagcaaccggaaaccaagcaaggacaaagataaaaagaagaaaaaccctgcccctaccattgatatccgcccaagatcagcaaccattcaaatgaataatgctacacaccttcaagagagagatgaagagtacggctatgagtgtctggacggcaaggactgtgccagttttttctgctgttttgaagattgtcgaacaggagcttggagacatgggaggatacatatccgcattgccaaaatggactcctatgctcggatcttcttccccactgccttctgcctgtttaatctggtctattgggtctcctacctctacctgtgaggaggtatgggttttactgatatggttcttattcactgagtctcatggagagatgtctgttctaagtccacttaaataatcctctatgtggttgataatgatctgaatctgtttctatgtccaaacctggtaaattttataatgtcatattgtttgtgcccagccctcctttggttagtgtactttgaacttcgatgtttgctgtgtttcaaacctgcaaggcaaagtaaaattagagcaagaacattcaaaccaaataagatatttttcagctacagcaaataaaacagtgaaagccctgactatttacagtagtggtatccttactagattcataatgcaattagatagaaaaggtccaaaactgtaccctatgttcactccgggtcaagttgtgataaatttgatcccaatagaatacctccctcatttaagaaaaatcataactcactttaaatatgaaagcctagtccagaaatctattacacctttatctcaagataggaagaaaatttcctccacattcatgtacaatgatgtaaatatttcaataacttagaatgcttcaagtttagtgcatgcatctctttagatccaaaataaatggactgaagttatcatcctattgtcttttattttgtgtccttgggctataaaagattcctgaatgtaattat

SEQ ID NO: 699 - protein, 467 aa, Homo sapiens
MSSPNIWSTGSSVYSTPVFSQKMTVWILLLLSLYPGFTSQKSDDDYEDYASNKTWVLTPKVPEGDVTVILNNLLEGYDNKLRPDIGVKPTLIHTDMYVNSIGPVNAINMEYTIDIFFAQTWYDRRLKFNSTIKVLRLNSNMVGKIWIPDTFFRNSKKADAHWITTPNRMLRIWNDGRVLYTLRLTIDAECQLQLHNFPMDEHSCPLEFSSYGYPREEIVYQWKRSSVEVGDTRSWRLYQFSFVGLRNTTEVVKTTSGDYVVMSVYFDLSRRMGYFTIQTYIPCTLIVVLSWVSFWINKDAVPARTSLGITTVLTMTTLSTIARKSLPKVSYVTAMDLFVSVCFIFVFSALVEYGTLHYFVSNRKPSKDKDKKKKNPAPTIDIRPRSATIQMNNATHLQERDEEYGYECLDGKDCASFFCCFEDCRTGAWRHGRIHIRIAKMDSYARIFFPTAFCLFNLVYWVSYLYL

SEQ ID NO: 700 - DNA, 2308 bp, Homo sapiens
agtctctccttgtaccctccccctgcctcgatgatattactcccccagacttggaagccgctgccagagtgacgctttgatggtatctgcaagcgtttttgctgatcttatctctgccccctgaatattaattccctaatctggtagcaatccatctccccagtgaaggacctactagaggcaggtggggggagccaccatcagatcataagcataagaataatacaaaggggagggattcttctgcaaccaagaggcaagaggcgagagaaggaaaaaaaaaaaagcgatgagttcgccaaatatatggagcacaggaagctcagtctactcgactcctgtattttcacagaaaatgacggtgtggattctgctcctgctgtcgctctaccctggcttcactagccagaaatctgatgatgactatgaagattatgcttctaacaaaacatgggtcttgactccaaaagttcctgagggtgatgtcactgtcatcttaaacaacctgctggaaggatatgacaataaacttcggcctgatataggagtgaagccaacgttaattcacacagacatgtatgtgaatagcattggtccagtgaacgctatcaatatgcaccattaaagtcctccgattgaacagcaacatggtggggaaaatctggattccagacactttcttcagaaattccaaaaaagctgatgcacactggatcaccacccccaacaggatgctgagaatttggaatgatggtcgagtgctctacaccctaaggttgacaattgatgctgagtgccaattacaattgcacaactttccaatggatgaacactcctgccccttggagttctccagttatggctatccacgtgaagaaattgtttatcaatggaagcgaagttctgttgaagtgggcgacacaagatcctggaggctttatcaattctcatttgttggtctaagaaataccaccgaagtagtgaagacaacttccggagattatgtggtcatgtctgtctactttgatctgagcagaagaatgggatactttaccatccagacctatatcccctgcacactcattgtcgtcctatcctgggtgtctttctggatcaataaggatgctgttccagccagaacatctttaggtatcaccactgtcctgacaatgaccaccctcagcaccattgcccggaaatcgctccccaaggtctcctatgtcacagcgatggatctctttgtatctgtttgtttcatctttgtcttctctgctctggtggagtatggcaccttgcattattttgtcagcaaccggaaaccaagcaaggacaaagataaaaagaagaaaaaccctgcccctaccattgatatccgcccaagatcagcaaccattcaaatgaataatgctacacaccttcaagagagagatgaagagtacggctatgagtgtctggacggcaaggactgtgccagttttttctgctgttttgaagattgtcgaacaggagcttggagacatgggaggatacatatccgcattgccaaaatggactcctatgctcggatcttcttccccactgccttctgcctgtttaatctggtctattgggtctcctacctctacctgtgaggaggtatgggttttactgatatggttcttattcactgagtctcatggagagatgtctgttctaagtccacttaaataatcctctatgtggttgataatgatctgaatctgtttctatgtccaaacctggtaaattttataatgtcatattgtttgtgcccagccctcctttggttagtgtactttgaacttcgatgtttgctgtgtttcaaacctgcaaggcaaagtaaaattagagcaagaacattcaaaccaaataagatatttttcagctacagcaaataaaacagtgaaagccctgactatttacagtagtggtatccttactagattcataatgcaattagatagaaaaggtccaaaactgtaccctatgttcactccgggtcaagttgtgataaatttgatcccaatagaatacctccctcatttaagaaaaatcataactcactttaaatatgaaagcctagtccagaaatctattacacctttatctcaagataggaagaaaatttcctccacattcatgtacaatgatgtaaatatttcaataacttagaatgcttcaagtttagtgcatgcatctctttagatccaaaataaatggactgaagttatcatcctattgtcttttattttgtgtccttgggctataaaagattcctgaatgtaattat

SEQ ID NO: 701 - protein, 327 aa, Homo sapiens
MVGKIWIPDTFFRNSKKADAHWITTPNRMLRIWNDGRVLYTLRLTIDAECQLQLHNFPMDEHSCPLEFSSYGYPREEIVYQWKRSSVEVGDTRSWRLYQFSFVGLRNTTEVVKTTSGDYVVMSVYFDLSRRMGYFTIQTYIPCTLIVVLSWVSFWINKDAVPARTSLGITTVLTMTTLSTIARKSLPKVSYVTAMDLFVSVCFIFVFSALVEYGTLHYFVSNRKPSKDKDKKKKNPAPTIDIRPRSATIQMNNATHLQERDEEYGYECLDGKDCASFFCCFEDCRTGAWRHGRIHIRIAKMDSYARIFFPTAFCLFNLVYWVSYLYL

SEQ ID NO: 702 - DNA, 3871 bp, Homo sapiens
agtctctccttgtaccctccccctgcctcgatgatattactcccccagacttggaagccgctgccagagtgacgctttgatggtatctgcaagcgtttttgctgatcttatctctgccccctgaatattaattccctaatctggtagcaatccatctccccagtgaaggacctactagaggcaggtggggggagccaccatcagatcataagcataagaataatacaaaggggagggattcttctgcaaccaagaggcaagaggcgagagaaggaaaaaaaaaaaagcgatgagttcgccaaatatatggagcacaggaagctcagtctactcgactcctgtattttcacagaaaatgacggtgtggattctgctcctgctgtcgctctaccctggcttcactagccagaaatctgatgatgactatgaagattatgcttctaacaaaacatgggtcttgactccaaaagttcctgagggtgatgtcactgtcatcttaaacaacctgctggaaggatatgacaataaacttcggcctgatataggagtgaagccaacgttaattcacacagacatgtatgtgaatagcattggtccagtgaacgctatcaatatggaatacactattgatatattttttgcgcaaacgtggtatgacagacgtttgaaatttaacagcaccattaaagtcctccgattgaacagcaacatggtggggaaaatctggattccagacactttcttcagaaattccaaaaaagctgatgcacactggatcaccacccccaacaggatgctgagaatttggaatgatggtcgagtgctctacaccctaaggttgacaattgatgctgagtgccaattacaattgcacaactttccaatggatgaacactcctgccccttggagttctccagttatggctatccacgtgaagaaattgtttatcaatggaagcgaagttctgttgaagtgggcgacacaagatcctggaggctttatcaattctcatttgttggtctaagaaataccaccgaagtagtgaagacaacttccggagattatgtggtcatgtctgtctactttgatctgagcagaagaatgggatactttaccatccagacctatatcccctgcacactcattgtcgtcctatcctgggtgtctttctggatcaataaggatgctgttccagccagaacatctttaggtatcaccactgtcctgacaatgaccaccctcagcaccattgcccggaaatcgctccccaaggtctcctatgtcacagcgatggatctctttgtatctgtttgtttcatctttgtcttctctgctctggtggagtatggcaccttgcattattttgtcagcaaccggaaaccaagcaaggacaaagataaaaagaagaaaaaccctcttcttcggatgttttccttcaaggcccctaccattgatatccgcccaagatcagcaaccattcaaatgaataatgctacacaccttcaagagagagatgaagagtacggctatgagtgtctggacggcaaggactgtgccagttttttctgctgttttgaagattgtcgaacaggagcttggagacatgggaggatacatatccgcattgccaaaatggactcctatgctcggatcttcttccccactgccttctgcctgtttaatctggtctattgggtctcctacctctacctgtgaggaggtatgggttttactgatatggttcttattcactgagtctcatggagagatgtctgttctaagtccacttaaataatcctctatgtggttgataatgatctgaatctgtttctatgtccaaacctggtaaattttataatgtcatattgtttgtgcccagccctcctttggttagtgtactttgaacttcgatgtttgctgtgtttcaaacctgcaaggcaaagtaaaattagagcaagaacattcaaaccaaataagatatttttcagctacagcaaataaaacagtgaaagccctgactatttacagtagtggtatccttactagattcataatgcaattagatagaaaaggtccaaaactgtaccctatgttcactccgggtcaagttgtgataaatttgatcccaatagaatacctccctcatttaagaaaaatcataactcactttaaatatgaaagcctagtccagaaatctattacacctttatctcaagataggaagaaaatttcctccacattcatgtacaatgatgtaaatatttcaataacttagaatgcttcaagtttagtgcatgcatctctttagatccaaaataaatggactgaagttatcatcctattgtcttttattttgtgtccttgggctataaaagattcctgaatgtaattataaggatttgggtttggaaatggagggaggaattttcattgccttctccctcatgcatgaagattcgaacagcttattttttccttgtatgacatattacaacactttaagtaaaatatagactggataatcaacatttgccacctctaaatatgcccaatttcataactagagtataaagtaattgtatgtgcttgccgctatttttttcttccttttaggatgatagatcataacagaacttattctccatctcaagatctgcttctagtgattgtgagtgccttgtgggcagaatccttgtcatttcctctttgggtctgtagcaccttgcatagtgcctggcatatagttggtgctcaataaatatggtttgaagtgaattgccctcacatgcttctggcaaatctctgtgctggcctgaaaccagtgactcatcttctcacataggtgttgtcaagtgatatttgattttgtaaaaataaccagtaggatccaaagaactttagctatttatgttcatcttcaaaaaattattttaggcaaagtccatactccttttaaaacaatatttatgtcctatgtttgtgtatagacatgactctactagggcataattagagtttgtgtattatttttccaggtttggggatgagtcagtccttgcccatccacaattttgtttgtgaacttataacaggaataagcaaaattcatacctgactagtgttcagaatgtagcattctgtgcgaaaaagtattgaagattagcttttaaaaactgaaaaaaaaaaatgaatgactcacatagaggttgagccaatgactgtggcctcattagattacattgtagttaaacaaagcaatttctccagacttaaaacatgatgagttgagctctatcttcatgtactcatcctgaatccttatttttctaaaatagcaccctttgttaattatttttatggaaattattactctgtcataattaaatcatagctagtataactttacagataacctaaaaagaatagaaaagaagagagagtggctttgtcagtataaaaccatgtaaagtcatcatcaagtcatctggatgaatcttgaaacacatttagctgccagttttacaaacctttaatatatcagtgctccagtatataacctcaaacaaatgtaaatagaacgaattattttcttgttttgaattgtcaatatattaaatgttgactctttgggagagttgttggcaagtttcaatggtgagaaacattattgtcaacttgaaatgtgttctgtaatggggacactacaaaaagctagctttccaatgtgtgcatagtattggcaatatgaatatatattatatataatctaatacttattataagctgctccctgtctatgtatttggaaaccttttcacaaagggaattgcctaacatgtggacttttacaataaaaatgctgcattctaa

SEQ ID NO: 703 - protein, 475 aa, Homo sapiens
MSSPNIWSTGSSVYSTPVFSQKMTVWILLLLSLYPGFTSQKSDDDYEDYASNKTWVLTPKVPEGDVTVILNNLLEGYDNKLRPDIGVKPTLIHTDMYVNSIGPVNAINMEYTIDIFFAQTWYDRRLKFNSTIKVLRLNSNMVGKIWIPDTFFRNSKKADAHWITTPNRMLRIWNDGRVLYTLRLTIDAECQLQLHNFPMDEHSCPLEFSSYGYPREEIVYQWKRSSVEVGDTRSWRLYQFSFVGLRNTTEVVKTTSGDYVVMSVYFDLSRRMGYFTIQTYIPCTLIVVLSWVSFWINKDAVPARTSLGITTVLTMTTLSTIARKSLPKVSYVTAMDLFVSVCFIFVFSALVEYGTLHYFVSNRKPSKDKDKKKKNPLLRMFSFKAPTIDIRPRSATIQMNNATHLQERDEEYGYECLDGKDCASFFCCFEDCRTGAWRHGRIHIRIAKMDSYARIFFPTAFCLFNLVYWVSYLYL

SEQ ID NO: 704 - DNA, 8669 bp, Homo sapiens
gatttttctgtagttagagggaaacacaaaacgaagagcggcccactcccagcttacgccgatggtgagcccacctctcctgatcattagcgttgctggcacaattgaatgcaagccagatcatctcttatggagacccggcagtacctcacctcagtctgtgagttttctccatgggaaggttgtgatggagtctctgggccctccgaaccaccacagccagtcgactctgaggccccctctcccaccccctcacaaccacacgctgtcccatcaccactcgtccgccaactccctcaacaggaactcactgaccaatcggcggagtcagatccacgccccggccccagcgcccaatgacctggccaccacaccagagtccgttcagcttcaggacagctgggtgctaaacagcaacgtgccactggagacccggcacttcctcttcaagacctcctcggggagcacacccttgttcagcagctcttccccgggataccctttgacctcaggaacggtttacacgcccccgccccgcctgctgcccaggaatactttctccaggaaggctttcaagctgaagaagccctccaaatactgcagctggaaatgtgctgccctctccgccattgccgcggccctcctcttggctattttgctggcgtatttcatagcaatgcatctgctcggactcaattggcaactccagcctgcagatgggcacacctttaacaatgggataaggaccggcttaccaggaaacgatgatgtggcaacaatgccatctggaggcaaagtgccctggtcgttgaaaaacagcagcatagacagtggtgaagcagaagttggtcggcgggtaacacaagaagtcccaccaggggtgttttggaggtcacaaattcacatcagtcagccccagttcttaaagttcaacatctccctcgggaaggacgctctctttggtgtttacataagaagaggacttccaccatctcatgcccagtatgacttcatggaacgtctggacgggaaggagaagtggagtgtggttgagtctcccagggaacgccggagcatacagaccttggttcagaatgaagccgtgtttgtgcagtacctggatgtgggcctgtggcatctggccttctacaatgatggaaaagacaaagagatggtttccttcaatactgttgtcctgacacgggcctctgcagctgcgatcccaactggatgggtcccgactgctctgttgaagtgtgctcagtagactgtggcactcacggcgtctgcatcgggggagcctgccgctgtgaagagggctggacaggcgcagcgtgtgaccagcgcgtgtgccacccccgctgcattgagcacgggacctgtaaagatggcaaatgtgaatgccgagagggctggaatggtgaacactgcaccattgatggctgccctgacttgtgcaacggtaacgggagatgcacactgggtcagaacagctggcagtgtgtctgccagaccggctggagagggcccggatgcaacgttgccatggaaacttcctgtgctgataacaaggataatgagggagatggcctggtggattgtttggaccctgactgctgcctgcagtcagcctgtcagaacagcctgctctgccgggggtcccgggacccactggacatcattcagcagggccagacggattggcccgcagtgaagtccttctatgaccgtatcaagctcttggcaggcaaggatagcacccacatcattcctggagagaaccctttcaacagcagcttggtttctctcatccgaggccaagtagtaactacagatggaactcccctggtcggtgtgaacgtgtcttttgtcaagtacccaaaatacggctacaccatcacccgccaggatggcacgttcgacctgatcgcaaatggaggtgcttccttgactctacactttgagcgagccccgttcatgagccaggagcgcactgtgtggctgccgtggaacagcttttacgccatggacaccctggtgatgaagaccgaggagaactccatccccagctgtgacctcagtggctttgtccggcctgatccaatcatcatctcctccccactgtccaccttctttagtgctgcccctgggcagaatcccatcgtgcctgagacccaggttcttcatgaagaaatcgagctccctggttccaatgtgaaacttcgctatctgagctctagaactgcagggtacaagtcactgctgaagatcaccatgacccagtccacagtgcccctgaacctcattagggttcacctgatggtggctgtcgaggggcatctcttccagaagtcattccaggcttctcccaacctggcctacaccttcatctgggacaagacagatgcgtatggccaaagggtgtatggactctcagatgctgttgtgtctgtcgggtttgaatatgagacctgtcccagtctaattctctgggagaaaaggacagccctccttcagggattcgagctggacccctccaacctcggtggctggtccctagacaaacaccacatcctcaatgttaaaagtggaatcctacacaaaggcactggggaaaaccagttcctgacccagcagcctgccatcatcaccagcatcatgggcaatggtcgccgccggagcatttcctgtcccagctgcaacggccttgctgaaggcaacaagctgctggccccagtggctctggctgttggaatcgatgggagcctctatgtgggtgacttcaattacatccgacgcatctttccctctcgaaatgtgaccagcatcttggagttacgcaacaacccagcacacaagtactacttggcagtggaccccgtgtccggctcgctctacgtgtccgacaccaacagcaggagaatctaccgcgtcaagtctctgagtggaaccaaagacctggctgggaattcggaagttgtggcagggacgggagagcagtgtctaccctttgatgaagcccgctgcggggatggagggaaggccatagatgcaaccctgatgagcccgagaggtattgcagtagacaagaatgggctcatgtactttgtcgatgccaccatgatccggaaggttgaccagaatggaatcatctccaccctgctgggctccaatgacctcactgccgtccggccgctgagctgtgattccagcatggatgtagcccaggttcgtctggagtggccaacagaccttgctgtcaatcccatggataactccttgtatgttctagagaacaatgtcatccttcgaatcaccgagaaccaccaagtcagcatcattgcgggacgccccatgcactgccaagttcctggcattgactactcactcagcaaactagccattcactctgccctggagtcagccagtgccattgccatttctcacactggggtcctctacatcactgagacagatgagaagaagattaaccgtctacgccaggtaacaaccaacggggagatctgccttttagctggggcagcctcggactgcgactgcaaaaacgatgtcaattgcaactgctattcaggagatgatgcctacgcgactgatgccatcttgaattccccatcatccttagctgtagctccagatggtaccatttacattgcagaccttggaaatattcggatcagggcggtcagcaagaacaagcctgttcttaatgccttcaaccagtatgaggctgcatcccccggagagcaggagttatatgttttcaacgctgatggcatccaccaatacactgtgagcctggtgacaggggagtacttgtacaatttcacatatagtactgacaatgatgtcactgaattgattgacaataatgggaattccctgaagatccgtcgggacagcagtggcatgccccgtcacctgctcatgcctgacaaccagatcatcaccctcaccgtgggcaccaatggaggcctcaaagtcgtgtccacacagaacctggagcttggtctcatgacctatgatggcaacactgggctcctggccaccaagagcgatgaaacaggatggacgactttctatgactatgaccacgaaggccgcctgaccaacgtgacgcgccccacgggggtggtaaccagtctgcaccgggaaatggagaaatctattaccattgacattgagaactccaaccgtgatgatgacgtcactgtcatcaccaacctctcttcagtagaggcctcctacacagtggtacaagatcaagttcggaacagctaccagctctgtaataatggtaccctgagggtgatgtatgctaatgggatgggtatcagcttccacagcgagccccatgtcctagcgggcaccatcacccccaccattggacgctgcaacatctccctgcctatggagaatggcttaaactccattgagtggcgcctaagaaaggaacagattaaaggcaaagtcaccatctttggcaggaagctccgggtccatggaagaaatctcttgtccattgactatgatcgaaatattcggactgaaaagatctatgatgaccaccggaagttcaccctgaggatcatttatgaccaggtgggccgccccttcctctggctgcccagcagcgggctggcagctgtcaacgtgtcatacttcttcaatgggcgcctggctgggcttcagcgtggggccatgagcgagaggacagacatcgacaagcaaggccgcatcgtgtcccgcatgttcgctgacgggaaagtgtggagctactcctaccttgacaagtccatggtcctcctgcttcagagccaacgtcagtatatatttgagtatgactcctctgaccgcctccttgccgtcaccatgcccagcgtggcccggcacagcatgtccacacacacctccatcggctacatccgtaatatttacaacccgcctgaaagcaatgcttcggtcatctttgactacagtgatgacggccgcatcctgaagacctcctttttgggcaccggacgccaggtgttctacaagtatgggaaactctccaagttatcagagattgtctacgacagtaccgccgtcaccttcgggtatgacgagaccactggtgtcttgaagatggtcaacctccaaagtgggggcttctcctgcaccatcaggtaccggaagattggccccctggtggacaagcagatctacaggttctccgaggaaggcatggtcaatgccaggtttgactacacctatcatgacaacagcttccgcatcgcaagcatcaagcccgtcataagtgagactcccctccccgttgacctctaccgctatgatgagatttctggcaaggtggaacactttggtaagtttggagtcatctattatgacatcaaccagatcatcaccactgccgtgatgaccctcagcaaacacttcgacacccatgggcggatcaaggaggtccagtatgagatgttccggtccctcatgtactggatgacggtgcaatatgacagcatgggcagggtgatcaagagggagctaaaactggggccctatgccaataccacgaagtacacctatgactacgatggggacgggcagctccagagcgtggccgtcaatgaccgcccgacctggcgctacagctatgaccttaatgggaatctccacttactgaacccaggcaacagtgtgcgcctcatgcccttgcgctatgacctccgggatcggataaccagactcggggatgtgcagtacaaaattgacgacgatggctatctgtgccagagagggtctgacatcttcgaatacaattccaagggcctcctaacaagagcctacaacaaggccagcgggtggagtgtccagtaccgctatgatggcgtaggacggcgggcttcctacaagaccaacctgggccaccacctgcagtacttctactctgacctccacaacccgacgcgcatcacccatgtctacaatcactccaactcggagattacctcactgtactacgacctccagggccacctctttgccatggagagcagcagtggggaggagtactatgttgcctctgataacacagggactcctctggctgtgttcagcatcaacggcctcatgatcaaacagctgcagtacacggcctatggggagatttattatgactccaaccccgacttccagatggtcattggcttccatgggggactctatgaccccctgaccaagctggtccacttcactcagcgtgattatgatgtgctggcaggacgatggacctccccagactataccatgtggaaaaacgtgggcaaggagccggccccctttaacctgtatatgttcaagagcaacaatcctctcagcagtgagctagatttgaagaactacgtgacagatgtgaaaagctggcttgtgatgtttggatttcagcttagcaacatcattcctggcttcccgagagccaaaatgtatttcgtgcctcctccctatgaattgtcagagagtcaagcaagtgagaatggacagctcattacaggtgtccaacagacaacagagagacataaccaggccttcatggctctggaaggacaggtcattactaaaaagctccacgccagcatccgagagaaagcaggtcactggtttgccaccaccacgcccatcattggcaaaggcatcatgtttgccatcaaagaagggcgggtgaccacgggcgtgtccagcatcgccagcgaagatagccgcaaggtggcatctgtgctgaacaacgcctactacctggacaagatgcactacagcatcgagggcaaggacacccactactttgtgaagattggctcagccgatggcgacctggtcacactaggcaccaccatcggccgcaaggtgctagagagcggggtgaacgtgaccgtgtcccagcccacgctgctggtcaacggcaggactcgaaggttcacgaacattgagttccagtactccacgctgctgctcagcatccgctatggcctcacccccgacaccctggacgaagagaaggcccgcgtcctggaccaggcgagacagagggccctgggcacggcctgggccaaggagcagcagaaagccagggacgggagagaggggagccgcctgtggactgagggcgagaagcagcagcttctgagcaccgggcgcgtgcaagggtacgagggatattacgtgcttcccgtggagcaatacccagagcttgcagacagtagcagcaacatccagtttttaagacagaatgagatgggaaagaggtaacaaaataatctgctgccattccttgtctgaatggctcagcaggagtaactgttatctcctctcctaaggagatgaagacctaacaggggcactgcggctgggctgctttaggagaccaagtggcaagaaagctcacattttttgagttcaaatgctactgtccaagcgagaagtccctcatcctgaagtagactaaagcccggctgaaaattccgaggaaaacaaaacaaacgaatgaatgaacagacacacacaatgttccaagttcccctaaaatatgacccacttgttctgggtctacgcagaaaagagacgcaaagtgtccaaaaggaacaaaagaacaaaaacgaataagcaaagaagaaaacaaacaaaaacaaaacaaaacaaacacacggaccaataaacaaagaagcgaagataagaaagaaggcctcatatccaattacctcactcattcacatgtgagcgacacgcagacatccgcgagggccagcgtcaccagaccagctgcgggacaaaccactcagactgcttgtaggacaaatacttctgacattttcgtttaagcaaatacaggtgcatttaaaacacgactttgggggtgatttgtgtgtagcgcctggggaggggggataaaagaggaggagtgagcactggaaatactttttaaagaaaaaaaaacatgagggaataaaagaaattcctatcaaaaatcaaagtgaaataataccatccagcacttaactctcaggtcccaactaagtctggcctgagctaatttatttgagcgcagagtgtaaaatttaattcaaaatggtggctataatcactacagataaatttcatactcttttgtctttggagattccattgtggacagtaatacgcagttacagggtgtagtctgtttagattccgtagttcgtgggtatcagtttcggtagaggtgcagcatcgtgacacttttgctaacaggtaccacttctgatcaccctgtacatacatgagccgaaaggcacaatcactgtttcagatttaaaattattagtgtgtttgtttggtccagaaactgagacaatcacatgacagtcaccacgaggagagaaaatttaaaaaataaaaataaaaacaaaaaaaattttaaaaattaaaaaaacaaaaataaagtctaataagaactttggtacaggaacttttttgtaatatacatgtatgaattgttcatcgagtttttatattaattttaatttgctgctaagcaaagactagggacaggcaaagataatttatggcaaagtgtttaaattgtttatacataaataaagtctctaaaactcctgtggaca

SEQ ID NO: 705 - protein, 2029 aa, Homo sapiens
MGPDCSVEVCSVDCGTHGVCIGGACRCEEGWTGAACDQRVCHPRCIEHGTCKDGKCECREGWNGEHCTIDGCPDLCNGNGRCTLGQNSWQCVCQTGWRGPGCNVAMETSCADNKDNEGDGLVDCLDPDCCLQSACQNSLLCRGSRDPLDIIQQGQTDWPAVKSFYDRIKLLAGKDSTHIIPGENPFNSSLVSLIRGQVVTTDGTPLVGVNVSFVKYPKYGYTITRQDGTFDLIANGGASLTLHFERAPFMSQERTVWLPWNSFYAMDTLVMKTEENSIPSCDLSGFVRPDPIIISSPLSTFFSAAPGQNPIVPETQVLHEEIELPGSNVKLRYLSSRTAGYKSLLKITMTQSTVPLNLIRVHLMVAVEGHLFQKSFQASPNLAYTFIWDKTDAYGQRVYGLSDAVVSVGFEYETCPSLILWEKRTALLQGFELDPSNLGGWSLDKHHILNVKSGILHKGTGENQFLTQQPAIITSIMGNGRRRSISCPSCNGLAEGNKLLAPVALAVGIDGSLYVGDFNYIRRIFPSRNVTSILELRNNPAHKYYLAVDPVSGSLYVSDTNSRRIYRVKSLSGTKDLAGNSEVVAGTGEQCLPFDEARCGDGGKAIDATLMSPRGIAVDKNGLMYFVDATMIRKVDQNGIISTLLGSNDLTAVRPLSCDSSMDVAQVRLEWPTDLAVNPMDNSLYVLENNVILRITENHQVSIIAGRPMHCQVPGIDYSLSKLAIHSALESASAIAISHTGVLYITETDEKKINRLRQVTTNGEICLLAGAASDCDCKNDVNCNCYSGDDAYATDAILNSPSSLAVAPDGTIYIADLGNIRIRAVSKNKPVLNAFNQYEAASPGEQELYVFNADGIHQYTVSLVTGEYLYNFTYSTDNDVTELIDNNGNSLKIRRDSSGMPRHLLMPDNQIITLTVGTNGGLKVVSTQNLELGLMTYDGNTGLLATKSDETGWTTFYDYDHEGRLTNVTRPTGVVTSLHREMEKSITIDIENSNRDDDVTVITNLSSVEASYTVVQDQVRNSYQLCNNGTLRVMYANGMGISFHSEPHVLAGTITPTIGRCNISLPMENGLNSIEWRLRKEQIKGKVTIFGRKLRVHGRNLLSIDYDRNIRTEKIYDDHRKFTLRIIYDQVGRPFLWLPSSGLAAVNVSYFFNGRLAGLQRGAMSERTDIDKQGRIVSRMFADGKVWSYSYLDKSMVLLLQSQRQYIFEYDSSDRLLAVTMPSVARHSMSTHTSIGYIRNIYNPPESNASVIFDYSDDGRILKTSFLGTGRQVFYKYGKLSKLSEIVYDSTAVTFGYDETTGVLKMVNLQSGGFSCTIRYRKIGPLVDKQIYRFSEEGMVNARFDYTYHDNSFRIASIKPVISETPLPVDLYRYDEISGKVEHFGKFGVIYYDINQIITTAVMTLSKHFDTHGRIKEVQYEMFRSLMYWMTVQYDSMGRVIKRELKLGPYANTTKYTYDYDGDGQLQSVAVNDRPTWRYSYDLNGNLHLLNPGNSVRLMPLRYDLRDRITRLGDVQYKIDDDGYLCQRGSDIFEYNSKGLLTRAYNKASGWSVQYRYDGVGRRASYKTNLGHHLQYFYSDLHNPTRITHVYNHSNSEITSLYYDLQGHLFAMESSSGEEYYVASDNTGTPLAVFSINGLMIKQLQYTAYGEIYYDSNPDFQMVIGFHGGLYDPLTKLVHFTQRDYDVLAGRWTSPDYTMWKNVGKEPAPFNLYMFKSNNPLSSELDLKNYVTDVKSWLVMFGFQLSNIIPGFPRAKMYFVPPPYELSESQASENGQLITGVQQTTERHNQAFMALEGQVITKKLHASIREKAGHWFATTTPIIGKGIMFAIKEGRVTTGVSSIASEDSRKVASVLNNAYYLDKMHYSIEGKDTHYFVKIGSADGDLVTLGTTIGRKVLESGVNVTVSQPTLLVNGRTRRFTNIEFQYSTLLLSIRYGLTPDTLDEEKARVLDQARQRALGTAWAKEQQKARDGREGSRLWTEGEKQQLLSTGRVQGYEGYYVLPVEQYPELADSSSNIQFLRQNEMGKR

SEQ ID NO: 706 - DNA, 4171 bp, Homo sapiens
ctggagccgctgagcccccgctgcggccgggagctgcatgggggagcgccggcagcgcttgggaagatgccccggccggagctgcccctgccggagggctgggaggaggcgcgcgacttcgacggcaaggtctactacatagaccacacgaaccgcaccaccagctggatcgacccgcgggacaggtacaccaaaccgctcacctttgctgactgcattagtgatgagttgccgctaggatgggaagaggcatatgacccacaggttggagattacttcatagaccacaacaccaaaaccactcagattgaggatcctcgagtacaatggcggcgggagcaggaacatatgctgaaggattacctggtggtggcccaggaggctctgagtgcacaaaaggagatctaccaggtgaagcagcagcgcctggagcttgcacagcaggagtaccagcaactgcatgccgtctgggagcataagctgggctcccaggtcagcttggtctctggttcatcatccagctccaagtatgaccctgagatcctgaaagctgaaattgccactgcaaaatcccgggtcaacaagctgaagagagagatggttcacctccagcacgagctgcagttcaaagagcgtggctttcagaccctgaagaaaatcgataagaaaatgtctgatgctcagggcagctacaaactggatgaagctcaggctgtcttgagagaaacaaaagccatcaaaaaggctattacctgtggggaaaaggaaaagcaagatctcattaagagccttgccatgttgaaggacggcttccgcactgacagggggtctcactcagacctgtggtccagcagcagctctctggagagttcgagtttcccgctaccgaaacagtacctggatgtgagctcccagacagacatctcgggaagcttcggcatcaacagcaacaatcagttggcagagaaggtcagattgcgccttcgatatgaagaggctaagagaaggatcgccaacctgaagatccagctggccaagcttgacagtgaggcctggcctggggtgctggactcagagagggaccggctgatccttatcaacgagaaggaggagctgctgaaggagatgcgcttcatcagcccccgcaagtggacccagggggaggtggagcagctggagatggcccggaagcggctggaaaaggacctgcaggcagcccgggacacccagagcaaggcgctgacggagaggttaaagttaaacagtaagaggaaccagcttgtgagagaactggaggaagccacccggcaggtggcaactctgcactcccagctgaaaagtctctcaagcagcatgcagtccctgtcctcaggcagcagccccggatccctcacgtccagccggggctccctggttgcatccagcctggactcctccacttcagccagcttcactgacctctactatgacccctttgagcagctggactcagagctgcagagcaaggtggagttcctgctcctggagggggccaccggcttccggccctcaggctgcatcaccaccatccacgaggatgaggtggccaagacccagaaggcagagggaggtggccgcctgcaggctctgcgttccctgtctggcaccccaaagtccatgacctccctatccccacgttcctctctctcctccccctccccaccctgttcccctctcatggctgaccccctcctggctggtgatgccttcctcaactccttggagtttgaagacccggagctgagtgccactctttgtgaactgagccttggtaacagcgcccaggaaagataccggctggaggaaccaggaacggagggcaagcagctgggccaagctgtgaatacggcccaggggtgtggcctgaaagtggcctgtgtctcagccgccgtatcggacgagtcagtggctggagacagtggtgtgtacgaggcttccgtgcagagactgggtgcttcagaagctgctgcatttgacagtgacgaatcggaagcagtgggtgcgacccgaattcagattgccctgaagtatgatgagaagaataagcaatttgcaatattaatcatccagctgagtaacctttctgctctgttgcagcaacaagaccagaaagtgaatatccgcgtggctgtccttccttgctctgaaagcacaacctgcctgttccggacccggcctctggacgcctcagacactctagtgttcaatgaggtgttctgggtatccatgtcctatccagcccttcaccagaagaccttaagagtcgatgtctgtaccaccgacaggagccatctggaagagtgcctgggaggcgcccagatcagcctggcggaggtctgccggtctggggagaggtcgactcgctggtacaaccttctcagctacaaatacttgaagaagcagagcagggagctcaagccagtgggagttatggcccctgcctcagggcctgccagcacggacgctgtgtctgctctgttggaacagacagcagtggagctggagaagaggcaggagggcaggagcagcacacagacactggaagacagctggaggtatgaggagaccagtgagaatgaggcagtagccgaggaagaggaggaggaggtggaggaggaggagggagaagaggatgttttcaccgagaaagcctcacctgatatggatgggtacccagcattaaaggtggacaaagagaccaacacggagaccccggccccatcccccacagtggtgcgacctaaggaccggagagtgggcaccccgtcccaggggccatttcttcgagggagcaccatcatccgctctaagaccttctccccaggaccccagagccagtacgtgtgccggctgaatcggagtgatagtgacagctccactctgtccaaaaagccaccttttgttcgaaactccctggagcgacgcagcgtccggatgaagcggccttcctcggtcaagtcgctgcgctccgagcgtctgatccgtacctcgctggacctggagttagacctgcaggcgacaagaacctggcacagccaactgacccaggagatctcggtgctgaaggagctcaaggagcagctggaacaagccaagagccacggggagaaggagctgccacagtggttgcgtgaggacgagcgtttccgcctgctgctgaggatgctggagaagcggcagatggaccgagcggagcacaagggtgagcttcagacagacaagatgatgagggcagctgccaaggatgtgcacaggctccgaggccagagctgtaaggaacccccagaagttcagtctttcagggagaagatggcatttttcacccggcctcggatgaatatcccagctctctctgcagatgacgtctaatcgccagaaaagtatttcctttgttccactgaccaggctgtgaacattgactgtggctaaagttatttatgtggtgttatatgaaggtactgagtcacaagtcctctagtgctcttgttggtttgaagatgaaccgactttttagtttgggtcctactgttgttattaaaaacagaacaaaaacaaaacacacacacacacaaaaacagaaacaaaaaaaaccagcattaaaataataagattgtatagtttgtatatttaggagtgtatttttgggaaagaaaatttaaatgaactaaagcagtattgagttgctgctcttcttaaaatcgtttagattttttttggtttgtacagctccaccttttagaggtcttactgcaataagaagtaatgcctgggggacggtaatcctaataggacgtcccgcacttgtcacagtacagctaatttttcctagttaacatattttgtacaatattaaaaaaatgcacagaaaccattgggggggattcagaggtgcatccacggatcttcttgagctgtgacgtgtttttatgtggctgcccaacgtggagcgggcagtgtgataggctgggtgggctaagcagcctagtctatgtgggtgacaggccacgctggtctcagatgcccagtgaagccactaacatgagtgaggggagggctgtggggaactccattcagttttatctccatcaataaagtggcctttcaaaaagaaaaaaaaaaaaaaaaaaaaaaa

SEQ ID NO: 707 - protein, 1113 aa, Homo sapiens
MPRPELPLPEGWEEARDFDGKVYYIDHTNRTTSWIDPRDRYTKPLTFADCISDELPLGWEEAYDPQVGDYFIDHNTKTTQIEDPRVQWRREQEHMLKDYLVVAQEALSAQKEIYQVKQQRLELAQQEYQQLHAVWEHKLGSQVSLVSGSSSSSKYDPEILKAEIATAKSRVNKLKREMVHLQHELQFKERGFQTLKKIDKKMSDAQGSYKLDEAQAVLRETKAIKKAITCGEKEKQDLIKSLAMLKDGFRTDRGSHSDLWSSSSSLESSSFPLPKQYLDVSSQTDISGSFGINSNNQLAEKVRLRLRYEEAKRRIANLKIQLAKLDSEAWPGVLDSERDRLILINEKEELLKEMRFISPRKWTQGEVEQLEMARKRLEKDLQAARDTQSKALTERLKLNSKRNQLVRELEEATRQVATLHSQLKSLSSSMQSLSSGSSPGSLTSSRGSLVASSLDSSTSASFTDLYYDPFEQLDSELQSKVEFLLLEGATGFRPSGCITTIHEDEVAKTQKAEGGGRLQALRSLSGTPKSMTSLSPRSSLSSPSPPCSPLMADPLLAGDAFLNSLEFEDPELSATLCELSLGNSAQERYRLEEPGTEGKQLGQAVNTAQGCGLKVACVSAAVSDESVAGDSGVYEASVQRLGASEAAAFDSDESEAVGATRIQIALKYDEKNKQFAILIIQLSNLSALLQQQDQKVNIRVAVLPCSESTTCLFRTRPLDASDTLVFNEVFWVSMSYPALHQKTLRVDVCTTDRSHLEECLGGAQISLAEVCRSGERSTRWYNLLSYKYLKKQSRELKPVGVMAPASGPASTDAVSALLEQTAVELEKRQEGRSSTQTLEDSWRYEETSENEAVAEEEEEEVEEEEGEEDVFTEKASPDMDGYPALKVDKETNTETPAPSPTVVRPKDRRVGTPSQGPFLRGSTIIRSKTFSPGPQSQYVCRLNRSDSDSSTLSKKPPFVRNSLERRSVRMKRPSSVKSLRSERLIRTSLDLELDLQATRTWHSQLTQEISVLKELKEQLEQAKSHGEKELPQWLREDERFRLLLRMLEKRQMDRAEHKGELQTDKMMRAAAKDVHRLRGQSCKEPPEVQSFREKMAFFTRPRMNIPALSADDV

SEQ ID NO: 708 - DNA, 2053 bp, Homo sapiens
caggcagcaggcagcaggcgggcgcgctgtggctccgcgccgcgcggtccgggctctgttcattcatgattggtactcggccctccgagacccagcccgagcgcagggaggggagccgagtgtgcggcaggaggggcgggcggacggcggctcccgcaccgcacgcggcgctggctcggcagcctcggccgggcggccgctctggccccgtgtccagtgccaggcaggcttcagggcaccgtcctcggccctgggcgagggaaccgccgggccgggtcctcgcgcggggaagcggttccgaaggctcgcggggagcggctagccctgagtccctgcatgtgcggggctgaagaaggaagccagaagcctcctagcctcgcctccacgcttgctgaataccaagctgcaggcgagctgccgggcgcttttctctcctccaattcagagtagacaaaccacggggatttctttccagggtaggggaggggccgggcccggggtcccaactcgcactcaagtcttcgctgccatgggggccgtcatgggcaccttctcatctctgcaaaccaaacaaaggcgaccctcgaaagacatcgcctggtggtattaccagtatcagagagataagattgaagatgagctggagatgaccatggtttgccatcggcccgagggactggagcagctcgaggcccagaccaacttcaccaagagggagctgcaggtcctttatcgaggcttcaaaaatgagtgccccagtggtgtggtcaacgaagacacattcaagcagatctatgctcagtttttccctcatggagatgccagcacgtatgcccattacctcttcaatgccttcgacaccactcagacaggctccgtgaagttcgaggactttgtaaccgctctgtcgattttattgagaggaactgtccacgagaaactaaggtggacatttaatttgtatgacatcaacaaggacggatacataaacaaagaggagatgatggacattgtcaaagccatctatgacatgatggggaaatacacatatcctgtgctcaaagaggacactccaaggcagcatgtggacgtcttcttccagaaaatggacaaaaataaagatggcatcgtaactttagatgaatttcttgaatcatgtcaggaggacgacaacatcatgaggtctctccagctgtttcaaaatgtcatgtaactggtgacactcagccattcagctctcagagacattgtactaaacaaccaccttaacaccctgatctgcccttgttctgattttacacaccaactcttgggacagaaacaccttttacactttggaagaattctctgctgaagactttctatggaacccagcatcatgtggctcagtctctgattgccaactcttcctctttcttcttcttgagagagacaagatgaaatttgagtttgttttggaagcatgctcatctcctcacactgctgccctatggaaggtccctctgcttaagcttaaacagtagtgcacaaaatatgctgcttacgtgcccccagcccactgcctccaagtcaggcagaccttggtgaatctggaagcaagaggacctgagccagatgcacaccatctctgatggcctcccaaaccaatgtgcctgtttctcttcctttggtgggaagaatgagagttatccagaacaattaggatctgtcatgaccagattgggagagccagcacctaacatatgtgggataggactgaattattaagcatgatattgtctgatgacccaaactgcccatgtcatttgtttccagaaacgaggaccaataattctctcacactggcatttgtgctggtagtacaagtcctttaatatgtccaggaagggagccattgcccagtggtccatatctccaccacatcccctgcttgagcccagcgctgcatgtccctcccaagaagtccagaatgcctgcaaattgctgtaattttataccatgttctaaccaataaacagaactatttcttacactctcaaaaaaaaaaaaaaaa

SEQ ID NO: 709 - protein, 227 aa, Homo sapiens
MGAVMGTFSSLQTKQRRPSKDIAWWYYQYQRDKIEDELEMTMVCHRPEGLEQLEAQTNFTKRELQVLYRGFKNECPSGVVNEDTFKQIYAQFFPHGDASTYAHYLFNAFDTTQTGSVKFEDFVTALSILLRGTVHEKLRWTFNLYDINKDGYINKEEMMDIVKAIYDMMGKYTYPVLKEDTPRQHVDVFFQKMDKNKDGIVTLDEFLESCQEDDNIMRSLQLFQNVM

SEQ ID NO: 710 - DNA, 1518 bp, Homo sapiens
atgagcggctgctccaaaagatgcaagcttgggttcgtgaaatttgcccagaccatctttaagctcatcactgggaccctcagcaaagataagattgaagatgagctggagatgaccatggtttgccatcggcccgagggactggagcagctcgaggcccagaccaacttcaccaagagggagctgcaggtcctttatcgaggcttcaaaaatgagtgccccagtggtgtggtcaacgaagacacattcaagcagatctatgctcagtttttccctcatggagatgccagcacgtatgcccattacctcttcaatgccttcgacaccactcagacaggctccgtgaagttcgaggactttgtaaccgctctgtcgattttattgagaggaactgtccacgagaaactaaggtggacatttaatttgtatgacatcaacaaggacggatacataaacaaagaggagatgatggacattgtcaaagccatctatgacatgatggggaaatacacatatcctgtgctcaaagaggacactccaaggcagcatgtggacgtcttcttccagaaaatggacaaaaataaagatggcatcgtaactttagatgaatttcttgaatcatgtcaggaggacgacaacatcatgaggtctctccagctgtttcaaaatgtcatgtaactggtgacactcagccattcagctctcagagacattgtactaaacaaccaccttaacaccctgatctgcccttgttctgattttacacaccaactcttgggacagaaacaccttttacactttggaagaattctctgctgaagactttctatggaacccagcatcatgtggctcagtctctgattgccaactcttcctctttcttcttcttgagagagacaagatgaaatttgagtttgttttggaagcatgctcatctcctcacactgctgccctatggaaggtccctctgcttaagcttaaacagtagtgcacaaaatatgctgcttacgtgcccccagcccactgcctccaagtcaggcagaccttggtgaatctggaagcaagaggacctgagccagatgcacaccatctctgatggcctcccaaaccaatgtgcctgtttctcttcctttggtgggaagaatgagagttatccagaacaattaggatctgtcatgaccagattgggagagccagcacctaacatatgtgggataggactgaattattaagcatgatattgtctgatgacccaaactgcccatgtcatttgtttccagaaacgaggaccaataattctctcacactggcatttgtgctggtagtacaagtcctttaatatgtccaggaagggagccattgcccagtggtccatatctccaccacatcccctgcttgagcccagcgctgcatgtccctcccaagaagtccagaatgcctgcaaattgctgtaattttataccatgttctaaccaataaacagaactatttcttacactctcaaaaaaaaaaaaaaaa

SEQ ID NO: 711 - protein, 225 aa, Homo sapiens
MSGCSKRCKLGFVKFAQTIFKLITGTLSKDKIEDELEMTMVCHRPEGLEQLEAQTNFTKRELQVLYRGFKNECPSGVVNEDTFKQIYAQFFPHGDASTYAHYLFNAFDTTQTGSVKFEDFVTALSILLRGTVHEKLRWTFNLYDINKDGYINKEEMMDIVKAIYDMMGKYTYPVLKEDTPRQHVDVFFQKMDKNKDGIVTLDEFLESCQEDDNIMRSLQLFQNVM

SEQ ID NO: 712 - DNA, 2020 bp, Homo sapiens
caggcagcaggcagcaggcgggcgcgctgtggctccgcgccgcgcggtccgggctctgttcattcatgattggtactcggccctccgagacccagcccgagcgcagggaggggagccgagtgtgcggcaggaggggcgggcggacggcggctcccgcaccgcacgcggcgctggctcggcagcctcggccgggcggccgctctggccccgtgtccagtgccaggcaggcttcagggcaccgtcctcggccctgggcgagggaaccgccgggccgggtcctcgcgcggggaagcggttccgaaggctcgcggggagcggctagccctgagtccctgcatgtgcggggctgaagaaggaagccagaagcctcctagcctcgcctccacgcttgctgaataccaagctgcaggcgagctgccgggcgcttttctctcctccaattcagagtagacaaaccacggggatttctttccagggtaggggaggggccgggcccggggtcccaactcgcactcaagtcttcgctgccatgggggccgtcatgggcaccttctcatctctgcaaaccaaacaaaggcgaccctcgaaagataagattgaagatgagctggagatgaccatggtttgccatcggcccgagggactggagcagctcgaggcccagaccaacttcaccaagagggagctgcaggtcctttatcgaggcttcaaaaatgagtgccccagtggtgtggtcaacgaagacacattcaagcagatctatgctcagtttttccctcatggagatgccagcacgtatgcccattacctcttcaatgccttcgacaccactcagacaggctccgtgaagttcgaggactttgtaaccgctctgtcgattttattgagaggaactgtccacgagaaactaaggtggacatttaatttgtatgacatcaacaaggacggatacataaacaaagaggagatgatggacattgtcaaagccatctatgacatgatggggaaatacacatatcctgtgctcaaagaggacactccaaggcagcatgtggacgtcttcttccagaaaatggacaaaaataaagatggcatcgtaactttagatgaatttcttgaatcatgtcaggaggacgacaacatcatgaggtctctccagctgtttcaaaatgtcatgtaactggtgacactcagccattcagctctcagagacattgtactaaacaaccaccttaacaccctgatctgcccttgttctgattttacacaccaactcttgggacagaaacaccttttacactttggaagaattctctgctgaagactttctatggaacccagcatcatgtggctcagtctctgattgccaactcttcctctttcttcttcttgagagagacaagatgaaatttgagtttgttttggaagcatgctcatctcctcacactgctgccctatggaaggtccctctgcttaagcttaaacagtagtgcacaaaatatgctgcttacgtgcccccagcccactgcctccaagtcaggcagaccttggtgaatctggaagcaagaggacctgagccagatgcacaccatctctgatggcctcccaaaccaatgtgcctgtttctcttcctttggtgggaagaatgagagttatccagaacaattaggatctgtcatgaccagattgggagagccagcacctaacatatgtgggataggactgaattattaagcatgatattgtctgatgacccaaactgcccatgtcatttgtttccagaaacgaggaccaataattctctcacactggcatttgtgctggtagtacaagtcctttaatatgtccaggaagggagccattgcccagtggtccatatctccaccacatcccctgcttgagcccagcgctgcatgtccctcccaagaagtccagaatgcctgcaaattgctgtaattttataccatgttctaaccaataaacagaactatttcttacactctcaaaaaaaaaaaaaaaa

SEQ ID NO: 713 - protein, 216 aa, Homo sapiens
MGAVMGTFSSLQTKQRRPSKDKIEDELEMTMVCHRPEGLEQLEAQTNFTKRELQVLYRGFKNECPSGVVNEDTFKQIYAQFFPHGDASTYAHYLFNAFDTTQTGSVKFEDFVTALSILLRGTVHEKLRWTFNLYDINKDGYINKEEMMDIVKAIYDMMGKYTYPVLKEDTPRQHVDVFFQKMDKNKDGIVTLDEFLESCQEDDNIMRSLQLFQNVM

SEQ ID NO: 714 - DNA, 1698 bp, Homo sapiens
cccggccctccctgcacggcctcccgtgcgcccctgtcagactgtggcggccggtcgcgcggtgcgctctccctccctgcccgcagcctggagaggcgcttcgtgctgcacacccccgcgttcctgccggcaccgcgcctgccctctgccgcgctccgccctgccgccgaccgcacgcccgccgcgggacatggcacacgcaccggcacgctgccccagcgcccggggctccggggacggcgagatgggcaagcccaggaacgtggcgctcatcaccggtatcacaggccaggatggttcctacctggctgagttcctgctggagaaaggctatgaggtccatggaattgtacggcggtccagttcatttaatacgggtcgaattgagcatctgtataagaatccccaggctcacattgaaggaaacatgaagttgcactatggcgatctcactgacagtacctgccttgtgaagatcattaatgaagtaaagcccacagagatctacaaccttggagcccagagccacgtcaaaatttcctttgacctcgctgagtacactgcggacgttgacggagttggcactctacgacttctagatgcagttaagacttgtggccttatcaactctgtgaagttctaccaagcctcaacaagtgaactttatgggaaagtgcaggaaataccccagaaggagaccacccctttctatccccggtcaccctatggggcagcaaaactctatgcctattggattgtggtgaacttccgtgaggcgtataatctctttgcagtgaacggcattctcttcaatcatgagagtcccagaagaggagctaatttcgttactcgaaaaattagccggtcagtagctaagatttaccttggacaactggaatgtttcagtttgggaaatctggatgccaaacgagattggggccatgccaaggactatgtggaggctatgtggttgatgttgcagaatgatgagccggaggacttcgttatagctactggggaggtccatagtgtccgggaatttgtcgagaaatcattcttgcacattggaaaaaccattgtgtgggaaggaaagaatgaaaatgaagtgggcagatgtaaagagaccggcaaagttcacgtgactgtggatctcaagtactaccggccaactgaagtggactttctgcagggcgactgcaccaaagcgaaacagaagctgaactggaagccccgggtcgctttcgatgagctggtgagggagatggtgcacgccgacgtggagctcatgaggacaaaccccaatgcctgagcagcgcctcggagcccggcccgccctccggctacaatccccgcagagtctccggtgcagacgcgctgcggggatggggagcggcgtgccaatctgcgggtcccctgcggcccctgctgccgctgcgctgtcccggccgcaagagcggggccgccccgccgaggtttgtagcagccgggatgtgaccctccagggtttgggtcgctttgcgtttgtcgaagcctcctctgaatggctttgtgaaatcaagatgttttaatcacattcactttacttgaaattatgttgttacacaacaaattgtggggccttcaaattgtttttctcttttcatattaaaaatggtctttctgtgaactagcaaaaaaaaaaaaaaaaaaaaaaaaaaa

SEQ ID NO: 715 - protein, 372 aa, Homo sapiens
MAHAPARCPSARGSGDGEMGKPRNVALITGITGQDGSYLAEFLLEKGYEVHGIVRRSSSFNTGRIEHLYKNPQAHIEGNMKLHYGDLTDSTCLVKIINEVKPTEIYNLGAQSHVKISFDLAEYTADVDGVGTLRLLDAVKTCGLINSVKFYQASTSELYGKVQEIPQKETTPFYPRSPYGAAKLYAYWIVVNFREAYNLFAVNGILFNHESPRRGANFVTRKISRSVAKIYLGQLECFSLGNLDAKRDWGHAKDYVEAMWLMLQNDEPEDFVIATGEVHSVREFVEKSFLHIGKTIVWEGKNENEVGRCKETGKVHVTVDLKYYRPTEVDFLQGDCTKAKQKLNWKPRVAFDELVREMVHADVELMRTNPNA

SEQ ID NO: 716 - DNA, 1188 bp, Homo sapiens
atgtggatcccagtggccggatttcctcctcggctgaggctctccgccttggggggcgctggtcgcttttgcattttagggtctggagcggcgatgcgaaagcacttgccggcgaggaaccgccgtggcctgtctgactcctctccgcagctgtggccggatccggatttcaggaactcaccaaggagggtgttaaactccatcttagactttaagcgttacgtaaccaatcggagattggctgagaccctggcgcaaatcgtatggagaaaacaaaatagacctccacacctattgctgcagtgcagtccaggtcctggaatcctgactcaggcattacttgaaattggtgccaaagtggttgcccttgaaagtgacaaaacttttattccacatttggagtccttaggaaaaaatctggatggaaaactacaagtgattcactgtgacttctttaaaatagatcctagaagtggtggagtaataaaaccacccgctatggcttctcaagggctctttcagaatttgggaatagaagcagttccttggacagcaggcagccctttaaaagtaactagaatgttctcaagtagaggtgaaaaaagggccactttggaaacctgcatatgacgtattcctgtacttctagatataaatttggacgaatagaactaaatatgtttattggtaaaaaagaattccagaaactaacggcagatccccgaaatccagacttgtatcatgtatgaagtgttatctggcaagtagcttgtgagattaaggttctgcacatggaggcttggtcgtcatttgatgtatacacccaaaatgggcggctggaaaacccaaagtgtagggaattattggagctattacaacaaaatctgtatcttactcgaatgactcctcatggaaatttatttaccgagaacttaacacctattaactgtaatatattttttcacatgtgaaagcactgttttgggaggtgcagtgccaatctaatagaccacttaagttcactgactccacttggtgcaatggatatattgatgcaaataggaaaaaaggaagaagagaaaataactaacatgtaccctcaagacttcaaaaaactttttgaaactatagtgttccaaagattgtgcttataaatggctatatgatgaaaccctggtaaatatgtag

SEQ ID NO: 717 - DNA, 1499 bp, Homo sapiens
ccgcccccgaagcggcgcgggacgcctggcgccgtccgcgatccgcagggctgcccgcttaggcttaggcccggcccgctggcaaagccgagccgcagcattttatttcgttcgtggtttccgcacaggctggagtttcgtgggttgggtcgtacttgggacctcggcgaagaggacccgtttatttttttttctttccaaaatggcagcctccagtcgcgcacaagtgttatctctgtaccgggcgatgctgagagagagcaagcgtttcagcgcctacaattacagaacatatgctgtcaggaggataagagatgccttcagagaaaataaaaatgtaaaggatcctgtagaaattcaaaccctagtgaataaagccaagagagaccttggagtaattcgtcgacaggtccacattggccaactgtattcaactgacaagctgatcattgagaatcgagacatgcccaggacctagcaagccggggaccagccaccagtggcggccagggaccaccttcagcatccactctctgtttgagatgggggctcccaaaaccagcttacaatagccttttgcgctgcctgtcctgtgggagctgataaaccaagtcacatttgcattctgttgcaggcttagtgaaaaaggactgctgtctttccttggttcaagtgttagaatggagagctggagttcgttcagaatagtgctgtgtgttaccacgtctcccctgcaccccattcctaccttgtagctcatgaccattgtgtatagcatttctacactttgtttcttggtccttggcaataaaaagaatgatctccctgagcctttgaccccagataaacccctcccaattaatgcattttcatttcctactgatacaaggcctggagagggctgttgggggccctcagggagggttcaactctgagacgagaactgccttggtgaaggcaagttcaagcaccacttgagactgggggcagcatggagtagggcagggctacggggatacacggtgcaccctgcaacttatacctgagcccagtacaacaaaggtgacgggtgtgtaggtacacacccagagatggagcactgcagatcagcaacctcagccccacctgggaatttgctggaaatgcaggctcaagcccctccccacacctggtgaatgagagagccccagcctgacccaagcccagggcgactcccataccctgaagcctggggcatgctgggcagcaccggtgcccaaatctggctggtggacagaagcacctggagagttggagagctttttaaaaagacatctctcagcacttccctctctgcagattctgactcagtaagtgaggggtgaggcacagtcatttttctctattctgaagctctcccactgttttcaatgtttaaccaactggggacccctgctctttaagtatattacaggtaataaagatattgtttgtatgcttttaaaaaaaaaaaaaaaaaa

SEQ ID NO: 718 - protein, 91 aa, Homo sapiens
MAASSRAQVLSLYRAMLRESKRFSAYNYRTYAVRRIRDAFRENKNVKDPVEIQTLVNKAKRDLGVIRRQVHIGQLYSTDKLIIENRDMPRT

SEQ ID NO: 719 - DNA, 2117 bp, Homo sapiens
ggagctgtttacccccactctaataggggttcaatataaaaagccggcagagagctgtccaagtcagacgcgcctctgcatctgcgccaggcgaacgggtcctgcgcctcctgcagtcccagctctccaccgccgcgtgcgcctgcagacgctccgctcgctgccttctctcctggcaggcgctgccttttctccccgttaaaagggcacttgggctgaaggatcgctttgagatctgaggaacccgcagcgctttgagggacctgaagctgtttttcttcgttttcctttgggttcagtttgaacgggaggtttttgatccctttttttcagaatggattatttgctcatgattttctctctgctgtttgtggcttgccaaggagctccagaaacagcagtcttaggcgctgagctcagcgcggtgggtgagaacggcggggagaaacccactcccagtccaccctggcggctccgccggtccaagcgctgctcctgctcgtccctgatggataaagagtgtgtctacttctgccacctggacatcatttgggtcaacactcccgagcacgttgttccgtatggacttggaagccctaggtccaagagagccttggagaatttacttcccacaaaggcaacagaccgtgagaatagatgccaatgtgctagccaaaaagacaagaagtgctggaatttttgccaagcaggaaaagaactcagggctgaagacattatggagaaagactggaataatcataagaaaggaaaagactgttccaagcttgggaaaaagtgtatttatcagcagttagtgagaggaagaaaaatcagaagaagttcagaggaacacctaagacaaaccaggtcggagaccatgagaaacagcgtcaaatcatcttttcatgatcccaagctgaaaggcaagccctccagagagcgttatgtgacccacaaccgagcacattggtgacagaccttcggggcctgtctgaagccatagcctccacggagagccctgtggccgactctgcactctccaccctggctgggatcagagcaggagcatcctctgctggttcctgactggcaaaggaccagcgtcctcgttcaaaacattccaagaaaggttaaggagttcccccaaccatcttcactggcttccatcagtggtaactgctttggtctcttctttcatctggggatgacaatggacctctcagcagaaacacacagtcacattcgaattcgggtggcatcctccggagagagagagaggaaggagattccacacaggggtggagtttctgacgaaggtcctaagggagtgtttgtgtctgactcaggcgcctggcacatttcagggagaaactccaaagtccacacaaagattttctaaggaatgcacaaattgaaaacacactcaaaagacaaacatgcaagtaaagaaaaaaaaaagaaagacttttgtttaaatttgtaaaatgcaaaactgaatgaaactgttactaccataaatcaggatatgtttcatgaatatgagtctacctcacctatattgcactctggcagaagtatttcccacatttaattattgcctccccaaactcttcccacccctgctgccccttcctccatcccccatactaaatcctagcctcgtagaagtctggtctaatgtgtcagcagtagatataatattttcatggtaatctactagctctgatccataagaaaaaaaagatcattaaatcaggagattccctgtccttgatttttggagacacaatggtatagggttgtttatgaaatatattgaaaagtaagtgtttgttacgctttaaagcagtaaaattattttcctttatataaccggctaatgaaagaggttggattgaattttgatgtacttatttttttatagatatttatattcaaacaatttattccttatatttaccatgttaaatatctgtttgggcaggccatattggtctatgtatttttaaaatatgtatttctaaatgaaattgagaacatgctttgttttgcctgtcaaggtaatgactttagaaaataaatatttttttccttactgtaaaaaaaaaaaaaaaaaa

SEQ ID NO: 720 - protein, 212 aa, Homo sapiens
MDYLLMIFSLLFVACQGAPETAVLGAELSAVGENGGEKPTPSPPWRLRRSKRCSCSSLMDKECVYFCHLDIIWVNTPEHVVPYGLGSPRSKRALENLLPTKATDRENRCQCASQKDKKCWNFCQAGKELRAEDIMEKDWNNHKKGKDCSKLGKKCIYQQLVRGRKIRRSSEEHLRQTRSETMRNSVKSSFHDPKLKGKPSRERYVTHNRAHW

SEQ ID NO: 721 - DNA, 5756 bp, Homo sapiens
gttttactaaagtgaatttttttttgtttgcttcgttcgtctttggctctttttttttccttcccaatttcggatttatttcaaggcgaatctggctttgggggaagaggaagaaaagtcggattacaagatcaaccaccaccaacaacaataaaaaccaccaggatatttttttgcaaatttctgacggctttaaattcatgaagcaattgtccccttttgcaatcagcatttggatctcagaatgagcaaggaaagacccaagaggaatatcattcagaagaaatacgatgacagtgatgggattccgtggtcagaagaacgggtggtacgtaaagtcctttatttgtctctgaaggagttcaagaattcccagaagaggcagcatgcggaaggcattgctgggagcctgaaaactgtgaatgggctccttggtaatgaccagtctaagggattaggaccagcatcagaacagtcagagaatgaaaaggacgatgcatcccaagtgtcctccactagcaacgatgttagttcttcagattttgaagaagggccgtcgaggaaaaggcccaggctgcaagcacaaaggaagtttgctcagtctcagccgaatagtcccagcacaactccagtaaagatagtggagccattgctaccccctccagctactcagatatcagacctctctaaaaggaagcctaagacagaagattttcttacctttctctgccttcgaggttctcctgcgctgcccaacagcatggtgtattttggaagctctcaggatgaggaggaagtcgaggaggaagatgatgagacagaagacgtcaaaacagccaccaacaatgcttcatcttcatgccagtcgacccccaggaaaggaaaaacccacaaacatgttcacaacgggcatgttttcaatggttccagcaggtcaacacgggagaaggaacctgttcaaaaacacaaaagcaaagaggccactcccgcaaaggagaagcacagcgatcaccgggctgacagccgccgggagcaggcttcagctaaccaccccgcagcggccccctccacgggttcctcggccaaggggcttgctgccacccatcaccacccccctctgcatcggtcggctcaggacttacggaaacaggtttctaaggtaaacggagtcactcgaatgtcatctctgggtgcaggtgtaaccagtgccaaaaagatgcgcgaggtcagaccttcaccatccaaaactgtgaagtacactgccacggtgacgaagggggctgtcacatacaccaaagccaagagagaactggtcaaggacaccaaacccaatcaccacaagcccagttccgctgtcaaccacacaatctcagggaaaactgaaagtagcaatgcaaaaacccgcaaacaggtgctatccctcgggggggcgtccaagtccactgggcccgccgtcaatggcctcaaggtcagtggcaggttgaacccaaagtcatgcactaaggaggtgggggggcggcagctgcgggagggcctgcagctgcgggaggggctgcggaactccaagaggagactggaagaggcacaccaggcggagaagccgcagtcgccccccaagaagatgaaaggggcggctggccccgccgaaggccctggcaagaaggccccggccgagagaggtctgctgaacggacacgtgaagaaggaagtgccggagcgcagtctggagaggaatcggccgaagcgggccacggccgggaagagcacgccaggcagacaagcacatggcaaggcggacagcgcctcctgtgaaaatcgttctacctcgcaaccggagtccgtgcacaagccgcaggactcgggcaaggccgagaagggcggcggcaaggccgggtgggcggccatggacgagatccccgtcctcaggccctccgccaaggagttccacgatccgctcatctacatcgagtcggtccgcgctcaggtggagaagttcgggatgtgcagggtgatcccccctccggactggcggcccgagtgcaagctcaacgatgagatgcggtttgtcacgcagattcagcacatccacaagctgggccggcgctggggccccaacgtgcagcggctggcctgcatcaagaagcacctcaaatctcagggcatcaccatggacgagctcccgctcatagggggctgtgagctcgacctggcctgctttttccggctgattaatgagatgggcggcatgcagcaagtgactgacctcaaaaaatggaacaaactagcagacatgctgcgcatccccagaactgcccaggaccggctggccaagctgcaggaggcctactgccagtacctactctcctacgactccctgtccccagaggagcaccggcggctggagaaggaggtgctgatggagaaggagatcctggagaagcgcaaggggccgctggaaggccacacagagaacgaccaccacaagttccaccctctgccccgcttcgagcccaagaatgggctcatccacggcgtggcccccaggaacggcttccgcagcaagctcaaggaggtgggccaggcccagttgaagactggccggcggcgactcttcgctcaggaaaaagaagtggtcaaggaagaggaggaggacaaaggcgtcctcaatgacttccacaagtgcatctataagggaaggtctgtttctctaacaactttttatcgaacagcgaggaatatcatgagcatgtgtttcagcaaggagcctgccccagccgaaatcgagcaagagtactggaggctagtggaagagaaggactgccacgtggcagtgcactgcggcaaggtggacaccaacactcacggcagtggattcccagtaggaaaatcagaacccttttcgaggcatggatggaacctcaccgtcctccccaataacacagggtccatcctgcgtcacctcggtgctgtgcctggagtgactattccctggctaaatattggcatggtcttttctacctcatgctggtctcgagaccaaaatcaccttccatacattgactacttacacactggtgctgactgcatttggtattgcattcctgctgaggaggagaacaagctggaagatgtggtccacaccctgctgcaagccaatggcaccccagggctgcagatgctggaaagcaacgtcatgatctccccggaggtgctgtgcaaagaggggatcaaggtgcacaggaccgtgcagcagagtggccagtttgtcgtctgcttcccgggatcctttgtgtccaaagtgtgctgtgggtacagcgtgtctgaaaccgtgcactttgctaccacccagtggacaagtatgggctttgagaccgccaaggaaatgaagcgtcgccatatagctaagccattctccatggagaagttactctaccagattgcacaagcagaagcaaaaaaagaaaacggtcccactctcagtaccatctcagccctcctggatgagctcagggatacagagctgcggcagcgcaggcagctgttcgaggctggcctccactcctccgcacgctatggcagccacgatggcagcagcacggtggcggacgggaagaaaaagcctcgaaagtggctgcagttggagacgtcagagaggaggtgtcagatctgccagcacctgtgctacctgtccatggtggtacaagagaacgaaaacgtcgtgttctgtctggagtgtgctctgcgccacgtggagaaacagaagtcctgccgagggctgaagttgatgtaccgctacgatgaggaacagattatcagtctggtcaatcagatctgcggcaaagtgtctggtaaaaacggcagcattgagaactgtctcagtaaacccacaccaaaaagaggtccccgcaagagagcgacagtggacgtgcccccctcccgtctgtcagcctccagttcatccaaaagtgcttcgagctcatcatgaagatgccaacgcccgtggtcgatttatatatatttttttgtaattattatattctagtttggagtacttgctgtaggattcaagctgtctttgcactagctctaaagaagattttcttctggttttagagaactaattttgttttagcattaaactgttgaacttttttttgtacttagaaaacctagatactgcagtcagattttggaaactgccgtatagtcactgttttaaaaaccccggaggggctgtattaatttgtattgccccatggctgacaaaagcctttttttttggttttgatttttttttttttgtaactgttggggggaaaaaggctttttaacccatttttgaagagggtgaagtttggagaacaaatttaaaaaccatcagtcatgtgagcagattttttagaagggataggagacacacgcgcacacacacacacacacgaaacttgaaatggctttgctttggctgtcgtcttctgccgtgtgccagatgagcttgtgatctgggaagccggggcacccccgttttgtttctctgggcggttgtggcagctgaaggcggacgttgtttcctaaccataggtggaacgaggagacgggagcgagtgggctctccaccagcacatcactatgcatctgttccaggaaagaagaaaagcgagcgaggaagacggaaaagactgcctgccttggaggggtcacatgagggagacctgtgcctgatttcattaggaaatccattctgttattttttggtgctgttggctactttatcaaaaaacccttcaatagcatccttaagatttaaaaaaaaaaaaaaaaaaaaggaaaaaaaagtgatggaagccgtaagtgcttctttgtcatcgacgtgcaatctttctaacattccatctccatctcaccgcttcttgtttgacaccttcacaagtcagcattaatctttcttttaaaacttgtttcatttatgatcatgtagagagccactaggaggcctgcagttatttttgaatgtgaaaatgcatttgcgttcatcttgtctattttttctcttcatgttgtaacaaaaaggaaaaaagaaaaaaaaatcccatcccttttgtacatatgcctgtaaattgttttaaatacttgagcctttttctcggtggggggtggggaggggggtgagaagacaagatgaagaaaagccttacatttcagtttcttcatcggttggattggatgcttacagggtttttcttgtaacatttataagtgctgcttacatcactgaacaacaacaaaaaaataataatggagtagctgttgcccttctccggttgtgtgtacagtatgtgtggaataaaaaagggaaactgttttcacaagctgttctttgtttcataattggattcatcaatcccgtagctacccatattgcactgagcttgccagtggtgactgccaggaacgtcctatgatccactttgttggttgttgttgcagaagactgaactgttttggaatatttaacaattacagaaacagtcaagtgttttccaatgtggttgtccggtttctatggccttgctgtgtactttccctctttttgacagtaaacttctgcctatggcttacagtttgacatttaatttattagcgctgctctgcacccctcccttgggagggagacttcatgtggtttattgcgagttttttgtttacttttcaggtttgtactacaaggtttaataataaaaacaaagttttttgga

SEQ ID NO: 722 - protein, 1246 aa, Homo sapiens [sequence omitted]

SEQ ID NO: 723 - DNA, 1293 bp, Homo sapiens
gcttgaagcctcccaggagaaagaagccagcctgtagggtccagcgtcaaagcgaatcatggggtccagggctgagctgtgcactctcttaggcggattctccttcctcctgctactgataccaggcgagggggccaagggtggatccctcagagagagtcagggagtctgctccaagcagacactggtggtcccgctccactacaacgagtcctacagccaaccagtgtacaagccctacctgaccttgtgcgctgggaggcgcatctgcagcacttacaggaccatgtaccgcgttatgtggcgggaggtgaggcgggaggttcagcagacccatgcagtgtgctgccagggctggaagaagcggcacccgggggcgctcacctgtgaagccatctgcgccaagccttgcctgaacggaggcgtctgcgttaggcctgaccagtgcgagtgcgcccccggctggggagggaagcactgtcatgtggacgtggatgaatgtaggaccagcatcaccctctgctcgcaccattgttttaatacggcaggcagcttcacctgcggctgcccccatgacctagtgctaggcgtggacgggcgcacctgcatggaggggtccccagagcccccaaccagtgccagcatactcagcgtggccgttcgggaggcggaaaaagatgagcgcgctctgaagcaggagattcacgagctgcgagggcgcctggagcggctggagcagtgggccggtcaggctggggcctgggtcagagcggtgctgcccgtgccgcctgaagagctgcagccagaacaggtggctgagctgtggggccggggtgaccggatcgaatctctcagcgaccaggtgctgctgctggaggagaggctaggtgcctgctcctgtgaggacaacagcctgggcctcggcgtcaatcatcgataagaagcctctacagcacccctgccccctaatttatacagaaaccggacccactaatcctctgggattggccgactgtgagctgcagataaggctatcagccaccaaagagcaatgaacaatggaaacttcagagagctgaagaaagggggaggcctgtgttcttggcctgcccctgagtcttctggctgggggcaggttgcctgggcaagaactgcttcttcaattccttaacaaatgcaaccaccaacacccagatctctctctctctttattttcagtttttttgctgttatccagataattaataaaaaccaaccacgcaaaactggaaaaaaaaaaaaaaaaaaactcga

SEQ ID NO: 724 - protein, 293 aa, Homo sapiens
MGSRAELCTLLGGFSFLLLLIPGEGAKGGSLRESQGVCSKQTLVVPLHYNESYSQPVYKPYLTLCAGRRICSTYRTMYRVMWREVRREVQQTHAVCCQGWKKRHPGALTCEAICAKPCLNGGVCVRPDQCECAPGWGGKHCHVDVDECRTSITLCSHHCFNTAGSFTCGCPHDLVLGVDGRTCMEGSPEPPTSASILSVAVREAEKDERALKQEIHELRGRLERLEQWAGQAGAWVRAVLPVPPEELQPEQVAELWGRGDRIESLSDQVLLLEERLGACSCEDNSLGLGVNHR

SEQ ID NO: 725 - DNA, 2242 bp, Homo sapiens
ggaaaccagcaggcgttggggaggggtggcgggggaatagcggcggcagcagccccagccctcagagagacagcagaaagggagggagggagggtgctggggggacagccccccaccattcctaccgctatgggcccaacctcccactcccacctcccctccatcggccggggctaggacacccccaaatcccgtcgcccccttggcaccgacaccccgacagagacagagacacagccatccgccaccaccgctgccgcagcctggctggggagggggccagccccccaggccccctacccctctgaggtggccagaatggatttgtggccaggggcatggatgctgctgctgctgctcttcctgctgctgctcttcctgctgcccaccctgtggttctgcagccccagtgccaagtacttcttcaagatggccttctacaatggctggatcctcttcctggctgtgctcgccatccctgtgtgtgccgtgcgaggacgcaacgtcgagaacatgaagatcttgcgtctaatgctgctccacatcaaatacctgtacgggatccgagtggaggtgcgaggggctcaccacttccctccctcgcagccctatgttgttgtctccaaccaccagagctctctcgatctgcttgggatgatggaggtactgccaggccgctgtgtgcccattgccaagcgcgagctactgtgggctggctctgccgggctggcctgctggctggcaggagtcatcttcatcgaccggaagcgcacgggggatgccatcagtgtcatgtctgaggtcgcccagaccctgctcacccaggacgtgagggtctgggtgtttcctgagggaacgagaaaccacaatggctccatgctgcccttcaaacgtggcgccttccatcttgcagtgcaggcccaggttcccattgtccccatagtcatgtcctcctaccaagacttctactgcaagaaggagcgtcgcttcacctcgggacaatgtcaggtgcgggtgctgcccccagtgcccacggaagggctgacaccagatgacgtcccagctctggctgacagagtccggcactccatgctcactgttttccgggaaatctccactgatggccggggtggtggtgactatctgaagaagcctgggggcggtgggtgaaccctggctctgagctctcctcccatctgtccccatcttcctccccacacctacccacccagtgggccctgaagcagggccaaaccctcttccttgtctcccctctccccacttattctcctatttggaatcttcaacttctgaagtgaatgtggatacagcgccactcctgccccctcttggccccatccatggactcttgcctcggtgcagtctccactcttgacccccacctcctactgtcttgtctgtgggacagttgcctccccctcatctccagtgactcagcctacacaagggaggggaacattccatccccagtggagtctcttcctatgtggtcttctctacccctctaccccacattggccagtggactcatccattctttggaacaaatcccccccactccaaagtccatggattcaatggactcatccatttgtgaggaggacttctcgccctctggctggaagctgatacctgaagcactcccaggctcatcctgggagctttcctcagcaccttcaccttccctcccagtgtagcctcctgtcagtgggggctggacccttctaattcagaggtctcatgcctgcccttgcccagatgcccagggtcgtgcactctctgggataccagttcagtctccacatttctggttttctgtccccatagtacagttcttcagtggacatgaccccacccagccccctgcagccctgctgcaccatctcaccagacacaaggggaagaagcagacatcaggtgctgcactcacttctgccccctggggagttggggaaaggaacgaaccctggctggaggggataggagggcttttaatttatttctttttctgttgaggcttccccctctctgagccagttttcatttcttcctggtggcattagccactccctgcctctcactccagacctgttcccacaactggggaggtaggctgggagcaaaaggagagggtgggacccagttttgcgtggttggtttttattaattatctggataacagcaaaaaaactgaaaataaagagagagagagaaaaaaaaa

SEQ ID NO: 726 - protein, 283 aa, Homo sapiens
MDLWPGAWMLLLLLFLLLLFLLPTLWFCSPSAKYFFKMAFYNGWILFLAVLAIPVCAVRGRNVENMKILRLMLLHIKYLYGIRVEVRGAHHFPPSQPYVVVSNHQSSLDLLGMMEVLPGRCVPIAKRELLWAGSAGLACWLAGVIFIDRKRTGDAISVMSEVAQTLLTQDVRVWVFPEGTRNHNGSMLPFKRGAFHLAVQAQVPIVPIVMSSYQDFYCKKERRFTSGQCQVRVLPPVPTEGLTPDDVPALADRVRHSMLTVFREISTDGRGGGDYLKKPGGGG

SEQ ID NO: 727 - DNA, 2023 bp, Homo sapiens
ggactttggagcgtatggctccaaatcaactcattggctaaaacttgacggaaaatggtggttaggtggccagaatggatttgtggccaggggcatggatgctgctgctgctgctcttcctgctgctgctcttcctgctgcccaccctgtggttctgcagccccagtgccaagtacttcttcaagatggccttctacaatggctggatcctcttcctggctgtgctcgccatccctgtgtgtgccgtgcgaggacgcaacgtcgagaacatgaagatcttgcgtctaatgctgctccacatcaaatacctgtacgggatccgagtggaggtgcgaggggctcaccacttccctccctcgcagccctatgttgttgtctccaaccaccagagctctctcgatctgcttgggatgatggaggtactgccaggccgctgtgtgcccattgccaagcgcgagctactgtgggctggctctgccgggctggcctgctggctggcaggagtcatcttcatcgaccggaagcgcacgggggatgccatcagtgtcatgtctgaggtcgcccagaccctgctcacccaggacgtgagggtctgggtgtttcctgagggaacgagaaaccacaatggctccatgctgcccttcaaacgtggcgccttccatcttgcagtgcaggcccaggttcccattgtccccatagtcatgtcctcctaccaagacttctactgcaagaaggagcgtcgcttcacctcgggacaatgtcaggtgcgggtgctgcccccagtgcccacggaagggctgacaccagatgacgtcccagctctggctgacagagtccggcactccatgctcactgttttccgggaaatctccactgatggccggggtggtggtgactatctgaagaagcctgggggcggtgggtgaaccctggctctgagctctcctcccatctgtccccatcttcctccccacacctacccacccagtgggccctgaagcagggccaaaccctcttccttgtctcccctctccccacttattctcctatttggaatcttcaacttctgaagtgaatgtggatacagcgccactcctgccccctcttggccccatccatggactcttgcctcggtgcagtctccactcttgacccccacctcctactgtcttgtctgtgggacagttgcctccccctcatctccagtgactcagcctacacaagggaggggaacattccatccccagtggagtctcttcctatgtggtcttctctacccctctaccccacattggccagtggactcatccattctttggaacaaatcccccccactccaaagtccatggattcaatggactcatccatttgtgaggaggacttctcgccctctggctggaagctgatacctgaagcactcccaggctcatcctgggagctttcctcagcaccttcaccttccctcccagtgtagcctcctgtcagtgggggctggacccttctaattcagaggtctcatgcctgcccttgcccagatgcccagggtcgtgcactctctgggataccagttcagtctccacatttctggttttctgtccccatagtacagttcttcagtggacatgaccccacccagccccctgcagccctgctgcaccatctcaccagacacaaggggaagaagcagacatcaggtgctgcactcacttctgccccctggggagttggggaaaggaacgaaccctggctggaggggataggagggcttttaatttatttctttttctgttgaggcttccccctctctgagccagttttcatttcttcctggtggcattagccactccctgcctctcactccagacctgttcccacaactggggaggtaggctgggagcaaaaggagagggtgggacccagttttgcgtggttggtttttattaattatctggataacagcaaaaaaactgaaaataaagagagagagagaaaaaaaaaaaaaaaaaaaaaaaaaaaaaaaaaa

SEQ ID NO: 728 - protein, 283 aa, Homo sapiens; identical to SEQ ID NO: 726

SEQ ID NO: 729 - DNA, 1176 bp, Homo sapiens
aatagtgattaggaaaccttgaagcctgcccaacgatcgtgggcaggaggtggtttctggtttgttggggcgtgtgtatgtgtatttggggggactgaagggtacgtggggcgaaacaaaaccggccatggcagcagcggaggaggaggacgggggccccgaagggccaaatcgcgagcggggcggggcgggcgcgaccttcgaatgtaatatatgtttggagactgctcgggaagctgtggtcagtgtgtgtggccacctgtactgttggccatgtcttcatcagtggctggagacacggccagaacggcaagagtgtccagtatgtaaagctgggatcagcagagagaaggttgtcccgctttatgggcgagggagccagaagccccaggatcccagattaaaaactccaccccgcccccagggccagagaccagctccggagagcagagggggattccagccatttggtgataccgggggcttccacttctcatttggtgttggtgcttttccctttggctttttcaccaccgtcttcaatgcccatgagcctttccgccggggtacaggtgtggatctgggacagggtcacccagcctccagctggcaggattccctcttcctgtttctcgccatcttcttctttttttggctgctcagtatttgagctatgtctgcttcctgcccacctccagccagagaagaatcagtattgagggtccctgctgacccttccgtactcctggacccccttgacccctctatttctgttggctaaggccagccctggacattgtccaggaaggcctggggaggaggagtgaagtctgtgcatagatgggagagccttctgctcagaggctcactcagtaacgttgtttaattctctgccctggggaaggaggatggattgagagaatgtctttctcctctcctaagtctttgctttccctgatttcttgatttgatcttcaaaggtgggcaaagttccctctgactcttcccccactccccatcttactgatttaatttaatttttcactccccagagtctaatatggattctgactcttaagtgcttccgccccctcactacctcctttaatacaaattcaataaaaaaggtgaaatataaaaaaaaaaaaaaaaaaaaaaaaaaaaaaaaaaaaaaaa

SEQ ID NO: 730 - protein, 180 aa, Homo sapiens
MAAAEEEDGGPEGPNRERGGAGATFECNICLETAREAVVSVCGHLYCWPCLHQWLETRPERQECPVCKAGISREKVVPLYGRGSQKPQDPRLKTPPRPQGQRPAPESRGGFQPFGDTGGFHFSFGVGAFPFGFFTTVFNAHEPFRRGTGVDLGQGHPASSWQDSLFLFLAIFFFFWLLSI

SEQ ID NO: 731 - DNA, 1414 bp, Homo sapiens
gccaggaccctggaaggaagcaggatggcagccggaacagcagttggagcctgggtgctggtcctcagtctgtggggggcagtagtaggtgctcaaaacatcacagcccggattggcgagccactggtgctgaagtgtaagggggcccccaagaaaccaccccagcggctggaatggaaactgaacacaggccggacagaagcttggaaggtcctgtctccccagggaggaggcccctgggacagtgtggctcgtgtccttcccaacggctccctcttccttccggctgtcgggatccaggatgaggggattttccggtgccaggcaatgaacaggaatggaaaggagaccaagtccaactaccgagtccgtgtctaccagattcctgggaagccagaaattgtagattctgcctctgaactcacggctggtgttcccaataaggtggggacatgtgtgtcagagggaagctaccctgcagggactcttagctggcacttggatgggaagcccctggtgcctaatgagaagggagtatctgtgaaggaacagaccaggagacaccctgagacagggctcttcacactgcagtcggagctaatggtgaccccagcccggggaggagatccccgtcccaccttctcctgtagcttcagcccaggccttccccgacaccgggccttgcgcacagcccccatccagccccgtgtctgggagcctgtgcctctggaggaggtccaattggtggtggagccagaaggtggagcagtagctcctggtggaaccgtaaccctgacctgtgaagtccctgcccagccctctcctcaaatccactggatgaaggatggtgtgcccttgccccttccccccagccctgtgctgatcctccctgagatagggcctcaggaccagggaacctacagctgtgtggccacccattccagccacgggccccaggaaagccgtgctgtcagcatcagcatcatcgaaccaggcgaggaggggccaactgcaggctctgtgggaggatcagggctgggaactctagccctggccctggggatcctgggaggcctggggacagccgccctgctcattggggtcatcttgtggcaaaggcggcaacgccgaggagaggagaggaaggccccagaaaaccaggaggaagaggaggagcgtgcagaactgaatcagtcggaggaacctgaggcaggcgagagtagtactggagggccttgaggggcccacagacagatcccatccatcagctcccttttctttttcccttgaactgttctggcctcagaccaactctctcctgtataatctctctcctgtataaccccaccttgccaagctttcttctacaaccagagccccccacaatgatgattaaacacctgacacatcttga

SEQ ID NO: 732 - protein, 404 aa, Homo sapiens
MAAGTAVGAWVLVLSLWGAVVGAQNITARIGEPLVLKCKGAPKKPPQRLEWKLNTGRTEAWKVLSPQGGGPWDSVARVLPNGSLFLPAVGIQDEGIFRCQAMNRNGKETKSNYRVRVYQIPGKPEIVDSASELTAGVPNKVGTCVSEGSYPAGTLSWHLDGKPLVPNEKGVSVKEQTRRHPETGLFTLQSELMVTPARGGDPRPTFSCSFSPGLPRHRALRTAPIQPRVWEPVPLEEVQLVVEPEGGAVAPGGTVTLTCEVPAQPSPQIHWMKDGVPLPLPPSPVLILPEIGPQDQGTYSCVATHSSHGPQESRAVSISIIEPGEEGPTAGSVGGSGLGTLALALGILGGLGTAALLIGVILWQRRQRRGEERKAPENQEEEEERAELNQSEEPEAGESSTGGP

SEQ ID NO: 733 - DNA, 1259 bp, Homo sapiens
gccaggaccctggaaggaagcaggatggcagccggaacagcagttggagcctgggtgctggtcctcagtctgtggggggcagtagtaggtgctcaaaacatcacagcccggattggcgagccactggtgctgaagtgtaagggggcccccaagaaaccaccccagcggctggaatggaaactgggaggaggcccctgggacagtgtggctcgtgtccttcccaacggctccctcttccttccggctgtcgggatccaggatgaggggattttccggtgccaggcaatgaacaggaatggaaaggagaccaagtccaactaccgagtccgtgtctaccagattcctgggaagccagaaattgtagattctgcctctgaactcacggctggtgttcccaataaggtggggacatgtgtgtcagagggaagctaccctgcagggactcttagctggcacttggatgggaagcccctggtgcctaatgagaagggagtatctgtgaaggaacagaccaggagacaccctgagacagggctcttcacactgcagtcggagctaatggtgaccccagcccggggaggagatccccgtcccaccttctcctgtagcttcagcccaggccttccccgacaccgggccttgcgcacagcccccatccagccccgtgtctgggagcctgtgcctctggaggaggtccaattggtggtggagccagaaggtggagcagtagctcctggtggaaccgtaaccctgacctgtgaagtccctgcccagccctctcctcaaatccactggatgaaggatgtgagtgacctggagagaggggctgggagaaccaggcgaggaggggccaactgcaggctctgtgggaggatcagggctgggaactctagccctggccctggggatcctgggaggcctggggacagccgccctgctcattggggtcatcttgtggcaaaggcggcaacgccgaggagaggagaggaaggccccagaaaaccaggaggaagaggaggagcgtgcagaactgaatcagtcggaggaacctgaggcaggcgagagtagtactggagggccttgaggggcccacagacagatcccatccatcagctcccttttctttttcccttgaactgttctggcctcagaccaactctctcctgtataatctctctcctgtataaccccaccttgccaagctttcttctacaaccagagccccccacaatgatgattaaacacctgacacatcttga

SEQ ID NO: 734 - protein, 342 aa, Homo sapiens
MAAGTAVGAWVLVLSLWGAVVGAQNITARIGEPLVLKCKGAPKKPPQRLEWKLGGGPWDSVARVLPNGSLFLPAVGIQDEGIFRCQAMNRNGKETKSNYRVRVYQIPGKPEIVDSASELTAGVPNKVGTCVSEGSYPAGTLSWHLDGKPLVPNEKGVSVKEQTRRHPETGLFTLQSELMVTPARGGDPRPTFSCSFSPGLPRHRALRTAPIQPRVWEPVPLEEVQLVVEPEGGAVAPGGTVTLTCEVPAQPSPQIHWMKDVSDLERGAGRTRRGGANCRLCGRIRAGNSSPGPGDPGRPGDSRPAHWGHLVAKAATPRRGEEGPRKPGGRGGACRTESVGGT

SEQ ID NO: 735 - DNA, 3231 bp, Homo sapiens
ctctctcacacacacccccgcttgggcctcctctctctctccggctccattttctccgccgccgggggccggggtctcctgtggggggcccagccggtatcccaggtctcccttcagtgccggggtgaacccccgggggagccgggagccgggggcagacgggcgggggttggggcggagggagcagcggccccagcgagtttggggggagaagtaaccaggcggggggaggggcggagcagggagggggcctcagggcccccccccagctatggacgaacggctactggggccgccccctccaggcgggggccgggggggcctgggattggtgagtggggagcctgggggccctggcgagcctcccggtggcggagaccccggtgggggtagcgggggggtcccgggaggccgagggaagcaagacatcggggacattctgcagcagataatgaccatcaccgaccagagcctggacgaggcccaggccaagaaacacgccctaaactgccaccgaatgaagcctgctctctttagcgtcctgtgtgaaatcaaggagaaaactggcctcagcattcggagctcccaggaggaggagccggtggacccacagctgatgcgcttggacaacatgcttctggcagagggtgtggctgggcccgagaaagggggcggctcagcagcagcagctgcagccgctgcagcctctggtggtggtgtgtcccctgacaactccatcgaacactcggactatcgcagcaaacttgcccagatccgtcacatataccactcggagctggagaagtatgagcaggcatgtaatgagttcacgacccatgtcatgaacctgctgagggagcagagccgcaccaggcccgtggcccccaaagagatggaacgcatggtgagcatcatccatcgaaagttcagcgccatccagatgcagctgaagcagagcacctgcgaggctgtgatgatcctgcgctcccgtttcctggatgccagacgaaagcgccgtaacttcagcaaacaggccactgaggtcctaaatgagtatttctactcccacctgagtaacccatatcctagtgaggaggccaaggaggagcttgccaagaagtgtggcatcaccgtgtctcaggtctccaactggtttggcaacaagaggattcgctataagaaaaacatcggaaagttccaagaggaggcaaacatctatgctgtcaagaccgccgtgtcagtcacccaggggggccacagccgcaccagctccccgacacccccttcctctgcaggctctggcggctctttcaatctctcaggatctggagacatgtttctggggatgcctgggctcaacggagattcctattctgcttcccaggtggaatcactccgacactcgatggggccagggggctatggggataacctcgggggaggccagatgtacagcccacgggaaatgagggcaaatggcagctggcaagaggctgtgaccccctcttcagtgacatccccaacggagggaccagggagtgttcactctgatacctccaactgatcttgcccctcagggtcacaggggtgggggctctcacaaggcgacttgaagaggacgcaggcttccagaggacaaaccccaatacaggagaagcacaagacagagaagggccaatggggtcatcccctccctaacgagactctctgtgctgggggtgctaattacatggcaggaagaatggggcctctaaggggagtgtggggtctgtctctcccttttttccatctttttcctctctcgctttctttcttacacagaaacatacacataccgagaaacctatttctcagacccctttttctcctctgtctttctctctccctctcccacacctcacacacacatactcccacttgcaactattctgtttctctcctgggctcccccactttcccttccccaccccacttgtatgctctggaatctgtggagacgccagccctgcccaatcagagatgccaaaaatggggacatgacttctggacagaggacatgggccacgcccccatgcatccccacccccgcccctccggacggcttacttacctcatacgcagctcatcttaaaccaatagaatcgctcggtggacgagagtgtctgactcagatatctacctcggagggagtttctgctactttagggaattattgactgggctttggggttgaacttttttttttttaaagaaagaaaaagaaaccctgggatccatctgttttttttgttgttgttgttgtttttgttgttgttggtggtggtggtggtggtggttcttaatttttaatttagtttggggaagtagcttgtttttttttttataaatatgttgatttcttgtctttttttttttttatttcttactttcccatattaggggtgatagccaaaggggttctggtaagagaaagggggacaaacagaactggtaaagaggcccccctggctccaggcctgtccatcaggaagtaaattttacagggcaccaagctttgccccctaaaatcccttaggtgttctttgttcatgcaggcaggtttctgccgcatttgatgtggaggcagtgaagggcttgccctgctggcctctcatcccccttcttcccacaacccttgggcagggctggactcagtaattttgaggaaattgaagatgccatcttcccctgtgagtgacatgtctttaattttttaaaaaactactatttgaaaattggagggggaagaatgggaagggagttattgccaaatatgttaaatatgggttggggtgcttgtatatgtatcttcctcaatttccccataaatgaggtatctttttgtcacaccaaaatcaaggggtagggagagggaggaggttgcaaaaagccagatgtgggggaaaagtaacatcaacactgtcccatcctcagccctgaactagctaccatctgatcccctcagacattctcaggattttacaagactgtcagagtggggaacccctcccattaaagatccgggcaggactggggacaggttggaagtgtgatgggtgggggggtgggaggcatgggccgggggcagttctctcctcacttgtaaacttgtgtagtttcacagaaaaaaaacaaaatgcagttttaaataaagaaatttcttttttccctgggaaaaaaaaaaaaaaaaaa

SEQ ID NO: 736 - protein, 430 aa, Homo sapiens
MDERLLGPPPPGGGRGGLGLVSGEPGGPGEPPGGGDPGGGSGGVPGGRGKQDIGDILQQIMTITDQSLDEAQAKKHALNCHRMKPALFSVLCEIKEKTGLSIRSSQEEEPVDPQLMRLDNMLLAEGVAGPEKGGGSAAAAAAAAASGGGVSPDNSIEHSDYRSKLAQIRHIYHSELEKYEQACNEFTTHVMNLLREQSRTRPVAPKEMERMVSIIHRKFSAIQMQLKQSTCEAVMILRSRFLDARRKRRNFSKQATEVLNEYFYSHLSNPYPSEEAKEELAKKCGITVSQVSNWFGNKRIRYKKNIGKFQEEANIYAVKTAVSVTQGGHSRTSSPTPPSSAGSGGSFNLSGSGDMFLGMPGLNGDSYSASQVESLRHSMGPGGYGDNLGGGQMYSPREMRANGSWQEAVTPSSVTSPTEGPGSVHSDTSN

SEQ ID NO: 737 - DNA, 1472 bp, Homo sapiens
ccggagcggggatcaccttaacttgactgtggtcccccagccctccaagaaatgcccataaaccaaggaggagagggtaaaaaatagaagaatacatggaattggggagaagaatgggaaaaaagatgggagtgactgcataatgtcagcattttgtgcttttggctcagcatttggattggatggaggattttcatcctgaaaccagccctccgtcgccaccgaccatggaataattgtcttccacgaaactcttccctggtgccaaaaagggttttatgtatatatttgagagctccacatccctggatctgaatcctccacttcccactggaaccatgcccctcccagtcccgtttctcccctctaggggatggaggctgagagaccccaggaagaagaggatggtgagcagggcccccctcaggatgaggaaggctggccccctccaaactccaccactcggccttggcgatctgctcctccatcccctcctcctccagggacccgccacacagccctgggaccccgctcggcctccctgctctccctgcagactgaactccttctggacctggtggctgaagcccagtcccgccgcctggaggagcagagggccaccttctacaccccccaaaacccctcaagcctagcccctgccccactccgtcctctcgaggacagagaacagctttacagcactatcctcagtcaccagtgccagcggatggaagcccagcggtcagagcctcccctccctccaggggggcaagagctcctggagttgctgctgagagttcagggtgggggtcgaatggaggagcaaaggtcccggccccccacacacacctgctgagacttgagccccaaccagcccttccttgccactggtctcaaagctgggcagcccattgcatgccctcaactcttgcttggcaggggtaccagagactgaaagacacggcacaaatctcaatattcatctcccacatcaccttccctgggaactggacagggtgaaagtcctcaaactctgggaacaggcgagatggaacagggatttaactccccgcccacaggtccatgggagcttgaggcagtaagggggatcccaggcacccatctcaaggagtggctgggagtcttttccctaacttgtggggacaccaccagttgtcaagctactaggcagtagggtctgagggctcaggcctccacctgagaggttataacctgagagacagctctacccttcctcccagtaagaagggaaggtgggtgggcacctgagagattaagactattctcccagtcccactaccagcacccccgatccctgagactgaggggtttacgggctgtgaatggaccttcagccctgcccaccctccctccccactgctgctgagtctgtctgatgttttggttgtgtgaataaatataattcccctctggaaaaaaaaaaaaaaaaa

SEQ ID NO: 738 - protein, 160 aa, Homo sapiens
MEAERPQEEEDGEQGPPQDEEGWPPPNSTTRPWRSAPPSPPPPGTRHTALGPRSASLLSLQTELLLDLVAEAQSRRLEEQRATFYTPQNPSSLAPAPLRPLEDREQLYSTILSHQCQRMEAQRSEPPLPPGGQELLELLLRVQGGGRMEEQRSRPPTHTC

SEQ ID NO: 739 - DNA, 6762 bp, Homo sapiens
agacgtgaggcttgcagcaggccgaggaggaagaagaggggcagtgggagcagaggaggtggctcctgccccagtgagagctctgagggtccctgcctgaagagggacagggaccggggcttggagaaggggctgtggaatgcagcccccttcactgctgctgctgctgctgctgctgctgctgctatgtgtctcagtggtcagacccagagggctgctgtgtgggagtttcccagaaccctgtgccaatggaggcacctgcctgagcctgtctctgggacaagggacctgccagtgtgcccctggcttcctgggtgagacgtgccagtttcctgacccctgccagaacgcccagctctgccaaaatggaggcagctgccaagccctgcttcccgctcccctagggctccccagctctccctctccattgacacccagcttcttgtgcacttgcctccctggcttcactggtgagagatgccaggccaagcttgaagacccttgtcctccctccttctgttccaaaaggggccgctgccacatccaggcctcgggccgcccacagtgctcctgcatgcctggatggacaggtgagcagtgccagcttcgggacttctgttcagccaacccatgtgttaatggaggggtgtgtctggccacatacccccagatccagtgccactgcccaccgggcttcgagggccatgcctgtgaacgtgatgtcaacgagtgcttccaggacccaggaccctgccccaaaggcacctcctgccataacaccctgggctccttccagtgcctctgccctgtggggcaggagggtccacgttgtgagctgcgggcaggaccctgccctcctaggggctgttcgaatgggggcacctgccagctgatgccagagaaagactccacctttcacctctgcctctgtcccccaggtttcataggcccagactgtgaggtgaatccagacaactgtgtcagccaccagtgtcagaatgggggcacttgccaggatgggctggacacctacacctgcctctgcccagaaacctggacaggctgggactgctccgaagatgtggatgagtgtgagacccagggtccccctcactgcagaaacgggggcacctgccagaactctgctggtagctttcactgcgtgtgtgtgagtggctggggcggcacaagctgtgaggagaacctggatgactgtattgctgccacctgtgccccgggatccacctgcattgaccgggtgggctctttctcctgcctctgcccacctggacgcacaggactcctgtgccacttggaagacatgtgtctgagccagccgtgccatggggatgcccaatgcagcaccaaccccctcacaggctccacactctgcctgtgtcagcctggctattcggggcccacctgccaccaggacctggacgagtgtctgatggcccagcaaggcccaagtccctgtgaacatggcggttcctgcctcaacactcctggctccttcaactgcctctgtccacctggctacacaggctcccgttgtgaggctgatcacaatgagtgcctctcccagccctgccacccaggaagcacctgtctggacctacttgccaccttccactgcctctgcccgccaggcttagaagggcagctctgtgaggtggagaccaacgagtgtgcctcagctccctgcctgaaccacgcggattgccatgacctgctcaacggcttccagtgcatctgcctgcctggattctccggcacccgatgtgaggaggatatcgatgagtgcagaagctctccctgtgccaatggtgggcagtgccaggaccagcctggagccttccactgcaagtgtctcccaggctttgaagggccacgctgtcaaacagaggtggatgagtgcctgagtgacccatgtcccgttggagccagctgccttgatcttccaggagccttcttttgcctctgcccctctggtttcacaggccagctctgtgaggttcccctgtgtgctcccaacctgtgccagcccaagcagatatgtaaggaccagaaagacaaggccaactgcctctgtcctgatggaagccctggctgtgccccacctgaggacaactgcacctgccaccacgggcactgccagagatcctcatgtgtgtgtgacgtgggttggacggggccagagtgtgaggcagagctagggggctgcatctctgcaccctgtgcccatggggggacctgctacccccagccctctggctacaactgcacctgccctacaggctacacaggacccacctgtagtgaggagatgacagcttgtcactcagggccatgtctcaatggcggctcctgcaaccctagccctggaggctactactgcacctgccctccaagccacacagggccccagtgccaaaccagcactgactactgtgtgtctgccccgtgcttcaatgggggtacctgtgtgaacaggcctggcaccttctcctgcctctgtgccatgggcttccagggcccgcgctgtgagggaaagctccgccccagctgtgcagacagcccctgtaggaatagggcaacctgccaggacagccctcagggtccccgctgcctctgccccactggctacaccggaggcagctgccagactctgatggacttatgtgcccagaagccctgcccacgcaattcccactgcctccagactgggccctccttccactgcttgtgcctccagggatggaccgggcctctctgcaaccttccactgtcctcctgccagaaggctgcactgagccaaggcatagacgtctcttccctttgccacaatggaggcctctgtgtcgacagcggcccctcctatttctgccactgcccccctggattccaaggcagcctgtgccaggatcacgtgaacccatgtgagtccaggccttgccagaacggggccacctgcatggcccagcccagtgggtatctctgccagtgtgccccaggctacgatggacagaactgctcaaaggaactcgatgcttgtcagtcccaaccctgtcacaaccatggaacctgtactcccaaacctggaggattccactgtgcctgccctccaggctttgtggggctacgctgtgagggagacgtggacgagtgtctggaccagccctgccaccccacaggcactgcagcctgccactctctggccaatgccttctactgccagtgtctgcctggacacacaggccagtggtgtgaggtggagatagacccctgccacagccaaccctgctttcatggagggacctgtgaggccacagcaggatcacccctgggtttcatctgccactgccccaagggttttgaaggccccacctgcagccacagggccccttcctgcggcttccatcactgccaccacggaggcctgtgtctgccctcccctaagccaggcttcccaccacgctgtgcctgcctcagtggctatgggggtcctgactgcctgaccccaccagctcctaaaggctgtggccctccctccccatgcctatacaatggcagctgctcagagaccacgggcttggggggcccaggctttcgatgctcctgccctcacagctctccagggccccggtgtcagaaacccggagccaaggggtgtgagggcagaagtggagatggggcctgcgatgctggctgcagtggcccgggaggaaactgggatggaggggactgctctctgggagtcccagacccctggaagggctgcccctcccactctcggtgctggcttctcttccgggacgggcagtgccacccacagtgtgactctgaagagtgtctgtttgatggctacgactgtgagacccctccagcctgcactccagcctatgaccagtactgccatgatcacttccacaacgggcactgtgagaaaggctgcaacactgcagagtgtggctgggatggaggtgactgcaggcctgaagatggggacccagagtgggggccctccctggccctgctggtggtactgagccccccagccctagaccagcagctgtttgccctggcccgggtgctgtccctgactctgagggtaggactctgggtaaggaaggatcgtgatggcagggacatggtgtacccctatcctggggcccgggctgaagaaaagctaggaggaactcgggaccccacctatcaggagagagcagcccctcaaacgcagcccctgggcaaggagaccgactccctcagtgctgggtttgtggtggtcatgggtgtggatttgtcccgctgtggccctgaccacccggcatcccgctgtccctgggaccctgggcttctactccgcttccttgctgcgatggctgcagtgggagccctggagcccctgctgcctggaccactgctggctgtccaccctcatgcagggaccgcaccccctgccaaccagcttccctggcctgtgctgtgctccccagtggccggggtgattctcctggccctaggggctcttctcgtcctccagctcatccggcgtcgacgccgagagcatggagctctctggctgccccctggtttcactcgacggcctcggactcagtcagctccccaccgacgccggcccccactaggcgaggacagcattggtctcaaggcactgaagccaaaggcagaagttgatgaggatggagttgtgatgtgctcaggccctgaggagggagaggaggtgggccaggctgaagaaacaggcccaccctccacgtgccagctctggtctctgagtggtggctgtggggcgctccctcaggcagccatgctaactcctccccaggaatctgagatggaagcccctgacctggacacccgtggacctgatggggtgacacccctgatgtcagcagtttgctgtggggaagtacagtccgggaccttccaaggggcatggttgggatgtcctgagccctgggaacctctgctggatggaggggcctgtccccaggctcacaccgtgggcactggggagacccccctgcacctggctgcccgattctcccggccaaccgctgcccgccgcctccttgaggctggagccaaccccaaccagccagaccgggcagggcgcacaccccttcatgctgctgtggctgctgatgctcgggaggtctgccagcttctgctccgtagcagacaaactgcagtggacgctcgcacagaggacgggaccacacccttgatgctggctgccaggctggcggtggaagacctggttgaagaactgattgcagcccaagcagacgtgggggccagagataaatgggggaaaactgcgctgcactgggctgctgccgtgaacaacgcccgagccgcccgctcgcttctccaggccggagccgataaagatgcccaggacaacagggagcagacgccgctattcctggcggcgcgggaaggagcggtggaagtagcccagctactgctggggctgggggcagcccgagagctgcgggaccaggctgggctagcgccggcggacgtcgctcaccaacgtaaccactgggatctgctgacgctgctggaaggggctgggccaccagaggcccgtcacaaagccacgccgggccgcgaggctgggcccttcccgcgcgcacggacggtgtcagtaagcgtgcccccgcatgggggcggggctctgccgcgctgccggacgctgtcagccggagcaggccctcgtgggggcggagcttgtctgcaggctcggacttggtccgtagacttggctgcgcgggggggcggggcctattctcattgccggagcctctcgggagtaggagcaggaggaggcccgacccctcgcggccgtaggttttctgcaggcatgcgcgggcctcggcccaaccctgcgataatgcgaggaagatacggagtggctgccgggcgcggaggcagggtctcaacggatgactggccctgtgattgggtggccctgggagcttgcggttctgcctccaacattccgatcccgcctccttgccttactccgtccccggagcggggatcacctcaacttgactgtggtcccccagccctccaagaaatgcccataaaccaaggaggagagggtaaaaaatagaagaatacatggtagggaggaattccaaaaatgattacccattaaaaggcaggctggaaggccttcctggttttaagatggatcccccaaaatgaagggttgtgagtttagtttctctcctaaaatgaatgtatgcccaccagagcagacatcttccacgtggagaagctgcagctctggaaagagggtttaagatgctaggatgaggcaggcccagtcctcctccagaaaataagacaggccacaggagggcagagtggagtggaaatacccctaagttggaaccaagaattgcaggcatatgggatgtaagatgttctttcctatatatggtttccaaagggtgcccctatgatccattgtccccactgcccacaaatggctgacaaatatttattgggcacctactatgtgccaggcactgtgtaggtgctgaaaagtggccaagggccacccccgctgatgactccttgcattccctcccctcacaacaaagaactccactgtggggatgaagcgcttcttctagccactgctatcgctatttaagaaccctaaatctgtcacccataataaagctgatttgaagtgttaaaaaaaaaaaaaaaaaa

SEQ ID NO: 740 - protein, 2003 aa, Homo sapiens
MQPPSLLLLLLLLLLLCVSVVRPRGLLCGSFPEPCANGGTCLSLSLGQGTCQCAPGFLGETCQFPDPCQNAQLCQNGGSCQALLPAPLGLPSSPSPLTPSFLCTCLPGFTGERCQAKLEDPCPPSFCSKRGRCHIQASGRPQCSCMPGWTGEQCQLRDFCSANPCVNGGVCLATYPQIQCHCPPGFEGHACERDVNECFQDPGPCPKGTSCHNTLGSFQCLCPVGQEGPRCELRAGPCPPRGCSNGGTCQLMPEKDSTFHLCLCPPGFIGPDCEVNPDNCVSHQCQNGGTCQDGLDTYTCLCPETWTGWDCSEDVDECETQGPPHCRNGGTCQNSAGSFHCVCVSGWGGTSCEENLDDCIAATCAPGSTCIDRVGSFSCLCPPGRTGLLCHLEDMCLSQPCHGDAQCSTNPLTGSTLCLCQPGYSGPTCHQDLDECLMAQQGPSPCEHGGSCLNTPGSFNCLCPPGYTGSRCEADHNECLSQPCHPGSTCLDLLATFHCLCPPGLEGQLCEVETNECASAPCLNHADCHDLLNGFQCICLPGFSGTRCEEDIDECRSSPCANGGQCQDQPGAFHCKCLPGFEGPRCQTEVDECLSDPCPVGASCLDLPGAFFCLCPSGFTGQLCEVPLCAPNLCQPKQICKDQKDKANCLCPDGSPGCAPPEDNCTCHHGHCQRSSCVCDVGWTGPECEAELGGCISAPCAHGGTCYPQPSGYNCTCPTGYTGPTCSEEMTACHSGPCLNGGSCNPSPGGYYCTCPPSHTGPQCQTSTDYCVSAPCFNGGTCVNRPGTFSCLCAMGFQGPRCEGKLRPSCADSPCRNRATCQDSPQGPRCLCPTGYTGGSCQTLMDLCAQKPCPRNSHCLQTGPSFHCLCLQGWTGPLCNLPLSSCQKAALSQGIDVSSLCHNGGLCVDSGPSYFCHCPPGFQGSLCQDHVNPCESRPCQNGATCMAQPSGYLCQCAPGYDGQNCSKELDACQSQPCHNHGTCTPKPGGFHCACPPGFVGLRCEGDVDECLDQPCHPTGTAACHSLANAFYCQCLPGHTGQWCEVEIDPCHSQPCFHGGTCEATAGSPLGFICHCPKGFEGPTCSHRAPSCGFHHCHHGGLCLPSPKPGFPPRCACLSGYGGPDCLTPPAPKGCGPPSPCLYNGSCSETTGLGGPGFRCSCPHSSPGPRCQKPGAKGCEGRSGDGACDAGCSGPGGNWDGGDCSLGVPDPWKGCPSHSRCWLLFRDGQCHPQCDSEECLFDGYDCETPPACTPAYDQYCHDHFHNGHCEKGCNTAECGWDGGDCRPEDGDPEWGPSLALLVVLSPPALDQQLFALARVLSLTLRVGLWVRKDRDGRDMVYPYPGARAEEKLGGTRDPTYQERAAPQTQPLGKETDSLSAGFVVVMGVDLSRCGPDHPASRCPWDPGLLLRFLAAMAAVGALEPLLPGPLLAVHPHAGTAPPANQLPWPVLCSPVAGVILLALGALLVLQLIRRRRREHGALWLPPGFTRRPRTQSAPHRRRPPLGEDSIGLKALKPKAEVDEDGVVMCSGPEEGEEVGQAEETGPPSTCQLWSLSGGCGALPQAAMLTPPQESEMEAPDLDTRGPDGVTPLMSAVCCGEVQSGTFQGAWLGCPEPWEPLLDGGACPQAHTVGTGETPLHLAARFSRPTAARRLLEAGANPNQPDRAGRTPLHAAVAADAREVCQLLLRSRQTAVDARTEDGTTPLMLAARLAVEDLVEELIAAQADVGARDKWGKTALHWAAAVNNARAARSLLQAGADKDAQDNREQTPLFLAAREGAVEVAQLLLGLGAARELRDQAGLAPADVAHQRNHWDLLTLLEGAGPPEARHKATPGREAGPFPRARTVSVSVPPHGGGALPRCRTLSAGAGPRGGGACLQARTWSVDLAARGGGAYSHCRSLSGVGAGGGPTPRGRRFSAGMRGPRPNPAIMRGRYGVAAGRGGRVSTDDWPCDWVALGACGSASNIPIPPPCLTPSPERGSPQLDCGPPALQEMPINQGGEGKK

SEQ ID NO: 741 - DNA, 524 bp, Homo sapiens
gatgggagtttgatgttccagctagtgtcaatggttgagattgacaggatgaagctgtgcagaccagagccattctcaactacattgccagcaaatacaacctttatgggaaagacacaaaggagagagccctgattgatatgtatatagaaggtatggcagatttgaatgaaatgatccttcttctgcccatatgtcaacctgaggaaaaagatgtcaaacttgccttgatcgaagagagaatgaaaaattgctatttccctacctttgagaaagccctgaaaaccagaatcagcaacctccccacagtgaagaagtttctgcagcctggcagccagaggaggcctcccgtagatgtgaaagctttagaagaagcaaggaagactttcaaggtttgaaaaagaagccatcgaggccaagcacatgcaagaccaattttctaaagttctgcaacaatgaagtgatttacctaagtgttgattctgattgttgtgagaccaataaagttttccaaagtatatgct

SEQ ID NO: 742 - DNA, 3268 bp, Homo sapiens
taaaccaagaaggttatcctcaatcatctggtatcaatatataattatttttcacatttctgttactttttaatgagatttgaggttgttctgtgattgttatcagaattaccaatgcacaaaagccagaatgtatttggaaactagaagagctatttttgttttttggatttttctccaagttcaaggaaccaaagatatctccattaacatataccattctgaaactaaagacatagacaatcccccaagaaatgaaacaactgaaagtactgaaaaaatgtacaaaatgtcaactatgagacgaatattcgatttggcaaagcatcgaacaaaaagatccgcatttttcccaacgggggttaaagtctgtccacaggaatccatgaaacagattttagacagtcttcaagcttattatagattgagagtgtgtcaggaagcagtatgggaagcatatcggatctttctggatcgcatccctgacacaggggaatatcaggactgggtcagcatctgccagcaggagaccttctgcctctttgacattggaaaaaacttcagcaattcccaggagcacctggatcttctccagcagagaataaaacagagaagtttccctgacagaaaagatgaaatatctgcagagaagacattgggagagcctggtgaaaccattgtcatttcaacagatgttgccaacgtctcacttgggcctttccctctcactcctgatgacaccctcctcaatgaaattctcgataatacactcaacgacaccaagatgcctacaacagaaagagaaacagaattcgctgtgttggaggagcagagggtggagctcagcgtctctctggtaaaccagaagttcaaggcagagctcgctgactcccagtccccatattaccaggagctagcaggaaagtcccaacttcagatgcaaaagatatttaagaaacttccaggattcaaaaaaatccatgtgttaggatttagaccaaagaaagaaaaagatggctcaagctccacagagatgcaacttacggccatctttaagagacacagtgcagaagcaaaaagccctgcaagtgacctcctgtcttttgattccaacaaaattgaaagtgaggaagtctatcatggaaccatggaggaggacaagcaaccagaaatctatctcacagctacagacctcaaaaggctgatcagcaaagcactagaggaagaacaatctttggatgtggggacaattcagttcactgatgaaattgctggatcactgccagcctttggtcctgacacccaatcagagctgcccacatcttttgctgttataacagaggatgctactttgagtccagaacttcctcctgttgaaccccagcttgagacagtggacggagcagagcatggtctacctgacacttcttggtctccacctgctatggcctctacctccctgtcagaagctccacctttctttatggcatcaagcatcttctctctgactgatcaaggcaccacagatacaatggccactgaccagacaatgctagtaccagggctcaccatccccaccagtgattattctgcaatcagccaactggctctgggaatttcacatccacctgcatcttcagatgacagccgatcaagtgcaggtggcgaagatatggtcagacacctagatgaaatggatctgtctgacactcctgccccatctgaggtaccagagctcagcgaatatgtttctgtcccagatcatttcttggaggataccactcctgtctcagctttacagtatatcaccactagttctatgaccattgcccccaagggccgagagctggtagtgttcttcagtctgcgtgttgctaacatggccttctccaacgacctgttcaacaagagctctctggagtaccgagctctggagcaacaattcacacagctgctggttccatatctacgatccaatcttacaggatttaagcaacttgaaatacttaacttcagaaacgggagtgtgattgtgaatagcaaaatgaagtttgctaagtctgtgccgtataacctcaccaaggctgtgcacggggtcttggaggattttcgttctgctgcagcccaacaactccatctggaaatagacagctactctctcaacattgaaccagctgatcaagcagatccctgcaagttcctggcctgcggcgaatttgcccaatgtgtaaagaacgaacggactgaggaagcggagtgtcgctgcaaaccaggatatgacagccaggggagcctggacggtctggaaccaggcctctgtggccctggcacaaaggaatgcgaggtcctccagggaaagggagctccatgcaggttgccagatcactctgaaaatcaagcatacaaaactagtgttaaaaagttccaaaatcaacaaaataacaaggtaatcagtaaaagaaattctgaattactgaccgtagaatatgaagaatttaaccatcaagattgggaaggaaattaaaaactgaaaatgtacaattatcacttaggctatctcaagagagatgatttgccttctcaaggaaaatggagacaggcatattcatgggtcatcaaaatccagacatacagtcaacactgagaatcagcacacaccatatttcaaatatagaagagtcatgtacttggcaaccagtaaattctgaaaaaaaagacacttacttattattaaaaccccaaatgcaatcagcgaaacatatttttactattcttggatgatagtcaaaatgatcataagccaggtttgcttccaccttccctgaaaattttactcacagatcatttgcaacaagcatagcttacttattgtttagggactgaacaatttattgggaagcaaactctttatatgctagaaagtacatttaaaagatgactacttacgcagggagatgcaggtctctctaaacgcatgaatgtatgtagtgtgtaggcactgtagtgagtgtatatatgctccacactacgtctgataaacacaaacctcagtattcagttattaggcacactagttttatacgcaactactgcttacatagtagactgttttgttgccaataatctttgaattgttctttaaaagaaactgaggttcagatacacataccatggaaaaatcttacttttcttgttactacacaaagctattttaaagaagatgctatgttgggagaagggcgaagttgtactatatgacataatcaat

SEQ ID NO: 743 - protein, 797 aa, Homo sapiens
MYLETRRAIFVFWIFLQVQGTKDISINIYHSETKDIDNPPRNETTESTEKMYKMSTMRRIFDLAKHRTKRSAFFPTGVKVCPQESMKQILDSLQAYYRLRVCQEAVWEAYRIFLDRIPDTGEYQDWVSICQQETFCLFDIGKNFSNSQEHLDLLQQRIKQRSFPDRKDEISAEKTLGEPGETIVISTDVANVSLGPFPLTPDDTLLNEILDNTLNDTKMPTTERETEFAVLEEQRVELSVSLVNQKFKAELADSQSPYYQELAGKSQLQMQKIFKKLPGFKKIHVLGFRPKKEKDGSSSTEMQLTAIFKRHSAEAKSPASDLLSFDSNKIESEEVYHGTMEEDKQPEIYLTATDLKRLISKALEEEQSLDVGTIQFTDEIAGSLPAFGPDTQSELPTSFAVITEDATLSPELPPVEPQLETVDGAEHGLPDTSWSPPAMASTSLSEAPPFFMASSIFSLTDQGTTDTMATDQTMLVPGLTIPTSDYSAISQLALGISHPPASSDDSRSSAGGEDMVRHLDEMDLSDTPAPSEVPELSEYVSVPDHFLEDTTPVSALQYITTSSMTIAPKGRELVVFFSLRVANMAFSNDLFNKSSLEYRALEQQFTQLLVPYLRSNLTGFKQLEILNFRNGSVIVNSKMKFAKSVPYNLTKAVHGVLEDFRSAAAQQLHLEIDSYSLNIEPADQADPCKFLACGEFAQCVKNERTEEAECRCKPGYDSQGSLDGLEPGLCGPGTKECEVLQGKGAPCRLPDHSENQAYKTSVKKFQNQQNNKVISKRNSELLTVEYEEFNHQDWEGN

SEQ ID NO: 744 - DNA, 5775 bp, Homo sapiens
attcctgtagtagcggctgtattgcagccgcctgccgaactgacccgggtctggggactggcccctctggcgccgttcggtttctcttattgccttcactgaggatgagtccctttgtggctctatgtggaccctgcggaatccaccggcgcagtttcatctagcgactggtcacccttgcaattatggatatttaaaagggtcagacagtgtggagggggagttcccctcctcactcccccttggtgcttgactccaggaataatttataaactgtggaatttttttaaatgaagaacttgtatttgatatgaactttatagagctatttataatttttttgatttaagtgccaaaaaattgtataaagatatatagttttatactattgtcaggaggatttaaattatcctaaaaaggtaatttattctctgtaacttcctcaatagcacctttgtgtcctggctttttcattttttaaaattagttttcacgattctgaagtaagtggtataaaaacagttaggatgagttcacccatgcctgactgcacatcaaagtgtcgatccctgaagcatgctttggatgtcctttctgtggtaacaaaggggagcgaaaaccagattaaggcctttctctccagtcattgttacaatgctgcaactatcaaggatgtttttggcaggaatgccctccaccttgtttcctcctgtggaaagaaaggagtgttagattggcttattcagaaaggagtggatctgttggtgaaagacaaagagtctggatggacagcattgcacagaagcattttttatggacatattgattgtgtttggtctctattgaagcatggtgttagtctgtatattcaagataaagaaggcttgtcagctttggatcttgtaatgaaggatagaccaactcatgtagtattcaagaatactgatcctacagatgtttatacttggggcgataatacaaattttaccctgggtcatggaagccagaatagcaaacatcatccagagttggtggatctgttctccaggagtgggatttatatcaagcaggtggtgctttgtaaatttcactccgtgtttctgtctcagaaagggcaggtttatacctgtggtcatggtcctggagggcgattaggacatggagatgaacagacatgcttggtccctcggcttgtggaaggactgaatggtcataattgttcccaagtggcagctgctaaggatcatactgttgtattaactgaagatggatgtgtttatacatttggtctaaacatttttcatcaattaggaattattccaccgccttccagttgtaatgtacccagacagatacaggcaaaatatctgaaaggaaggacaatcattggcgttgcagcaggcaggtttcatacagtcctatggactagagaagctgtttacactatgggactaaatggtggacaactgggttgtttgctagatcccaatggagaaaagtgtgtaactgctcctcgtcaggtctctgcccttcaccataaagacattgctctgtctttggttgctgcaagtgatggagctacagtctgtgttaccacaaggggagatatttacttacttgcagactatcagtgcaagaagatggcttctaaacagttgaacttgaaaaaagttcttgtgtctgggggtcatatggaatacaaggttgatcctgaacatttgaaagaaaatgggggtcaaaaaatttgcattcttgcaatggatggagctggaagggtgttttgctggagatcagtcaacagttctctgaagcagtgtcgatgggcctatccacgtcaggtcttcatttctgatattgctttaaatagaaatgaaattctatttgttacgcaagatggagaaggatttagagggagatggtttgaagagaaaagaaagagttctgaaaagaaagagattttatcaaaccttcacaattcctcatcagatgtgtcttatgtctctgatataaatagtgtgtatgaaagaattcgacttgagaaacttacctttgcacatagagctgttagtgtcagcacagatccaagtggatgcaactttgcaatcctgcagtcagatcctaaaacaagcctttatgaaattccagctgtgtcctcatcatccttttttgaagagtttggcaaactgttgagggaagcagatgaaatggacagcattcatgatgtgacatttcaagttggcaatagactcttccctgcacataaatatattttggcagtgcattctgatttttttcagaaattgtttctttcagatggtaatacttcagaatttacagatatttaccagaaagatgaagattctgcagggtgccatctctttgtggtagagaaggttcatcctgacatgtttgaataccttttacaatttatatacacagatacttgtgactttttaactcatggcttcaaaccaagaatacacttaaacaaaaacccagaagaatatcagggaactctgaattctcatttgaataaagtgaatttccatgaagatgataaccagaagtctgcatttgaagtttacaaaagtaatcaagctcaaacagttagtgagaggcagaagagcaaacctaaatcttgtaaaaaaggaaaaaatattagggaagatgatcctgtaagaatgttgcaaactgttgcaaagaaattcgacttcagtaatttgagtagtaggttagatggagtcagatttgaaaatgaaaaaattaatgttattgccaagaacactggtaataaactgaagctaagtcagaaaaaatgttcatttctgtgtgacgtgaccatgaaatcagtggatggaaaggaatttccttgtcataaatgtgttctttgtgctagacttgaatattttcatagtatgctgagtagctcatggattgaggcttccagttgtgcagctctggaaatgccaatacattctgatatattaaaagttattttggactacctctatactgatgaagctgtggtgataaaagaatctcaaaatgtagattttatttgtagtgttcttgtggtggctgatcaacttctcataacccggttgaaagagatttgtgaagtagcattaactgaaaaacttaccctgaagaatgctgctatgctactggaatttgcagcaatgtatagtgcaaaacagttgaaactgtcttgtttacagtttataggattgaatatggcagctttacttgaagcaaggtctcttgatgttttaagcgatggtgttttgaaggatctttctgagttttaccggaaaatgattccagcaatggatagaagagtcattacaccatatcaagatggaccagatattagctatttggaagtagaagatggagatatcttcttgaaagaagaaataaatatggaacaaaatcattcggaaactatgttcaagaaagcaaaaacaaaagctaaaaagaagccacgtaaacgttcagatagttctggaggttataacctttcagatattattcagagtccatcatctacaggattattaaagtctggtaagaccaattctgtggaatctcttccagaactgttgacatcagactctgaaggaagctatgcaggagtgggtagtcctagagatttacagtcccctgatttcacaacaggatttcattcagataagattgaggcgaaagtcaaaccgtatgttaatggtacatctcctgtgtattctagggaagatttaaaaccatgggaaaagtcaccaatacttaaaatatctgctccacagcctattcccagtaacagaattgatactaccagctctgccagttgggttgctggttctttcagtcctgtcagccctcctgttgtggatctcagaactatcatggaaatagaagaaagtagacaaaaatgtggagctacaccaaagtcacatttaggcaaaacagtttctcatggagttaaactttctcagaagcaacgaaaaatgattgcattgactaccaaggaaaacaattcaggaatgaatagcatggaaacagttttattcactccttcaaaagcccccaaaccagtgaatgcatgggcatcttctctgcattcagtttcatccaagtcattccgggatttcttactagaagaaaaaaagtctgttactagccatagttcaggcgatcatgtcaaaaaagtttcttttaaaggaattgaaaattctcaggcaccaaaaattgtcagatgctctacccatggtaccccaggaccagaaggcaaccatatttcagatttaccacttctagacagtcccaatccctggctatcttcttcagtgactgctccatccatggtagccccagtcacttttgcatctattgtagaagaagaactacaacaagaagcagctcttattagaagtcgagaaaaaccgttggctctgattcagattgaggagcatgccatacaagatttattggttttctatgaggcatttggcaaccctgaagagtttgtcattgttgaaaggacaccgcagggaccactggcagtacctatgtggaataagcatggatgctagttcactgtggagttgagatgcattttacataattatgagtttgttcatataaagaaaagctgtggaaaagagtcttagagattttgtaatatcattctaaatagattaagaaaagatataatttctttactgcagttaaatcatataatgtttgtatgattaaaaataaatttctcagaattgtgattttagtaactttatataaaatgtgtgagacaaaaacttattaaggttaaatagaattgtttcttctgaataatctaacaaaggaaaatataagtgattgaatcataagatataaggggggtaaagtattaaaaataacttttttgtttgataacttgagaatttagaagattttgccaagtatgtgttgttgcttgacttcttaaatatggcattgatgaatttaaagtaggagcatcagttattacttctgattcattaatggccagaattttgtgtttggtgtaatagttgtgtcaccattcttgttgctttttaaaaatcaggctaatcatgtggtccatgtctcttcaaagcttgacctgcacaaatgccatatttctatttggaccacatattctccattttgcattgagcagtagagtacagtggaaagggaataagaatactgattattctgaacagtttagtcccaagagaatagcgttttaaaaaagaaaaacaagatttggagtcattgtgggttatttttggtgggatggaggatcttaaaaatgcctaattgtgagagaatcaattgctgaaagtgttaaaatttctgaaaataaatgcttaattacatatacaggaattaaatagtttggaagagggttggattatcattacctttacaatactgtataatcagaagttctctgaacctcaattgtatatctagacataaaaattgttttctgtataggatgttgtttggtttgtttctgagtgtttaaattttgcaaaaacaaatgttaaatttgtgcttcagtacctagataaattggaaaggttaatgttctagtttctggaaggtaagcctgggagacacataagcaattcactgctataatttagttgatgtaaaatgacggaaactgactcaatatgtcaggtttaactctgcccaaaagcagcagacatgtaagcagatgtgcaataaaaaatgatcttgatccatttc

SEQ ID NO: 745 - protein, 1353 aa, Homo sapiens
MSSPMPDCTSKCRSLKHALDVLSVVTKGSENQIKAFLSSHCYNAATIKDVFGRNALHLVSSCGKKGVLDWLIQKGVDLLVKDKESGWTALHRSIFYGHIDCVWSLLKHGVSLYIQDKEGLSALDLVMKDRPTHVVFKNTDPTDVYTWGDNTNFTLGHGSQNSKHHPELVDLFSRSGIYIKQVVLCKFHSVFLSQKGQVYTCGHGPGGRLGHGDEQTCLVPRLVEGLNGHNCSQVAAAKDHTVVLTEDGCVYTFGLNIFHQLGIIPPPSSCNVPRQIQAKYLKGRTIIGVAAGRFHTVLWTREAVYTMGLNGGQLGCLLDPNGEKCVTAPRQVSALHHKDIALSLVAASDGATVCVTTRGDIYLLADYQCKKMASKQLNLKKVLVSGGHMEYKVDPEHLKENGGQKICILAMDGAGRVFCWRSVNSSLKQCRWAYPRQVFISDIALNRNEILFVTQDGEGFRGRWFEEKRKSSEKKEILSNLHNSSSDVSYVSDINSVYERIRLEKLTFAHRAVSVSTDPSGCNFAILQSDPKTSLYEIPAVSSSSFFEEFGKLLREADEMDSIHDVTFQVGNRLFPAHKYILAVHSDFFQKLFLSDGNTSEFTDIYQKDEDSAGCHLFVVEKVHPDMFEYLLQFIYTDTCDFLTHGFKPRIHLNKNPEEYQGTLNSHLNKVNFHEDDNQKSAFEVYKSNQAQTVSERQKSKPKSCKKGKNIREDDPVRMLQTVAKKFDFSNLSSRLDGVRFENEKINVIAKNTGNKLKLSQKKCSFLCDVTMKSVDGKEFPCHKCVLCARLEYFHSMLSSSWIEASSCAALEMPIHSDILKVILDYLYTDEAVVIKESQNVDFICSVLVVADQLLITRLKEICEVALTEKLTLKNAAMLLEFAAMYSAKQLKLSCLQFIGLNMAALLEARSLDVLSDGVLKDLSEFYRKMIPAMDRRVITPYQDGPDISYLEVEDGDIFLKEEINMEQNHSETMFKKAKTKAKKKPRKRSDSSGGYNLSDIIQSPSSTGLLKSGKTNSVESLPELLTSDSEGSYAGVGSPRDLQSPDFTTGFHSDKIEAKVKPYVNGTSPVYSREDLKPWEKSPILKISAPQPIPSNRIDTTSSASWVAGSFSPVSPPVVDLRTIMEIEESRQKCGATPKSHLGKTVSHGVKLSQKQRKMIALTTKENNSGMNSMETVLFTPSKAPKPVNAWASSLHSVSSKSFRDFLLEEKKSVTSHSSGDHVKKVSFKGIENSQAPKIVRCSTHGTPGPEGNHISDLPLLDSPNPWLSSSVTAPSMVAPVTFASIVEEELQQEAALIRSREKPLALIQIEEHAIQDLLVFYEAFGNPEEFVIVERTPQGPLAVPMWNKHGC

SEQ ID NO: 746 - DNA, 4552 bp, Homo sapiens
cggatgctctccgactaacatggatgtcccaccattccttgcagtggaaggttgttccttggcgcagtgagtgaagaacatgcagcgattgctaatgggtttgggaagcggagactccttcctctctctatgaccatgccgtgatcgtgtctgcggtcaccactcgacgcatcctcatttctacccgaacccaggagccgaacgctagatcggggaagtgggtgccgtgcgtgtgggcacagaaacaccatgaagattattttcccgattctaagtaatccagtcttcaggcgcaccgttaaactcctgctctgtttactgtggattggatattctcaaggaaccacacatgtattaagatttggtggtatttttgaatatgtggaatctggcccaatgggagctgaggaacttgcattcagatttgctgtgaacacaattaacagaaacagaacattgctacccaatactacccttacctatgatacccagaagataaacctttatgatagttttgaagcatccaagaaagcctgtgatcagctgtctcttggggtggctgccatcttcgggccttcacacagctcatcagcaaacgcagtgcagtccatctgcaatgctctgggagttccccacatacagacccgctggaagcaccaggtgtcagacaacaaagattccttctatgtcagtctctacccagacttctcttcactcagccgtgccattttagacctggtgcagtttttcaagtggaaaaccgtcacggttgtgtatgatgacagcactggtctcattcgtttgcaagagctcatcaaagctccatcaaggtataatcttcgactcaaaattcgtcagttacctgctgatacaaaggatgcaaaacccttactaaaagaaatgaaaagaggcaaggagtttcatgtaatctttgattgtagccatgaaatggcagcaggcattttaaaacaggcattagctatgggaatgatgacagaatactatcattatatctttaccactctggacctctttgctcttgatgttgagccctaccgatacagtggtgttaacatgacagggttcagaatattaaatacagaaaatacccaagtctcctccatcattgaaaagtggtcgatggaacgattgcaggcacctccgaaacccgattcaggtttgctggatggatttatgacgactgatgctgctctaatgtatgatgctgtgcatgtggtgtctgtggccgttcaacagtttccccagatgacagtcagttccttgcagtgtaatcgacataaaccctggcgcttcgggacccgctttatgagtctaattaaagaggcacattgggaaggcctcacaggcagaataactttcaacaaaaccaatggcttgagaacagattttgatttggatgtgatcagtctgaaggaagaaggtctagaaaagattggaacgtgggatccagccagtggcctgaatatgacagaaagtcaaaagggaaagccagcgaacatcacagattccttatccaatcgttctttgattgttaccaccattttggaagagccttatgtcctttttaagaagtctgacaaacctctctatggtaatgatcgatttgaaggctattgcattgatctcctcagagagttatctacaatccttggctttacatatgaaattagacttgtggaagatgggaaatatggagcccaggatgatgccaatggacaatggaatggaatggttcgtgaactaattgatcataaagctgaccttgcagttgctccactggctattacctatgttcgagagaaggtcatcgacttttccaagccctttatgacacttggaataagtattttgtaccgcaagcccaatggtacaaacccaggcgtcttctccttcctgaatcctctctcccctgatatctggatgtatattctgctggcttacttgggtgtcagttgtgtgctctttgtcatagccaggtttagtccttatgagtggtataatccacacccttgcaaccctgactcagacgtggtggaaaacaattttaccttgctaaatagtttctggtttggagttggagctctcatgcagcaaggttctgagctcatgcccaaagcactgtccaccaggatagtgggaggcatttggtggtttttcacacttatcatcatttcttcgtatactgctaacttagccgcctttctgacagtggaacgcatggaatcccctattgactctgctgatgatttagctaaacaaaccaagatagaatatggagcagtagaggatggtgcaaccatgacttttttcaagaaatcaaaaatctccacgtatgacaaaatgtgggcctttatgagtagcagaaggcagtcagtgctggtcaaaagtaatgaagaaggaatccagcgagtcctcacctctgattatgctttcctaatggagtcaacaaccatcgagtttgttacccagcggaactgtaacctgacacagattggcggccttatagactctaaaggttatggcgttggcactcccatgggttctccatatcgagacaaaattaccatagcaattcttcagctgcaagaggaaggcaaactgcatatgatgaaggagaaatggtggaggggcaatggttgcccagaagaggagagcaaagaggccagtgccctgggggttcagaatattggtggcatcttcattgttctggcagccggcttggtgctttcagtttttgtggcagtgggagaatttttatacaaatccaaaaaaaacgctcaattggaaaagaggtccttctgtagtgccatggtagaagaattgaggatgtccctgaagtgccagcgtcggttaaaacataagccacaggccccagttattgtgaaaacagaagaagttatcaacatgcacacatttaacgacagaaggttgccaggtaaagaaaccatggcataaagctgggaggccaaacacccaagcacaaactgtcgtctttttccaaacaatttagccagaatgtttcctgtggaaatatgcaacctgtgcaaaataaaatgagttacctcatgccgctgtgtctatgaactagagactctgtgatctaagcagttgcaatgatcagacttgatttacaagcatcatggatcaaccaagttacacggggttacactgttaatcatgggttcctcccttcttctgagtgaatgttaacatgcgcattttgtggctgatttcaaatgcagtccagtgagaaattacaggttccttttgaagctcaactgttgccaggagatggaatatcaatgcccaacagggcaaccaataaaagtgtcactaagaatataaatatttggaatcagcaaaaactgtagtgttacaggaaacagtacagtcttctgaacacccagatcatagaggtgatgatgttactagcccccaactactcagtataattattgtctgaatgcaaagtatgtgtttataggatgtgaaaaaatgtaatgcaaaacaaatttgaatcccatggcagttggaatataaagcagatgttcatcacttattttccttttttcttttcttatttttttttttgacagtctgtgtcactgattgagatagaaatgccaattatcaaggaaataatgttttcttaagttccctaaggcagaagatttaacatgcaattctaccagatcccttcctattcccccaacaccttttctctaacccccatatcccaaataataataataataataataataataataataataataataaaagcagttggttcagtgattctgaattaaaaggataatgttttgcaatgttcaagttgtaaaaactggccgagtattggctgtgtggaagactaaagctttcattctaacattcagacatagcaatccaaacccttgttcctgctgtaaatgaacttgatggagcatgggcagatttcagtgatacgagaaaggggactggtcatctatagaaaaatctgtgagagaacttggaagtggactgcgtttatcaatacagtcacaatgttaaatgaacaaaattcttgaacagttttttttcaaaaaatgttcaggtttatttgtggaaatgcaagatttctatgaaaatagtttttgtatggaaatttttgtaatactttttatcaacaaaacaagaacatgtgttcctgtcaggggtgtgatgtcaagcatgaatggtagtgcgtgtgcaccaccaacgtttggtgaaaactatttttatcaagaaaaaaggaatcatagaagagaaatattttcaagttagataatataaaagctaggtgcactaccaccactgcttaccatgccacacccctggtttccacgaggctgacaacatactgtaatgaacaattgtgtgtaaaatggtaaaagacacagacctcttgacaacattgtgataacagttgagtgcacacagtttgctgtttgaatccaatgcacaaaattaaaaaaaatcattaaaactatgttcattttactttcaaaaa

SEQ ID NO: 747 - protein, 908 aa, Homo sapiens
MKIIFPILSNPVFRRTVKLLLCLLWIGYSQGTTHVLRFGGIFEYVESGPMGAEELAFRFAVNTINRNRTLLPNTTLTYDTQKINLYDSFEASKKACDQLSLGVAAIFGPSHSSSANAVQSICNALGVPHIQTRWKHQVSDNKDSFYVSLYPDFSSLSRAILDLVQFFKWKTVTVVYDDSTGLIRLQELIKAPSRYNLRLKIRQLPADTKDAKPLLKEMKRGKEFHVIFDCSHEMAAGILKQALAMGMMTEYYHYIFTTLDLFALDVEPYRYSGVNMTGFRILNTENTQVSSIIEKWSMERLQAPPKPDSGLLDGFMTTDAALMYDAVHVVSVAVQQFPQMTVSSLQCNRHKPWRFGTRFMSLIKEAHWEGLTGRITFNKTNGLRTDFDLDVISLKEEGLEKIGTWDPASGLNMTESQKGKPANITDSLSNRSLIVTTILEEPYVLFKKSDKPLYGNDRFEGYCIDLLRELSTILGFTYEIRLVEDGKYGAQDDANGQWNGMVRELIDHKADLAVAPLAITYVREKVIDFSKPFMTLGISILYRKPNGTNPGVFSFLNPLSPDIWMYILLAYLGVSCVLFVIARFSPYEWYNPHPCNPDSDVVENNFTLLNSFWFGVGALMQQGSELMPKALSTRIVGGIWWFFTLIIISSYTANLAAFLTVERMESPIDSADDLAKQTKIEYGAVEDGATMTFFKKSKISTYDKMWAFMSSRRQSVLVKSNEEGIQRVLTSDYAFLMESTTIEFVTQRNCNLTQIGGLIDSKGYGVGTPMGSPYRDKITIAILQLQEEGKLHMMKEKWWRGNGCPEEESKEASALGVQNIGGIFIVLAAGLVLSVFVAVGEFLYKSKKNAQLEKRSFCSAMVEELRMSLKCQRRLKHKPQAPVIVKTEEVINMHTFNDRRLPGKETMA

SEQ ID NO: 748 - DNA, 4639 bp, Homo sapiens
cggatgctctccgactaacatggatgtcccaccattccttgcagtggaaggttgttccttggcgcagtgagtgaagaacatgcagcgattgctaatgggtttgggaagcggagactccttcctctctctatgaccatgccgtgatcgtgtctgcggtcaccactcgacgcatcctcatttctacccgaacccaggagccgaacgctagatcggggaagtgggtgccgtgcgtgtgggcacagaaacaccatgaagattattttcccgattctaagtaatccagtcttcaggcgcaccgttaaactcctgctctgtttactgtggattggatattctcaaggaaccacacatgtattaagatttggtggtatttttgaatatgtggaatctggcccaatgggagctgaggaacttgcattcagatttgctgtgaacacaattaacagaaacagaacattgctacccaatactacccttacctatgatacccagaagataaacctttatgatagttttgaagcatccaagaaagcctgtgatcagctgtctcttggggtggctgccatcttcgggccttcacacagctcatcagcaaacgcagtgcagtccatctgcaatgctctgggagttccccacatacagacccgctggaagcaccaggtgtcagacaacaaagattccttctatgtcagtctctacccagacttctcttcactcagccgtgccattttagacctggtgcagtttttcaagtggaaaaccgtcacggttgtgtatgatgacagcactggtctcattcgtttgcaagagctcatcaaagctccatcaaggtataatcttcgactcaaaattcgtcagttacctgctgatacaaaggatgcaaaacccttactaaaagaaatgaaaagaggcaaggagtttcatgtaatctttgattgtagccatgaaatggcagcaggcattttaaaacaggcattagctatgggaatgatgacagaatactatcattatatctttaccactctggacctctttgctcttgatgttgagccctaccgatacagtggtgttaacatgacagggttcagaatattaaatacagaaaatacccaagtctcctccatcattgaaaagtggtcgatggaacgattgcaggcacctccgaaacccgattcaggtttgctggatggatttatgacgactgatgctgctctaatgtatgatgctgtgcatgtggtgtctgtggccgttcaacagtttccccagatgacagtcagttccttgcagtgtaatcgacataaaccctggcgcttcgggacccgctttatgagtctaattaaagaggcacattgggaaggcctcacaggcagaataactttcaacaaaaccaatggcttgagaacagattttgatttggatgtgatcagtctgaaggaagaaggtctagaaaagattggaacgtgggatccagccagtggcctgaatatgacagaaagtcaaaagggaaagccagcgaacatcacagattccttatccaatcgttctttgattgttaccaccattttggaagagccttatgtcctttttaagaagtctgacaaacctctctatggtaatgatcgatttgaaggctattgcattgatctcctcagagagttatctacaatccttggctttacatatgaaattagacttgtggaagatgggaaatatggagcccaggatgatgccaatggacaatggaatggaatggttcgtgaactaattgatcataaagctgaccttgcagttgctccactggctattacctatgttcgagagaaggtcatcgacttttccaagccctttatgacacttggaataagtattttgtaccgcaagcccaatggtacaaacccaggcgtcttctccttcctgaatcctctctcccctgatatctggatgtatattctgctggcttacttgggtgtcagttgtgtgctctttgtcatagccaggtttagtccttatgagtggtataatccacacccttgcaaccctgactcagacgtggtggaaaacaattttaccttgctaaatagtttctggtttggagttggagctctcatgcagcaaggttctgagctcatgcccaaagcactgtccaccaggatagtgggaggcatttggtggtttttcacacttatcatcatttcttcgtatactgctaacttagccgcctttctgacagtggaacgcatggaatcccctattgactctgctgatgatttagctaaacaaaccaagatagaatatggagcagtagaggatggtgcaaccatgacttttttcaagaaatcaaaaatctccacgtatgacaaaatgtgggcctttatgagtagcagaaggcagtcagtgctggtcaaaagtaatgaagaaggaatccagcgagtcctcacctctgattatgctttcctaatggagtcaacaaccatcgagtttgttacccagcggaactgtaacctgacacagattggcggccttatagactctaaaggttatggcgttggcactcccatgggttctccatatcgagacaaaattaccatagcaattcttcagctgcaagaggaaggcaaactgcatatgatgaaggagaaatggtggaggggcaatggttgcccagaagaggagagcaaagaggccagtgccctgggggttcagaatattggtggcatcttcattgttctggcagccggcttggtgctttcagtttttgtggcagtgggagaatttttatacaaatccaaaaaaaacgctcaattggaaaaggaatcttctatttggttagtgccaccataccatccagacactgtttagtaatcttttgaaacttactaaaagaggtttttaataatgaggtccttctgtagtgccatggtagaagaattgaggatgtccctgaagtgccagcgtcggttaaaacataagccacaggccccagttattgtgaaaacagaagaagttatcaacatgcacacatttaacgacagaaggttgccaggtaaagaaaccatggcataaagctgggaggccaaacacccaagcacaaactgtcgtctttttccaaacaatttagccagaatgtttcctgtggaaatatgcaacctgtgcaaaataaaatgagttacctcatgccgctgtgtctatgaactagagactctgtgatctaagcagttgcaatgatcagacttgatttacaagcatcatggatcaaccaagttacacggggttacactgttaatcatgggttcctcccttcttctgagtgaatgttaacatgcgcattttgtggctgatttcaaatgcagtccagtgagaaattacaggttccttttgaagctcaactgttgccaggagatggaatatcaatgcccaacagggcaaccaataaaagtgtcactaagaatataaatatttggaatcagcaaaaactgtagtgttacaggaaacagtacagtcttctgaacacccagatcatagaggtgatgatgttactagcccccaactactcagtataattattgtctgaatgcaaagtatgtgtttataggatgtgaaaaaatgtaatgcaaaacaaatttgaatcccatggcagttggaatataaagcagatgttcatcacttattttccttttttcttttcttatttttttttttgacagtctgtgtcactgattgagatagaaatgccaattatcaaggaaataatgttttcttaagttccctaaggcagaagatttaacatgcaattctaccagatcccttcctattcccccaacaccttttctctaacccccatatcccaaataataataataataataataataataataataataataataaaagcagttggttcagtgattctgaattaaaaggataatgttttgcaatgttcaagttgtaaaaactggccgagtattggctgtgtggaagactaaagctttcattctaacattcagacatagcaatccaaacccttgttcctgctgtaaatgaacttgatggagcatgggcagatttcagtgatacgagaaaggggactggtcatctatagaaaaatctgtgagagaacttggaagtggactgcgtttatcaatacagtcacaatgttaaatgaacaaaattcttgaacagttttttttcaaaaaatgttcaggtttatttgtggaaatgcaagatttctatgaaaatagtttttgtatggaaatttttgtaatactttttatcaacaaaacaagaacatgtgttcctgtcaggggtgtgatgtcaagcatgaatggtagtgcgtgtgcaccaccaacgtttggtgaaaactatttttatcaagaaaaaaggaatcatagaagagaaatattttcaagttagataatataaaagctaggtgcactaccaccactgcttaccatgccacacccctggtttccacgaggctgacaacatactgtaatgaacaattgtgtgtaaaatggtaaaagacacagacctcttgacaacattgtgataacagttgagtgcacacagtttgctgtttgaatccaatgcacaaaattaaaaaaaatcattaaaactatgttcattttactttcaaaaa

SEQ ID NO: 749 - protein, 869 aa, Homo sapiens
MKIIFPILSNPVFRRTVKLLLCLLWIGYSQGTTHVLRFGGIFEYVESGPMGAEELAFRFAVNTINRNRTLLPNTTLTYDTQKINLYDSFEASKKACDQLSLGVAAIFGPSHSSSANAVQSICNALGVPHIQTRWKHQVSDNKDSFYVSLYPDFSSLSRAILDLVQFFKWKTVTVVYDDSTGLIRLQELIKAPSRYNLRLKIRQLPADTKDAKPLLKEMKRGKEFHVIFDCSHEMAAGILKQALAMGMMTEYYHYIFTTLDLFALDVEPYRYSGVNMTGFRILNTENTQVSSIIEKWSMERLQAPPKPDSGLLDGFMTTDAALMYDAVHVVSVAVQQFPQMTVSSLQCNRHKPWRFGTRFMSLIKEAHWEGLTGRITFNKTNGLRTDFDLDVISLKEEGLEKIGTWDPASGLNMTESQKGKPANITDSLSNRSLIVTTILEEPYVLFKKSDKPLYGNDRFEGYCIDLLRELSTILGFTYEIRLVEDGKYGAQDDANGQWNGMVRELIDHKADLAVAPLAITYVREKVIDFSKPFMTLGISILYRKPNGTNPGVFSFLNPLSPDIWMYILLAYLGVSCVLFVIARFSPYEWYNPHPCNPDSDVVENNFTLLNSFWFGVGALMQQGSELMPKALSTRIVGGIWWFFTLIIISSYTANLAAFLTVERMESPIDSADDLAKQTKIEYGAVEDGATMTFFKKSKISTYDKMWAFMSSRRQSVLVKSNEEGIQRVLTSDYAFLMESTTIEFVTQRNCNLTQIGGLIDSKGYGVGTPMGSPYRDKITIAILQLQEEGKLHMMKEKWWRGNGCPEEESKEASALGVQNIGGIFIVLAAGLVLSVFVAVGEFLYKSKKNAQLEKESSIWLVPPYHPDTV

SEQ ID NO: 750 - DNA, 3850 bp, Homo sapiens
cggcggcggcagcggcagaggtggcggcggcgtgtccgtgagagtggcgtgggggcggggaggagaggcggcggcggcagtgtccaagctacgccactcgggccggggcgttgggagcgggagtgcagagcgtggtcgtggcggcggcggtgagaagagcgaggcggaggagggggtgccatggccgggcagcagttccagtacgatgacagtgggaacaccttcttctacttcctcacctccttcgtggggctcatcgtgatcccggcgacatactacctctggccccgagatcagaatgccgagcaaattcgattaaagaatatcagaaaagtatatggaaggtgtatgtggtatcgtttacggttattaaaaccccagccaaatattattcctacagtaaagaaaatagttctgcttgcaggatgggcattgttcttattccttgcatataaagtttccaaaacagaccgagaataccaagaatacaatccttatgaagtattaaatttggatcctggagccacagtagcagaaattaaaaaacaatatcgtttgctgtcacttaaatatcatccagataaaggaggtgatgaggttatgttcatgaggatagcaaaagcttatgctgctttaacggatgaagagtcccggaaaaattgggaagaatttggaaatccagatgggcctcaagccacaagctttggaattgccctgccagcttggatagttgaccagaaaaactcaattctggttttacttgtatatggattggcatttatggttatccttccagttgttgtgggctcttggtggtatcgctcaatacgctatagtggagaccagattctaatacgcacaacacagatttatacatactttgtttataaaacccgaaatatggatatgaaacgtcttatcatggttttggctggagcttctgaatttgatcctcagtataataaagatgccacaagcagaccaacggataatattctaataccacagctaatcagagaaattggcagcattaatttaaagaagaatgagcctccacttacctgcccatatagcctgaaggccagagttcttttactgtctcatcttgctagaatgaaaattcctgagacccttgaagaagatcagcaattcatgctaaaaaagtgtcctgccctacttcaagaaatggttaatgtaatctgccaactaatagtaatggcccggaaccgtgaagaaagggagtttcgtgctccaactttggcatccctagaaaactgcatgaagctttctcagatggccgttcagggacttcagcaatttaagtctccccttctgcagctccctcatattgaagaggacaatcttagacgggtttctaatcataagaagtataaaattaaaactatccaggatttggtgagtttaaaagaatcagatcgtcacactctactgcacttccttgaagatgaaaaatatgaagaggttatggctgtccttgggagttttccatatgtgaccatggatataaaatcacaggtgttagatgatgaagatagcaacaacatcacagtaggatccttagttacagtgttggttaagttgacaaggcaaacaatggctgaagtatttgaaaaggagcagtccatctgtgctgcagaggaacagccagcagaagatgggcagggtgaaactaacaagaacaggacaaaaggaggatggcaacagaagagtaaaggacccaagaaaactgctaaatcaaaaaaaaagaaacctttaaaaaaaaaacctacacctgtgctattaccacagtcaaagcaacagaaacaaaagcaggcaaatggagtcgttgggaatgaagctgcagtaaaggaagatgaagaagaagtttcagataagggcagtgattctgaagaagaagaaaccaatagagattcccaaagtgagaaagatgatggtagtgacagagactctgatagagagcaagatgaaaaacaaaacaaagatgatgaagcagagtggcaagaattacaacaaagcatacagcgaaaagagagagctctattggaaaccaaatcaaaaataacacatcctgtgtatagcctttactttcctgaggaaaaacaagaatggtggtggctttacattgcagataggaaggagcagacattaatatccatgccatatcatgtgtgtacgctgaaagatacagaggaggtagagctgaagtttcctgcaccaggcaagcctggaaattatcagtatactgtgtttctgagatcagactcctatatgggtttggatcagattaaaccattgaagttggaagttcatgaggctaagcctgtgccagaaaatcacccacagtgggatacagcaatagagggggatgaagaccaggaggacagtgagggctttgaagatagctttgaggaagaagaggaggaagaagaagatgatgactaagcagtactctgaatggaccacagtgtttgcacatatttgcaattttttgctgttttggaagtgtatcataaaccagaaacagtacagaactgatgttgagggaggtgtagtttttttactcttgaaatgggtgcataatataactaggcagtggcggtgccttggtacaacctgaaaaatgttaaggcttattgaaacctttcaagtaggggatggtacatttatttcatctgcaaatgataataaatcctttgttattataactgtccagaagtgtgggctatgtattatctgatcagtctatggtcccagtaaaagtaaagatgcaggaaacacagtctgtaaatgagcgacttttctttgttcagctttagttttagcaaacaccacaaatatgttttaagtaacatcgctcaagtttaagtaacatcgctcaagttgataatctcttgataagctctgttgttgacattttgcagtgatacaacagctccactcatagatttaaacttttatttttacttatcttggtcataagttggcattctctcacattccacatgatatagagggctacgttttggaattttccttttcttaattgcccagagttatcagacagattataaaaatggcttttaatggcttaaaccatttctaaacctctatcttagcagatcaatgcaggatctaattcttttgataagttctagctctaaaagtgatagtgggactgtatgttttctgatactggtggcttatgttattaaaccttttttaaaaaaggttcactctaaaagctgaactacatccttagttttcagtctacttgactctatcaggagctttttaaggaaagtaagtataacatgcaaaggaagctttttttgtattcattttggactcctgtcaataaaaatagaagtttgttgactcgttttatgtttcaatggtgtgtgtctttttactatcaggacataaatagggcaatccacttctttatttttcaactaaagattgaatagtattgtacattactgctaaagtgactgctatttctgtatactgtagaaaaacccaggagtgagagggatttcccctcatagtacaactggaaggatagtgcttgtaaagagtagagatgtgtacatgatgaatcattgagggagggtggatatttttattcctagatatggaggaaacataagtctgtagtattataaaactgattgtaataattctttcctatcaaaatctccataggtcaaaatattgttggaatactaaaatttgcaaccttgtttactttaaaaggttgccactttcagtgcagaatactaccggcatcttgttactgcaatagttggaaataaaatgtgaaaattaa

SEQ ID NO: 751 - protein, 760 aa, Homo sapiens
MAGQQFQYDDSGNTFFYFLTSFVGLIVIPATYYLWPRDQNAEQIRLKNIRKVYGRCMWYRLRLLKPQPNIIPTVKKIVLLAGWALFLFLAYKVSKTDREYQEYNPYEVLNLDPGATVAEIKKQYRLLSLKYHPDKGGDEVMFMRIAKAYAALTDEESRKNWEEFGNPDGPQATSFGIALPAWIVDQKNSILVLLVYGLAFMVILPVVVGSWWYRSIRYSGDQILIRTTQIYTYFVYKTRNMDMKRLIMVLAGASEFDPQYNKDATSRPTDNILIPQLIREIGSINLKKNEPPLTCPYSLKARVLLLSHLARMKIPETLEEDQQFMLKKCPALLQEMVNVICQLIVMARNREEREFRAPTLASLENCMKLSQMAVQGLQQFKSPLLQLPHIEEDNLRRVSNHKKYKIKTIQDLVSLKESDRHTLLHFLEDEKYEEVMAVLGSFPYVTMDIKSQVLDDEDSNNITVGSLVTVLVKLTRQTMAEVFEKEQSICAAEEQPAEDGQGETNKNRTKGGWQQKSKGPKKTAKSKKKKPLKKKPTPVLLPQSKQQKQKQANGVVGNEAAVKEDEEEVSDKGSDSEEEETNRDSQSEKDDGSDRDSDREQDEKQNKDDEAEWQELQQSIQRKERALLETKSKITHPVYSLYFPEEKQEWWWLYIADRKEQTLISMPYHVCTLKDTEEVELKFPAPGKPGNYQYTVFLRSDSYMGLDQIKPLKLEVHEAKPVPENHPQWDTAIEGDEDQEDSEGFEDSFEEEEEEEEDDD

SEQ ID NO: 752 - DNA, 716 bp, Homo sapiens
atggcaccaaaaacaaaggaggaagcccttgcccaccccaaagccaaagtcaaagcaaaggctttgaaagaacaagaaggcagtgctgaaaggcatccacaaccacacaaaataagacttgccacccaccttccagtggcctaagacaacgcagctccaaaggcagttcaaatgtcctaggaagaacacccccacaaaaaacaagctttatcattatgccattatcaagttccccttgaccactaagtcagccatgaagaagacacaaccacatttgtgtttactatggatgtcaaggccaaccagatcaaacaggctgtgaagaagctctatgacactggcatggccaaggtaaacatactcatcaggtctgatggagagaagaaggtgtatgttcaactggctcgtaacttaacgatgttttgaatgctgccaacacaattgagatgatctaaaatgagtccagctggctaattataatttttttttaccatattaaaaaaaaatctacaaaactgcagttcttaaatgaggtaacaggtaagtaaaaggacttggcatatagaaggttccaaaaccaccaggtaagaagtccaactaccttgttaccaccatgcttagatgaagtcatccacatgggaggactacccagcaagaagtaccgaaaccaagtatcaggaagagggagagatccatgtaggggagagtatggtagc

SEQ ID NO: 753 - DNA, 510 bp, Homo sapiens
atgcgttggcgggacccgcgcaggcccagtggccgagcggcgtcgtggggttaccccgcccgcgccagcgctgcatccctggccgctacccggggagagccggaggatgaattgaacctcgcagccgctgctatctccagtgctcatcacaggtgctttgggtcaggtcggaagcctccttccctgagccctcgccaagctcattccccggcccgcctctcccgccctgcagcggcctggccctgcggtctggctgccggggcggcggcgggaggtagtttgtgtacggttaccatggagacgctggctgcggggcgaagtgggagggtggccgggcggggtgaggatgctgctgcgccctgccctggccgggaccgtggaggagcgggcactgccgtgggtgggggagccgctgtccgagcgggaggtgaggtgtccccagcggctccccagggacccttcctgccgtcgtccgcctgtgtgtcctcggatggggtagagagacgatga

SEQ ID NO: 754 - protein, 169 aa, Homo sapiens [sequence omitted]

SEQ ID NO: 755 - DNA, 3413 bp, Homo sapiens
aggcccagtggccgagcggcgtcgtggggttaccccgcccgcgccagcgctgcatccctggccgctacccggggagagccggaggatgaattgaacctcgcagccgctgctatctccagtgctcatcacagggtgtggtgtctatctgaagaatattttactttcaaaggaaagatgctgtctccaaatgataaaatgttaggaaaactggatccattttatcaaccttcagtgtccaagcagaagaccagtgcagaaatcataagtgaagcaagaaatgcattaagaacagttagaacccaaagaccatttacaccacaggaggctcaaagaaaactattcggacctgcatcctcaagaacatcagaaaatagacctccttcctccttcagcctccatgcatccagttttgagtcatctgattccaggcctatctctggcacacgtcttagtccactagagctgaaaccgaaagttccagcatctcccaccagagaggaggattcctgcttttcctttcctaagcccccagtggaccctgcgaagattagaagagtaagcaacgccagggctcgcttattcagggctgcctcccagcgggcccttctgccggacagatcccttcctccctccgactcaaagaagacagtggaatccaaagaaacagttatgatgggggactctatggtgaaaataaatgggatttatttaacaaaatcaaatgctatttgccacttaaagagtcacccacttcagctaactgatgatggaggcttcagtgaaataaaggagcaagaaatgttcaaaggaacaacatctttaccatctcatctcaagaatggaggggaccaggggaagagacatgcgagggcctcatcatgccccagtagctcagacctgagcaggctgcaaaccaaagcagtcccaaaagctgacctgcaagaagaggacgcagaaatagaagtagacgaagtcttttggaatacaaggattgtaccgattttgcgtgaattagaaaaggaagaaaacattgaaacggtttgtgctgcttgcacacaacttcatcatgctttagaggaaggaaacatgcttggaaataaatttaagggaagaagtattctcctgaagaccctgtgtaaactagttgatgttggttcagactcgctcagccttaaacttgcaaaaataattctagcacttaaagtgagtagaaagaatcttcttaatgtctgcaaacttatatttaaaattagcaggaatgagaagaatgattctttgattcaaaatgacagcattctggaatcattattggaggtactaagaagtgaagacctgcaaactaacatggaagcttttttatactgtatggggtctataaagttcatttctggaaatctgggatttcttaatgaaatgatcagcaaaggtgctgtggaaatactgataaatttgataaaacaaataaatgagaacatcaagaaatgtggtacatttttgcctaattcgggccacttgctagtccaggtgactgctacattgagaaacttggttgattcatcattagtaagaagtaagttcctaaacatcagtgcccttccccagctctgcacggcaatggaacagtacaagggtgacaaggacgtctgtaccaatattgccagaatattcagcaaacttacttcttaccgtgactgctgcacagccttggccagctattccagatgttatgccttatttctgaatctaattaacaaataccagaagaagcaggatttagtcgtccgtgttgtttttattcttggcaacctgacggcaaaaaataaccaggctcgtgaacaattttccaaagagaaagggagcatccaaactctgctgtcattattccagacgttccatcagctggatctgcattcccagaagccggtgggccaacgaggcgagcagcacagggcgcagaggccgccgtcagaggcagaggacgtgctcatcaagctgactcgtgtgctggccaacattgccatccacccgggcgtgggcccggtgctggccgccaacccggggatagtgggcctgctcctgaccacgctggaatacaagtcacttgatgattgtgaggagctggtgatcaatgctacagcgacaatcaacaatttatcttactaccaagtgaagaattccataattcaagacaaaaagctatatattgctgaattgctcttaaagcttcttgtcagtaacaacatggatggaatcctggaggctgtgcgtgttttcggaaatctctcccaggaccatgatgtctgcgatttcattgtgcagaacaatgtccacaggttcatgatggcgctgctggatgctcagcatcaggatatctgcttttctgcctgtggtgttctcctcaatctcactgtggataaagacaagcgtgtcatcttgaaagaaggaggtggcattaaaaagttagtggactgtttaagagatttgggtcctactgattggcagctggcctgcttggtttgtaaaactttatggaacttcagtgaaaacatcactaatgcttcgtcatgttttggaaatgaagacaccaacacactcttactcttgctctcatcatttttagatgaagaactagcactggatggcagttttgatccagacctaaaaaactatcacaaactccattgggaaacagaattcaaacctgtggcacagcagcttctaaaccgaattcagagacatcacaccttcctggaacccctgcccattccctctttctaacatgatgcagattaacagtagaaacgagaactcacgtctccctcattcttaagaactggtaacaaacgtgaacatttttttcagcattaacaaatgtggaaagtttttcaagaactggttttagtgagtagctgaagtattttttaaaattaagcatttcttcttgttaggtattatggaaaaatgaatatacacattatatttcctgttgagagaaatgtaagatgaaaatatgtgcattttcaagtaaatgactttttcttctattctctattaaacaatttagttctagtcttaaaatcttgatttaacaattttggaattgaagtgttcataagttaaatgaactgtgcaatgaaggctgttagattatatagaaagaagggtaggcaacatgagtggaacacgttacaacataggatctgtactaattcttactatgtcaaataataaatgctctcattaggtaccagtatttttttggtctttatattaagagaaggagtaagcagaaaaacttaaagaaaactgctttgggccatctgttctttattaaataagtaaaatagataaaatgagagtatattttcatttgaaataaaatgactggactaagacagtccttctaattgtaa

SEQ ID NO: 756 - protein, 867 aa, Homo sapiens
MLSPNDKMLGKLDPFYQPSVSKQKTSAEIISEARNALRTVRTQRPFTPQEAQRKLFGPASSRTSENRPPSSFSLHASSFESSDSRPISGTRLSPLELKPKVPASPTREEDSCFSFPKPPVDPAKIRRVSNARARLFRAASQRALLPDRSLPPSDSKKTVESKETVMMGDSMVKINGIYLTKSNAICHLKSHPLQLTDDGGFSEIKEQEMFKGTTSLPSHLKNGGDQGKRHARASSCPSSSDLSRLQTKAVPKADLQEEDAEIEVDEVFWNTRIVPILRELEKEENIETVCAACTQLHHALEEGNMLGNKFKGRSILLKTLCKLVDVGSDSLSLKLAKIILALKVSRKNLLNVCKLIFKISRNEKNDSLIQNDSILESLLEVLRSEDLQTNMEAFLYCMGSIKFISGNLGFLNEMISKGAVEILINLIKQINENIKKCGTFLPNSGHLLVQVTATLRNLVDSSLVRSKFLNISALPQLCTAMEQYKGDKDVCTNIARIFSKLTSYRDCCTALASYSRCYALFLNLINKYQKKQDLVVRVVFILGNLTAKNNQAREQFSKEKGSIQTLLSLFQTFHQLDLHSQKPVGQRGEQHRAQRPPSEAEDVLIKLTRVLANIAIHPGVGPVLAANPGIVGLLLTTLEYKSLDDCEELVINATATINNLSYYQVKNSIIQDKKLYIAELLLKLLVSNNMDGILEAVRVFGNLSQDHDVCDFIVQNNVHRFMMALLDAQHQDICFSACGVLLNLTVDKDKRVILKEGGGIKKLVDCLRDLGPTDWQLACLVCKTLWNFSENITNASSCFGNEDTNTLLLLLSSFLDEELALDGSFDPDLKNYHKLHWETEFKPVAQQLLNRIQRHHTFLEPLPIPSF

SEQ ID NO: 757 - DNA, 2785 bp, Homo sapiens
gatccgccaccatggctgaaggagagaatgaagtgagatgggatggactctgcagcagagattcaactactagggagacagcattggaaaacattaggcaaaccattttgaggaaaaccgagtatcttcgttcggtgaaagaaacacctcatcgtccatcagacgggctttcaaataccgagtcttcggatgggttgaataagctacttgctcatctgcttatgctttctaagaggtgtcccttcaaagatgtgagagagaaaagtgagtttattctgaagagcatccaggaacttggcattagaattcctcgaccactaggacagggaccaagcagattcatcccagaaaaggagatcctccaagtggggagtgaagacgcacagatgcatgctttatttgcagattcttttgctgctttgggccgtttggataacattacgttagtgatggttttccacccacaatatttagaaagtttcttaaaaactcagcactatctactgcaaatggatgggccgttacccctacattatcgtcactacattggaataatggctgcggcaagacatcagtgctcctacttagtgaacctgcatgtaaatgatttccttcatgttggtggggaccccaagtggctcaatggtttagagaatgctcctcaaaaactacagaatttaggagaacttaacaaagtgttagcccatagaccttggcttattaccaaagaacacattgagggacttttaaaagctgaagagcacagctggtcccttgcggaattggtacatgcagtagttttactcacacactatcattctcttgcctcattcacattcggctgtggaatcagtccagaaattcattgtgatggtggccacacattcagacctccttctgttagcaactactgcatctgtgacattacaaatggcaatcacagtgtggatgagatgccggtcaactcagcagaaaatgtttctgtaagtgattctttctttgaggttgaagccctcatggaaaagatgaggcagttacaggaatgtcgagatgaagaagaggcaagtcaggaagagatggcttcacgttttgaaatagaaaaaagagagagtatgtttgtcttctcttcagatgatgaagaagttacaccagcaagagctgtatctcgtcattttgaggatactagttatggctataaagatttctctagacatgggatgcatgttccaacatttcgtgtccaggactattgctgggaagatcatggttattctttggtaaatcgcctttatccagatgtgggacagttgattgatgaaaaatttcacattgcttacaatcttacttataatacaatggcaatgcacaaagatgttgatacctcaatgcttagacgggcaatttggaactatattcactgcatgtttggaataagatatgatgattatgactatggtgaaattaaccagctattggatcgtagctttaaagtttatatcaaaactgttgtttgcactcctgaaaaggttaccaaaagaatgtatgatagcttctggaggcagttcaagcactctgagaaggttcatgttaatctgcttcttatagaagctaggatgcaagcagaactcctttatgctctgagagccattacccgctatatgacctgatgcctttccttcattaaagatgattctggaatgatcagcagatatagtctacaagggggaaggtactaagccccaggaccaatggtagacaaaataattcagaaatccattgtgccatgattcctttagtttctgctatttttctgtggaaaaccactgctggcacaagcagtgactgtttggcagcttcaagtttagagctgtgaagacaggctgccattcacagtattttgctttttgacagtacaagatgctgtgtaactgttttaatacagcaaatagtaactctccaaatcctgttgcttttatgttaaataagataacaagaattggagcatgcaaagaatgggacttggataatgacttaagctttatatgtaaagaattttagaagatcttggtgctgctattcctgctggaggaatgaatagatggctgtttcagttaagctattagtaataaaagtgaacattgctactatctgagcctacatacataacttgtgtgatttcaaattaaacttgcattatgtgttaattttcttgcatctaaaaaagcatagaattcctactcacacagctcagcaacaaccattttgatggtaacagttaatttctttcattagttttttaaattcagggttctggatattaaattaaaatggcattcttaaagattttcttcaaaaagcaatcctaaatgaaagtgtgtaaattataagaagctggcgatcttttgatatgctgtttcacaggatcctgacactggagggcagctgtcttgtgcattacttgtgttcccagcaccaaagttgtgggacatgttgctgtagactgctgcgcagtcctgggtgcattcagtctctctgcctctgcctgcctcctggtccccactttaaaggctgtgcagctccttaaataataaagctggaaaatatttttagtcgggttatcaaatttgatttacaaaaacgctaactttgtttgaaatgcaaacaggtttgaaaatatgtattaagtactttgtattctggaagcgtgaattgcttttgaagtctgtcagtattactggtatttttaaataaagaagaatttttctccaaaaaaaaaaaaaaaaaa

SEQ ID NO: 758 - protein, 551 aa, Homo sapiens
MAEGENEVRWDGLCSRDSTTRETALENIRQTILRKTEYLRSVKETPHRPSDGLSNTESSDGLNKLLAHLLMLSKRCPFKDVREKSEFILKSIQELGIRIPRPLGQGPSRFIPEKEILQVGSEDAQMHALFADSFAALGRLDNITLVMVFHPQYLESFLKTQHYLLQMDGPLPLHYRHYIGIMAAARHQCSYLVNLHVNDFLHVGGDPKWLNGLENAPQKLQNLGELNKVLAHRPWLITKEHIEGLLKAEEHSWSLAELVHAVVLLTHYHSLASFTFGCGISPEIHCDGGHTFRPPSVSNYCICDITNGNHSVDEMPVNSAENVSVSDSFFEVEALMEKMRQLQECRDEEEASQEEMASRFEIEKRESMFVFSSDDEEVTPARAVSRHFEDTSYGYKDFSRHGMHVPTFRVQDYCWEDHGYSLVNRLYPDVGQLIDEKFHIAYNLTYNTMAMHKDVDTSMLRRAIWNYIHCMFGIRYDDYDYGEINQLLDRSFKVYIKTVVCTPEKVTKRMYDSFWRQFKHSEKVHVNLLLIEARMQAELLYALRAITRYMT

SEQ ID NO: 759 - DNA, 3315 bp, Homo sapiens
gcgcgcctccgcaggcggcactgcccgcggcgcggcgtgtgcaccgagcgagtgaaggtatgtgtggcgggcgcggctggagctgccgccgccgccgccgccgcgccagcaggtcctaatgcctgtcacttcccaggacgctggcagcagcagcagcccggagcccccgagccctcggcaggtttgcgtgtccttccccgcgatctgattggataaagtgggggctcgacggtggccgacgtgggacagtctggctgtggcaggggtctcggaaaccatgggttattgcagtggcaggtgcacgcttatctttatctgtggcatgcaactggtttgtgtgctggagaggcaaatatttgacttccttggatatcagtgggcacctatcctggcaaattttgtacatattattatcgtcattcttggtttgtttggaactattcaatatagacctcgttacataacaggatatgctgtctggctagtcctctgggttacgtggaatgtgtttgttatctgcttctatttggaggctggggacctctcaaaggaaacagaccttatcctgacttttaatatatcaatgcaccgatcttggtggatggagaatggaccaggatgtacggtgacgtcagtgacacctgccccagactgggccccagaagaccatcgctacatcacggtctcagggtgtttgctggagtaccagtacatagaagtggctcatagttccctccagattgtcctcgcactggcaggtttcatctacgcctgttatgttgtgaaatgtataactgaagaagaggacagctttgatttcataggtggctttgactcttatggctatcaagggcctcagaagacatctcatttacaactacagcctatgtacatgtcaaaataatacagatgacttcagtatgtcagcccatggacctttcaaagaacttttttcgcagtggcctcctgcatttcatgaagagcaagaagcaactgagtttaaatacatacacgtattaacaaaacaaatgcaaagcctctacatacaacactgacacacacacacacacacacgtgagcacgcacacaccaattccacttgacctcctctttctaactgaaacagacaaatatgcaggacacgcccatcttggatttcctgaaagcaggcccctttctcccaggccttcggaaagttcagaaggagatgtgttgatgcccaacggttgccggccattgctaactcctctgcagcccagcgggttggcctctgtgagctgggaagtcatccaaggcacattagtttgagagctctgtcttctgcactccatacatcttgacagcaccacggctacttaggcaatgtaattgcaaaaacaaacgaaacatgccatgatgaccttgtacccgaagtccgaaatggcagattgtttgccctaaaggctgtaccgtacatacttgccttaacccacctacattgtgtgcccaagaatcccagtgcagacagccccaagccacttcctttaggctaacacactgctattaattctaaatgagttcaagcctgtgtgtttcatgtcaaggaacaagactgaatagctcagcagctccagtgtgtctgtataagaaaagtgccagctgtcagcaaagtgctttaccatagagcctccatggtggcccaaaagagacaagtaacaataacaatatctgtcatctttataattctaaaatatggtcttctgatggggttgggggtgggacagagtaaaacattaatctactaaactcactaatctactggaagcagaaagcagaaatggcttaactcgctgattttatttattgcactctaggtgcttttataagtatctacaattgtcttttactaacacagaaacagctgtggatttctatcaacagaggccaactgaatatgtattagctatgtttactcttttatatctaattcaaattgaagactctacgtaggtgaacttttttttctaacttcagtgtacaagattatttttgggtgggtggggggagcaatagttaccttggtgaaatatttgagatctttttgtggtatttgggggatctgttgtgtgttagagtgtatttcaaccctcctgtattattgtggcagaaaaactgtgctgttaacgtagttggcaacaagatgcctttggaaacttaatagtaggtcaatgtgtttatggaatattctgaactcctaggaaattttgttctatattttaaagcattatttggttttcattagtggaaaacataattagctcaggcttatcaggaactcagatgagtcatattttttcttggatacacctgagacattaaactcaattttttaaaactaacacaccattctttagtgcagtgaaattcaaaagttataaattggcatggagcaagttttttctttgatttctatgaagtttcagttattggattaaactactttagaccttagcccattcggatctacatacaccagttccattactgtgtttgcatggatgtctgtaatatacacacacatatacatttgaaaatgatagaggaacaaagagttatcattggaacataaactataaaaaaagattccagcactcatgcttgaatttcctcagtgggttgtatgtttgtccatacatacatgtataaaataaacaattgcaaacatgtcagtgaaacctcatatgacgcttttatagtgacatgcatgtttaatgtatgagaaaaatatttaccaatgtattgtcctttgagtcctaaaatataaatactatacatgccagaaactattctaatgtgacttttaatgtgactattaaaaatgaggtttcactgtacattcatgctgtgatgcgatttcaccttatagtacatgtatatgggtacagaaaataaaccctcatattcctgctttaagttacagccaagttttcaccaaatcacaactatcatcaccaccaaaattttaaaaaacagtagttgactactaaaaagtaatcagtggacaggtcatttatgggatcagtaagcacagtagtgtgattatatctgggaaaacatctacagttgtacagctgtatcctcctcaaaatccggtgaagaatgctatttttctaggctgagcttttgttataaacttaatattcagaaggcaagggttatgatcctgatgtgtcctttttttttgcatttgttaattctgaatgtatttttaacagaatgatttttttgacttactagtgtaatttgcattttaaaaataaatggaaaaatacttaa

SEQ ID NO: 760 - protein, 208 aa, Homo sapiens
MGYCSGRCTLIFICGMQLVCVLERQIFDFLGYQWAPILANFVHIIIVILGLFGTIQYRPRYITGYAVWLVLWVTWNVFVICFYLEAGDLSKETDLILTFNISMHRSWWMENGPGCTVTSVTPAPDWAPEDHRYITVSGCLLEYQYIEVAHSSLQIVLALAGFIYACYVVKCITEEEDSFDFIGGFDSYGYQGPQKTSHLQLQPMYMSK

SEQ ID NO: 761 - DNA, 6449 bp, Homo sapiens
gcaagcgcgaagggcccatcggcggcgagagcgactcggaggaggtgcgcaacatccgctgcctcacgcccactcgctccttctacccggcgcccgggccctggcccaagagcttctccgatcggcagcagatgaaggacatccgctcggaggccgagcgcctgggcaagaccatcgaccggctcatcgccgacacgagcaccatcatcaccgaggcgcgcatctacgtggccaacggggacctgttcggactcatggacgaggaggacgacggcagccgcatccgggagcacgagctgctctaccgcatcaacgctcagatgaaggccttccgcaaggagctgcagaccttcatcgaccgcctcgaggtgcccaagtctgcggacgaccgcggcgccgaggagcccatttccatgttccagcctatcattttacttattctcattcttgtattattttcatcactttcttacacaacaatatttaaacttgtcttcctttttacactgttttttgtactgtaaatctttcatcatttaccattcattgtagtattttcagtttgtttattttgttcacccttcaagacaagaagtaaaagaagtataatttctgtagtaaccaatgctataaaaacactgaagactgcttatttctttaaaaagatacaactcatcttaccaagaccaaattcaataagaagcccaaacactaaaatatttcaggctttattttaaaggcaagtgagactgcttcaaataaaacaacttcaagcttccaagaaacagttaagaggaggcagagaagagcagaaacacttctttgctgacacttacactgttgccatggacctacataagcagtgggagaacacagagactaactggcataaggaaaagatggaattactggaccagtttgacaatgaaagaaaggaatgggaaagtcaatggaagattatgcagaagaaaatagaagagctttgccgggaagtaaagctttggaggaaaatcaatatcaatgaaagtgctaagatcattgatctttaccatgagaagaccattccagagaaagtgatagaatcttccccaaattaccccgatttaggacaaagtgaatttataaggacgaatcacaaagatggtctgagaaaagaaaataaaagagagcagagcttagtcagtggaggaaatcaaatgtgtaaggaacaaaaagcaacaaaaaaatcaaaagtagggtttttggatcctttggctacagacaaccaaaaggaatgtgaggcctggcctgacctgaggacttctgaggaagacagcaagagctgttctggcgccctcagtacagctcttgaagaacttgcgaaggtgagtgaagaattatgcagctttcaagaggaaattcgaaagcggtctaaccatagaaggatgaagtcagattcttttctccaggaaatgccaaatgtaactaatatacctcatggggaccccatgatcaacaatgaccagtgcattcttccaatcagtttagaaaaagaaaaacagaaaaacaggaagaatctgagctgtaccaatgtgctccagagcaattctacgaaaaaatgtggaattgatacaatcgatttaaaaagaaatgaaactccaccagttcctcctccaagaagcacctctcgaaattttcccagctcggattctgaacaagcctatgaaagatggaaggaaaggttagaccacaacagctgggtgccccatgagggtcgaagtaaaaggaattacaaccctcacttccctttgagacaacaagagatgtctatgttgtatccaaatgaagggaaaacttcgaaagatggtatcatcttttcctctttggtaccagaagtcaaaatagatagcaagcctccaagtaatgaagatgttggacttagcatgtggtcatgtgacattgggataggtgcaaaaaggagcccctctacttcgtggtttcagaaaacctgctctacccccagtaatccaaaatatgaaatggtgatcccagatcaccctgctaaatctcatcctgatcttcatgtaagtaatgactgtagctcctcagtagcagagagcagtagcccacttagaaatttcagttgtggctttgaaaggactacaaggaatgagaagctggcagcaaagactgatgaatttaacagaactgtatttagaacagatagaaattgtcaggcaatacagcaaaatcacagctgctcaaaatcatcggaggatctcaagccctgtgatacctcatctactcacacaggtagcatatcacaaagtaacgatgtgtccggtatttggaaaaccaatgcccacatgcctgtgcccatggaaaatgtgcctgataatcccaccaagaaatccacaacaggcctagtaagacaaatgcagggacacctaagtcctcgcagttatcgaaatatgctccacgagcatgactggagaccgagtaatttgtctggccgtccgaggtcagctgatcccaggtcaaattatggtgttgtggaaaagctgctgaaaacctatgagacagcaacagagtctgcattgcaaaattctaagtgcttccaggataattggaccaaatgtaattctgatgtcagtggtggtgccacattaagtcagcatttagaaatgctccaaatggaacaacagtttcagcaaaagacagctgtgtgggggggacaggaagtgaagcaaggaatagatccgaaaaagataacagaggaatccatgtcagtgaacgcctcacatggaaaaggattttcccgacctgctagaccagcaaatcgtcgtctcccctccagatgggcatccagatctccatctgcaccccctgccttgcggagaactacccacaactataccatttctctgcgatccgaagcattgatggtttaagtctttggcctggattgctatattacagaagttctagtcccacttgtcaaacagagcattctgagtgtttacaggcggacctgttctcttccgacaagcaatttgaatcttaactttccatcagtcttcagtgtttttaatctaaggaataattatcttcctgcattttgatttcttagatcagaattttttaatgccatcctcattagttttccaatacaatataagttgaaacaatgtacaatattgtatattctttgttgcaagtggcagaaagtaaggttatgtgcatggccatgtgtttgtaggtgcatgtgttgaaataggaagtatcctagtatgtatttagatatgaaaaacttatgtgctagtgttgactttgaaattataacatgtatacctatatattctttgtgtttatttaaaagttttgaaaatatgcagtactgtttatattttgtataccttttaataggtatccacttaaggcatttgcagtacaaatattaattgaccacttccttggcccccagctacaatgaaaaagaagaattatgcacacatctaacattggtagatttctaaagacaactcataaataatttcttaacccatataaggataaaataataccattgatattcttgtttattctttttaaataaaaatgtcacaagtttaatagatcagccttgtaaagcaagcataaaatgttcataaatgttttatatattatttggtagtctagtatggctttaactgaatatttgatcctcagagacagtatcatgagactgcattataaatgacatgattaaatgatgaatttattttgtcagcctcagcaacaaacatttcctaaatgggatgcaaaaagaaactgaatgatgttgaattttagtttttctttaagttgtggtaagcttttagtttagctgctttaacatggagtcatacatacttagaggtaagtcatttattatttttttcctttttctaatcttttccttaaaattaatagataacaaactaagttacttttttactaacaaggaagatcaggaataatatttctttgaaagctgaaattatacttctcacagtttgctaccgaaaaaaggcttaaactaaaccttgacatccacagtagcatcaggaatagaaatgtgtattttggctacagtttgcatacagtgaacacataaaatctatattgaaaactgacagaaatatgaatgtcgaggggcttggaattctaaatggaagattttagaaggaactttgctctctactgtcactatataaaaccaattatgttatgttattagatattaactctatttaagcttttcttttactaagaaattcttatgccaaatgtattccaagagccatctccttatgatgtatttgaaccatttagagaaattcacttcattgtaccccatgacctgaggtaaagaaaataattttcaaattgcagacttccttgaaaggctcaagactgtagcatggtgatgtctagattcatactttactgtaaggacagtttcggtagttaagtggaattaaaggtctagagtgatttgtattggatggtaactaaggtctatacatctactcttttaattcttatttccttcaggaagatccttttccacaggaagctatcaaagaaaagtaaactagacaccaagtaatatcactctcataatatgctttccagctagaggggagaaaacaccaggaaagaggaaccctgggtcataaaatgacggacctgttaggaaaatgctgttgtgtgacaatggagagcctgcccaaggactgtgcaacctatctgttcctctccaccagtgtatcccaagtagtctggtatgatctgtggttccttagaatattgaggatctctttaaaaaatgaaatttctgatctcaccccatattactaaagcaaaatttccaggggtagggactgggactccagaaccattaataaaacaaaacaaaacaaagcaaaatattgatgatcaggcagatttgaaaacagtgacattgcttgatctctgaatggatggatgcccttgggtggtcacttttcttcctaggacttgcctttgttatctgtaaattagaatggctatactttcagacttcacaattttaagccacttttttctattaacagttgaatgaaccagtgggacacattttaacgtcttcttatgttgactaaaattatagttagagctgagaaaaaaaaaatagcatctagtccaactccttgattgtaaaactgaaaaactaaggttatttgaatgttctgttttctctttttaaatattttataacttttaaatggaaaaacctattaggtaaatggaaataatccttgaaaatagtttttgatgttttgtgatttttaactggtaaatttctactttaggtgggcattttcttccctagaatatgccctttattatgctatcattgctagatttaaagggacttgtaagcatttctggaaatatttgatttaaaaacatatattaatagatgttttccctagcagacttttggagcaaaaatattattttagttcagcagaggattactgatattatgggctgatctcagaaaggaataaggatgaggcagagaggagtacttgagtttgtgtgtgtgtgtgtgtgtgtgtgtttgtgtcagtgtcacataagttctccatattgccttatgtcccaaagccaaatataaaaatataaatgatgctttgtataattcattttatcaaaaattacccataactttcatttgtttttatatcgacaatgaagatgatcatatttcattttgcagatgtggccataaaatattatttacttctatataggtgattttaccaggtttagttatcctgagaaaacatctggacttaagagtttctgcttccctacaaagatctttaaagttatttttaggcacatttgtgacaaacaactacttgatattgaaatctccttcagccattagaagctatcaaataaagtaggtgtaaaaacaactgtctgtggcatttgtatacatcgagaacatttttctttccctcattttctgcagtgaactccagtaaagctaagtgtcttatgaaatctaaactcatatatgtacacagttcactctagcttcttccaaaatatctctaggtagtacaactgaagccaaacctgcctgacttcctgctcctggccacccaaaactccatatggcttctcgtacactgacatcctctctctacccatttaactgctaattgagtctgataaaagtcttctttgaaaaaagtttttacttctaagatttgcatttacatcataaaattaaaccattttcaggaaaatcagatttttttattacagtactatttgctttaaattcggcatgtttttcttaagtagcaagtacatgtatcggaacttagaactggtgggcgcggtggctcttgcctgtaatcccagca

SEQ ID NO: 762 - protein, 694 aa, Homo sapiens
MDLHKQWENTETNWHKEKMELLDQFDNERKEWESQWKIMQKKIEELCREVKLWRKININESAKIIDLYHEKTIPEKVIESSPNYPDLGQSEFIRTNHKDGLRKENKREQSLVSGGNQMCKEQKATKKSKVGFLDPLATDNQKECEAWPDLRTSEEDSKSCSGALSTALEELAKVSEELCSFQEEIRKRSNHRRMKSDSFLQEMPNVTNIPHGDPMINNDQCILPISLEKEKQKNRKNLSCTNVLQSNSTKKCGIDTIDLKRNETPPVPPPRSTSRNFPSSDSEQAYERWKERLDHNSWVPHEGRSKRNYNPHFPLRQQEMSMLYPNEGKTSKDGIIFSSLVPEVKIDSKPPSNEDVGLSMWSCDIGIGAKRSPSTSWFQKTCSTPSNPKYEMVIPDHPAKSHPDLHVSNDCSSSVAESSSPLRNFSCGFERTTRNEKLAAKTDEFNRTVFRTDRNCQAIQQNHSCSKSSEDLKPCDTSSTHTGSISQSNDVSGIWKTNAHMPVPMENVPDNPTKKSTTGLVRQMQGHLSPRSYRNMLHEHDWRPSNLSGRPRSADPRSNYGVVEKLLKTYETATESALQNSKCFQDNWTKCNSDVSGGATLSQHLEMLQMEQQFQQKTAVWGGQEVKQGIDPKKITEESMSVNASHGKGFSRPARPANRRLPSRWASRSPSAPPALRRTTHNYTISLRSEALMV

SEQ ID NO: 763 - DNA, 3556 bp, Homo sapiens
cttaggaaggaaggttggcggcggtgaagagggaagaggatgatctagtaatgggctcttccaaatcgcatctggtaggttcatagccatgagtcagccaccaatcgggggcgctgcccctgccacagcagcagcttctcccgccgctgcagccactgaggctcgtctgcacccggagggcagcagcagaaagcagcagcgagctcagtcacccgctagaccgagggacagttcgctgcgacagacaatcgcggccacccggtccccagtgggggccggcactaaactcaattctgttcggcagcagcagctgcagcagcagcaacagcagggtaacaagaccgggagccgcacggggccgcccgccagcatccgaggaggcggaggtggggccgagaaggcgacgcccctggcgcccaaaggggccgctccgggagctgtccagcctgtggctggtgctgaagcggcccccgccgcgaccctggccgctttgggcggcaggaggcccggaccgcccgaggagccgcctcgggagctagagtccgtgccctcgaaactcggggaaccccctccgctcggagaagggggaggagggggcggggaaggaggaggagccggcggcggctccggggaaagggaggggggcgctccgcagccgccgccgcccaggggctggcgagggaaaggcgtacgcgctcagcagaggggcggcagcggcggggagggggcctccccttctccatcctcctcttctgcgggcaaaaccccaggaaccggcagcagaaactccggaagcggcgttgcggggggcggcagcggtggtggagggagctactggaaagaaggatgtctgcagtctgagctcatccagttccatctcaagaaggagcgggcggcagcggcggcggccgcggctcagatgcacgctaagaacggcggcggcagcagtagccgcagctccccggtgtctggcccccctgccgtttgcgagaccctggccgtcgcctccgcctccccaatggcggcggcggcggagggcccccagcagagcgcagagggcagcgcgagcggcgggggcatgcaggcggcagcgcccccttcgtcgcagccgcacccgcagcagctccaagagcaggaagaaatgcaagaggagatggagaagctgcgagaggaaaacgagactctcaagaacgagatcgatgagctgagaaccgagatggacgagatgagggacactttcttcgaggaggatgcctgtcaactgcaggaaatgcgccacgagttggagagagccaacaaaaactgccggatcctgcagtaccgcctccgcaaagccgagcgcaaaaggctccgctacgcccagaccggggaaatcgacggggagctgttgcgcagcctggagcaggacctcaaggttgcaaaggatgtatctgtgagacttcaccatgaattagaaaatgtggaagaaaagagaacaacaacagaagatgaaaatgagaaactgaggcaacagctcatagaagttgaaattgcaaagcaagctttacagaatgaactggaaaaaatgaaagagttatccttaaaaagaagaggaagcaaagatttgccaaaatctgaaaaaaaggctcaacagactcccacagaggaggacaatgaagatctgaagtgccagctgcagtttgttaaggaagaagccgctttgatgagaaagaaaatggccaagattgataaagaaaaggacagatttgaacacgagctccagaagtacagatccttttatggggatctggacagtcctttgcccaaaggagaagccggaggccctcccagcactagggaggccgagctcaagctacggctaaggctggtggaggaagaagccaacatcctgggcaggaaaatcgtcgaactggaggtggagaacagaggcctgaaggcggaactggacgaccttaggggcgatgacttcaacggctcggccaacccgctcatgagggagcagagcgaatccctgtcggagctgcggcagcacctgcagctggtggaagacgagacggagctgctgcggaggaacgtggccgacctggaggagcagaacaagcgcatcacggcggagctcaacaagtacaagtacaagtccggcggccacgacagcgcgcggcaccacgacaacgccaagaccgaggccctgcaggaggagctgaaggcggcgcgcctgcagatcaacgagctcagcggcaaggtcatgcagctgcagtacgagaaccgcgtgcttatgtccaacatgcagcgctacgacctggcctcgcacctgggcatccgcggcagcccccgcgacagcgacgccgagagcgacgcgggcaagaaggagagcgacgacgactcgcggcctccgcaccgcaagcgcgaagggcccatcggcggcgagagcgactcggaggaggtgcgcaacatccgctgcctcacgcccactcgctccttctacccggcgcccgggccctggcccaagagcttctccgatcggcagcagatgaaggacatccgctcggaggccgagcgcctgggcaagaccatcgaccggctcatcgccgacacgagcaccatcatcaccgaggcgcgcatctacgtggccaacggggacctgttcggactcatggacgaggaggacgacggcagccgcatccgggagcacgagctgctctaccgcatcaacgctcagatgaaggccttccgcaaggagctgcagaccttcatcgaccgcctcgaggtgcccaagtctgcggacgaccgcggcgccgaggagcccatttccgtgagtcagatgttccagcctatcattttacttattctcattcttgtattattttcatcactttcttacacaacaatatttaaacttgtcttcctttttacactgttttttgtactgtaaatctttcatcatttaccattcattgtagtattttcagtttgtttattttgttcacccttcaagacaagaagtaaaagaagtataatttctgtagtaaccaatgctataaaaacactgaagactgcttatttctttaaaaagatacaactcatcttaccaagaccaaattcaataagaagcccaaacactaaaatatttcaggctttattttaaaggcaagtgagactgcttcaaataaaacaacttcaagcttccaagaaacagttaagaggaggcagagaagagcagaaacacttctttgctgacacttacactgttgccatggacctacataagcagtgggagaacacagagactaactggcataaggaaaagatggaattactggaccagtttgacaatgaaagaaaggaatgggaaagtcaatggaagattatgcagaagaaaatagaagagctttgccgggaagtaaagctttggaggaaaatcaatatcaatgaaagtgctaagatcattgatctttaccatgagaagaccattccagagaaagtgatagaatcttccccaaattaccccgatttaggacaaagtgaatttataaggacgaatcacaaagatggtctg

SEQ ID NO: 764 - protein, 947 aa, Homo sapiens
MSQPPIGGAAPATAAASPAAAATEARLHPEGSSRKQQRAQSPARPRDSSLRQTIAATRSPVGAGTKLNSVRQQQLQQQQQQGNKTGSRTGPPASIRGGGGGAEKATPLAPKGAAPGAVQPVAGAEAAPAATLAALGGRRPGPPEEPPRELESVPSKLGEPPPLGEGGGGGGEGGGAGGGSGEREGGAPQPPPPRGWRGKGVRAQQRGGSGGEGASPSPSSSSAGKTPGTGSRNSGSGVAGGGSGGGGSYWKEGCLQSELIQFHLKKERAAAAAAAAQMHAKNGGGSSSRSSPVSGPPAVCETLAVASASPMAAAAEGPQQSAEGSASGGGMQAAAPPSSQPHPQQLQEQEEMQEEMEKLREENETLKNEIDELRTEMDEMRDTFFEEDACQLQEMRHELERANKNCRILQYRLRKAERKRLRYAQTGEIDGELLRSLEQDLKVAKDVSVRLHHELENVEEKRTTTEDENEKLRQQLIEVEIAKQALQNELEKMKELSLKRRGSKDLPKSEKKAQQTPTEEDNEDLKCQLQFVKEEAALMRKKMAKIDKEKDRFEHELQKYRSFYGDLDSPLPKGEAGGPPSTREAELKLRLRLVEEEANILGRKIVELEVENRGLKAELDDLRGDDFNGSANPLMREQSESLSELRQHLQLVEDETELLRRNVADLEEQNKRITAELNKYKYKSGGHDSARHHDNAKTEALQEELKAARLQINELSGKVMQLQYENRVLMSNMQRYDLASHLGIRGSPRDSDAESDAGKKESDDDSRPPHRKREGPIGGESDSEEVRNIRCLTPTRSFYPAPGPWPKSFSDRQQMKDIRSEAERLGKTIDRLIADTSTIITEARIYVANGDLFGLMDEEDDGSRIREHELLYRINAQMKAFRKELQTFIDRLEVPKSADDRGAEEPISVSQMFQPIILLILILVLFSSLSYTTIFKLVFLFTLFFVL

SEQ ID NO: 765 - DNA, 2279 bp, Homo sapiens
aggtggagccttttttgctcacggcagcaagttcccttctcctttctctcccccggcggcgtgtgcattggctcttcaagctgcctgtgctgctccgtggagtgaaaaaggcagggtgtgctcgcagactgtgctataaactgcaatttctatttggggtcctcacggagaagaacaccaggaaagacagacaggaccagtgccatgggccagctttgctgctttcctttctcaagagatgaaggaaaaatcagtgaaaagaacggaggggagcccgatgacgctgaactagtaaggctcagtaagaggctggtggagaacgcggtgctcaaggctgtccagcagtatctggaggaaacacagaataaaaacaagccgggggaggggagctctgtgaaaaccgaagcagctgatcagaatggcaatgacaatgagaacaacaggaaatgagcccggaacgcaggcccccatgtctctgtgcaaagcctccctgcttccctctgctgagtctagggactgacttgcagcgtgctgtttaagttaagtttctctggtgcaatctgtgaagattgcctaatacttttcatgatcgatgtgttcgcattgctgaaacacaacagaagaaaaatggagtgctgggactggcagaggaaattaattgatgaaagaagaatggcccaagtttcattcgccctcagccacgcacaagggaaagggaactttgggttatgcctcctggacgcaaattaaaggccgagaaagaggccttgccatcaatggaatactgccatttatattgcttagcagggcatttgactactttatctgaggccagaactctcacacacagctatcaagtgctaagtttaaaataatcactgttggaattgtcatctgtacaattagtccataatgtttcatgtttgtcctaagtgtgctgttgctatgcagtgtgatctttatttatagtaaattatgtttcatgtaaatgatatatttttggtgaaatgcaaccttttctataaaatgtgggcaacattttaaagtttttttaaaatcctattttgataagtcagtatgccatatttaatgaaatgttattatataatttttttttcttaggcaagaaacctattggaattcgagacttaattaatgaagctttgcatcgagaaacgatgggtctgaagtccaaagtgaaacagataaaggaacttttattaaagcctgagactcaggccagaattaggagggagctttttgaaggaagacttattaacaacagtaattcagcaaatgacgttgatttcagcacaactttgacataagctctacattgcgattgtgacaacatagcttatgaaatcttttcagcttattaagtagctctttggtaaacaccaaagaagtttctgatagtgtctgcacaacagcaaaccaacatttggtgaggaattagcaatttcttgccaaagaaaattgattctgcccaattattttttgagctacacttgtgttttagaatatctgtttctgtaatattgagagttattttatagaaatgatttcttaattagctgttgtgagatatttctcgggtccttgcagaaaaaaacatacagactgtgaacaaatcattcacaaacagaataaaacagagccaacaacagtattttaagggtcacttgcctcctgttgacacaattgttgctaaatcaaaagaagcgttgtccaggtgtgtctacatctagtgttacttttaatgagaatttgaatgtttattgaacaatagtacttgaatgaacatttataaatgtaattattgcgatcactggttaagaatgttttatatatccttataatatttttcactgatcaaaatgttgttctgctttttcatttcttaaggaatacatgtttgggatttttattttttacgtgtccgaagataagctccaggtcttatcgtatcccttgccatctgaacttgtttgcactgcttctgtttgaaagagcatcttgaaaaacttccccggtatgatgattgttggtaacaactttttctatagtcattgatggagtagatcatgatggaggggaaatcactggagatcaaatatgtaaaatcatttcaaatataaaatccagtttactcatggattttagctattttttcactgggtaaattatactacatttatttacaaatgagtttatgcattttcatggctcttaataaacatattgttttcccttgaaaaaaaaaaaaaaaaaaaaaa

SEQ ID NO: 766 - protein, 81 aa, Homo sapiens
MGQLCCFPFSRDEGKISEKNGGEPDDAELVRLSKRLVENAVLKAVQQYLEETQNKNKPGEGSSVKTEAADQNGNDNENNRK

SEQ ID NO: 767 - DNA, 2821 bp, Homo sapiens
gaaaaaagaaaatgtcagaggaatttgaagccaatactatggattctctggtagacatgccatttgctactgtagatattcaggatgactgtggaatcactgatgaacctcaaataaatttgaagagaagtcaagaaaatgaatgggtcaagagtgatcaagtaaagaagaggaaaaaaaagagaaaagattatcaacccaactatttcctgtccattccaatcaccaacaaagagattataaaaggaattaagatcctgcagaatgcaataatacaacaagatgagcgactggccaaagcaatggtcagtgatggttcctttcatattaccctgctggtgatgcaattattaaatgaagatgaagtaaacattggtattgatgctcttttggaattgaaaccattcatagaagaactcctccagggaaaacatttgactttgccctttcaagggattggtacttttggaaatcaggttggatttgtgaagctggcagaaggagatcatgtaaactcacttttggagatagcagagactgcaaataggacatttcaagaaaaaggcatcctggtaggagagagcagaagttttaaacctcatttgaccttcatgaagttgtcaaaatcaccgtggctccgtaagaatggagtgaaaaaaatagatcctgatttatatgaaaagtttatcagtcacagatttggagaagaaatattatatcgcatagatctttgctccatgctgaagaaaaaacaaagtaatggttattatcactgtgaatcttccattgtgattggtgaaaagaacggaggggagcccgatgacgctgaactagtaaggctcagtaagaggctggtggagaacgcggtgctcaaggctgtccagcagtatctggaggaaacacagaataaaaacaagccgggggaggggagctctgtgaaaaccgaagcagctgatcagaatggcaatgacaatgagaacaacaggaaatgagcccggaacgcaggcccccatgtctctgtgcaaagcctccctgcttccctctgctgagtctagggactgacttgcagcgtgctgtttaagttaagtttctctggtgcaatctgtgaagattgcctaatacttttcatgatcgatgtgttcgcattgctgaaacacaacagaagaaaaatggagtgctgggactggcagaggaaattaattgatgaaagaagaatggcccaagtttcattcgccctcagccacgcacaagggaaagggaactttgggttatgcctcctggacgcaaattaaaggccgagaaagaggccttgccatcaatggaatactgccatttatattgcttagcagggcatttgactactttatctgaggccagaactctcacacacagctatcaagtgctaagtttaaaataatcactgttggaattgtcatctgtacaattagtccataatgtttcatgtttgtcctaagtgtgctgttgctatgcagtgtgatctttatttatagtaaattatgtttcatgtaaatgatatatttttggtgaaatgcaaccttttctataaaatgtgggcaacattttaaagtttttttaaaatcctattttgataagtcagtatgccatatttaatgaaatgttattatataatttttttttcttaggcaagaaacctattggaattcgagacttaattaatgaagctttgcatcgagaaacgatgggtctgaagtccaaagtgaaacagataaaggaacttttattaaagcctgagactcaggccagaattaggagggagctttttgaaggaagacttattaacaacagtaattcagcaaatgacgttgatttcagcacaactttgacataagctctacattgcgattgtgacaacatagcttatgaaatcttttcagcttattaagtagctctttggtaaacaccaaagaagtttctgatagtgtctgcacaacagcaaaccaacatttggtgaggaattagcaatttcttgccaaagaaaattgattctgcccaattattttttgagctacacttgtgttttagaatatctgtttctgtaatattgagagttattttatagaaatgatttcttaattagctgttgtgagatatttctcgggtccttgcagaaaaaaacatacagactgtgaacaaatcattcacaaacagaataaaacagagccaacaacagtattttaagggtcacttgcctcctgttgacacaattgttgctaaatcaaaagaagcgttgtccaggtgtgtctacatctagtgttacttttaatgagaatttgaatgtttattgaacaatagtacttgaatgaacatttataaatgtaattattgcgatcactggttaagaatgttttatatatccttataatatttttcactgatcaaaatgttgttctgctttttcatttcttaaggaatacatgtttgggatttttattttttacgtgtccgaagataagctccaggtcttatcgtatcccttgccatctgaacttgtttgcactgcttctgtttgaaagagcatcttgaaaaacttccccggtatgatgattgttggtaacaactttttctatagtcattgatggagtagatcatgatggaggggaaatcactggagatcaaatatgtaaaatcatttcaaatataaaatccagtttactcatggattttagctattttttcactgggtaaattatactacatttatttacaaatgagtttatgcattttcatggctcttaataaacatattgttttcccttgaaaaaaaaaaaaaaaaaaaaaa

SEQ ID NO: 768 - protein, 326 aa, Homo sapiens
MSEEFEANTMDSLVDMPFATVDIQDDCGITDEPQINLKRSQENEWVKSDQVKKRKKKRKDYQPNYFLSIPITNKEIIKGIKILQNAIIQQDERLAKAMVSDGSFHITLLVMQLLNEDEVNIGIDALLELKPFIEELLQGKHLTLPFQGIGTFGNQVGFVKLAEGDHVNSLLEIAETANRTFQEKGILVGESRSFKPHLTFMKLSKSPWLRKNGVKKIDPDLYEKFISHRFGEEILYRIDLCSMLKKKQSNGYYHCESSIVIGEKNGGEPDDAELVRLSKRLVENAVLKAVQQYLEETQNKNKPGEGSSVKTEAADQNGNDNENNRK

SEQ ID NO: 769 - DNA, 2348 bp, Homo sapiens
aggtggagccttttttgctcacggcagcaagttcccttctcctttctctcccccggcggcgtgtgcattggctcttcaagctgcctgtgctgctccgtggagtgaaaaaggcagggtgtgctcgcagactgtgctataaactgcaatttctatttggggtcctcacggagaagaacaccaggaaagacagacaggaccagtgccatgggccagctttgctgctttcctttctcaagagatgaaggaaaaatcagtgagttggaaagctcgtcctctgcagtcctacagagatacagcaaggatatacccagttggtcaagtggtgaaaagaacggaggggagcccgatgacgctgaactagtaaggctcagtaagaggctggtggagaacgcggtgctcaaggctgtccagcagtatctggaggaaacacagaataaaaacaagccgggggaggggagctctgtgaaaaccgaagcagctgatcagaatggcaatgacaatgagaacaacaggaaatgagcccggaacgcaggcccccatgtctctgtgcaaagcctccctgcttccctctgctgagtctagggactgacttgcagcgtgctgtttaagttaagtttctctggtgcaatctgtgaagattgcctaatacttttcatgatcgatgtgttcgcattgctgaaacacaacagaagaaaaatggagtgctgggactggcagaggaaattaattgatgaaagaagaatggcccaagtttcattcgccctcagccacgcacaagggaaagggaactttgggttatgcctcctggacgcaaattaaaggccgagaaagaggccttgccatcaatggaatactgccatttatattgcttagcagggcatttgactactttatctgaggccagaactctcacacacagctatcaagtgctaagtttaaaataatcactgttggaattgtcatctgtacaattagtccataatgtttcatgtttgtcctaagtgtgctgttgctatgcagtgtgatctttatttatagtaaattatgtttcatgtaaatgatatatttttggtgaaatgcaaccttttctataaaatgtgggcaacattttaaagtttttttaaaatcctattttgataagtcagtatgccatatttaatgaaatgttattatataatttttttttcttaggcaagaaacctattggaattcgagacttaattaatgaagctttgcatcgagaaacgatgggtctgaagtccaaagtgaaacagataaaggaacttttattaaagcctgagactcaggccagaattaggagggagctttttgaaggaagacttattaacaacagtaattcagcaaatgacgttgatttcagcacaactttgacataagctctacattgcgattgtgacaacatagcttatgaaatcttttcagcttattaagtagctctttggtaaacaccaaagaagtttctgatagtgtctgcacaacagcaaaccaacatttggtgaggaattagcaatttcttgccaaagaaaattgattctgcccaattattttttgagctacacttgtgttttagaatatctgtttctgtaatattgagagttattttatagaaatgatttcttaattagctgttgtgagatatttctcgggtccttgcagaaaaaaacatacagactgtgaacaaatcattcacaaacagaataaaacagagccaacaacagtattttaagggtcacttgcctcctgttgacacaattgttgctaaatcaaaagaagcgttgtccaggtgtgtctacatctagtgttacttttaatgagaatttgaatgtttattgaacaatagtacttgaatgaacatttataaatgtaattattgcgatcactggttaagaatgttttatatatccttataatatttttcactgatcaaaatgttgttctgctttttcatttcttaaggaatacatgtttgggatttttattttttacgtgtccgaagataagctccaggtcttatcgtatcccttgccatctgaacttgtttgcactgcttctgtttgaaagagcatcttgaaaaacttccccggtatgatgattgttggtaacaactttttctatagtcattgatggagtagatcatgatggaggggaaatcactggagatcaaatatgtaaaatcatttcaaatataaaatccagtttactcatggattttagctattttttcactgggtaaattatactacatttatttacaaatgagtttatgcattttcatggctcttaataaacatattgttttcccttgaaaaaaaaaaaaaaaaaaaaaa

SEQ ID NO: 770 - protein, 104 aa, Homo sapiens
MGQLCCFPFSRDEGKISELESSSSAVLQRYSKDIPSWSSGEKNGGEPDDAELVRLSKRLVENAVLKAVQQYLEETQNKNKPGEGSSVKTEAADQNGNDNENNRK

SEQ ID NO: 771 - DNA, 3493 bp, Homo sapiens
agcggccggggccacgatggagcgcgacggctgcgcggggggcgggagccgcggcggcgagggcgggcgcgctccccgggagggcccggcggggaacggccgcgatcggggccgcagccacgctgccgaggcgcccggggacccgcaggcggccgcgtccttgctggcccctatggacgtgggggaggagccgctggagaaggcggcgcgcgcccgcactgccaaggaccccaacacctataaagtactctcgctggtattgtcagtatgtgtgttaacaacaatacttggttgtatatttgggttgaaaccaagctgtgccaaagaagttaaaagttgcaaaggtcgctgtttcgagagaacatttgggaactgtcgctgtgatgctgcctgtgttgagcttggaaactgctgtttagattaccaggagacgtgcatagaaccagaacatatatggacttgcaacaaattcaggtgtggtgagaaaaggttgaccagaagcctctgtgcctgttcagatgactgcaaggacaagggcgactgctgcatcaactacagttctgtgtgtcaaggtgagaaaagttgggtagaagaaccatgtgagagcattaatgagccacagtgcccagcagggtttgaaacgcctcctaccctcttattttctttggatggattcagggcagaatatttacacacttggggtggacttcttcctgttattagcaaactaaaaaaatgtggaacatatactaaaaacatgagaccggtatatccaacaaaaactttccccaatcactacagcattgtcaccggattgtatccagaatctcatggcataatcgacaataaaatgtatgatcccaaaatgaatgcttccttttcacttaaaagtaaagagaaatttaatcctgagtggtacaaaggagaaccaatttgggtcacagctaagtatcaaggcctcaagtctggcacatttttctggccaggatcagatgtggaaattaacggaattttcccagacatctataaaatgtataatggttcagtaccatttgaagaaaggattttagctgttcttcagtggctacagcttcctaaagatgaaagaccacacttttacactctgtatttagaagaaccagattcttcaggtcattcatatggaccagtcagcagtgaagtcatcaaagccttgcagagggttgatggtatggttggtatgctgatggatggtctgaaagagctgaacttgcacagatgcctgaacctcatccttatttcagatcatggcatggaacaaggcagttgtaagaaatacatatatctgaataaatatttgggggatgttaaaaatattaaagttatctatggacctgcagctcgattgagaccctctgatgtcccagataaatactattcatttaactatgaaggcattgcccgaaatctttcttgccgggaaccaaaccagcacttcaaaccttacctgaaacatttcttacctaagcgtttgcactttgctaagagtgatagaattgagcccttgacattctatttggaccctcagtggcaacttgcattgaatccctcagaaaggaaatattgtggaagtggatttcatggctctgacaatgtattttcaaatatgcaagccctctttgttggctatggacctggattcaagcatggcattgaggctgacacctttgaaaacattgaagtctataacttaatgtgtgatttactgaatttgacaccggctcctaataacggaactcatggaagtcttaaccaccttctaaagaatcctgtttatacgccaaagcatcccaaagaagtgcaccccctggtacagtgccccttcacaagaaaccccagagataaccttggctgctcatgtaacccttcgattttgccgattgaggattttcaaacacagttcaatctgactgtggcagaagagaagattattaagcatgaaactttaccctatggaagacctagagttctccagaaggaaaacaccatctgtcttctttcccagcaccagtttatgagtggatacagccaagacatcttaatgcccctttggacatcctataccgtggacagaaatgacagtttctctacggaagacttctccaactgtctgtaccaggactttagaattcctcttagtcctgtccataaatgttcattttataaaaataacaccaaagtgagttacgggttcctctccccaccacaactaaataaaaattcaagtggaatatattctgaagctttgcttactacaaatatagtgccaatgtaccagagttttcaagttatatggcgctactttcatgacaccctactgcgaaagtatgctgaagaaagaaatggtgtcaatgtcgtcagtggtcctgtgtttgactttgattatgatggacgttgtgattccttagagaatctgaggcaaaaaagaagagtcatccgtaaccaagaaattttgattccaactcacttctttattgtgctaacaagctgtaaagatacatctcagacgcctttgcactgtgaaaacctagacaccttagctttcattttgcctcacaggactgataacagcgagagctgtgtgcatgggaagcatgactcctcatgggttgaagaattgttaatgttacacagagcacggatcacagatgttgagcacatcactggactcagcttctatcaacaaagaaaagagccagtttcagacattttaaagttgaaaacacatttgccaacctttagccaagaagactgatatgttttttatccccaaacaccatgaatctttttgagagaaccttatattttatatagtcctctagctacactattgcattgttcagaaactgtcgaccagagttagaacggagccctcggtgatgcggacatctcagggaaacttgcgtactcagcacagcagtggagagtgttcctgttgaatcttgcacatatttgaatgtgtaagcattgtatacattgatcaagttcgggggaataaagacagaccacacctaaaactgcctttctgcttctcttaaaggagaagtagctgtgaacattgtctggataccagatatttgaatctttcttactattggtaataaaccttgatggcattgggcaaacagtagacttatagtagggttggggtagcccatgttatgtgactatctttatgagaattttaaagtggttctggatatcttttaacttggagtttcatttcttttcattgtaatcaaaaaaaaaattaacagaagccaaaatacttctgagaccttgtttcaatctttgctgtatatcccctcaaaatccaagttattaatcttatgtgttttctttttaattttttgattggatttctttagatttaatggttcaaatgagttcaactttgagggacgatctttgaatatacttacctattataaaatcttactttgtatttgtattt

SEQ ID NO: 772 - protein, 873 aa, Homo sapiens
MDVGEEPLEKAARARTAKDPNTYKVLSLVLSVCVLTTILGCIFGLKPSCAKEVKSCKGRCFERTFGNCRCDAACVELGNCCLDYQETCIEPEHIWTCNKFRCGEKRLTRSLCACSDDCKDKGDCCINYSSVCQGEKSWVEEPCESINEPQCPAGFETPPTLLFSLDGFRAEYLHTWGGLLPVISKLKKCGTYTKNMRPVYPTKTFPNHYSIVTGLYPESHGIIDNKMYDPKMNASFSLKSKEKFNPEWYKGEPIWVTAKYQGLKSGTFFWPGSDVEINGIFPDIYKMYNGSVPFEERILAVLQWLQLPKDERPHFYTLYLEEPDSSGHSYGPVSSEVIKALQRVDGMVGMLMDGLKELNLHRCLNLILISDHGMEQGSCKKYIYLNKYLGDVKNIKVIYGPAARLRPSDVPDKYYSFNYEGIARNLSCREPNQHFKPYLKHFLPKRLHFAKSDRIEPLTFYLDPQWQLALNPSERKYCGSGFHGSDNVFSNMQALFVGYGPGFKHGIEADTFENIEVYNLMCDLLNLTPAPNNGTHGSLNHLLKNPVYTPKHPKEVHPLVQCPFTRNPRDNLGCSCNPSILPIEDFQTQFNLTVAEEKIIKHETLPYGRPRVLQKENTICLLSQHQFMSGYSQDILMPLWTSYTVDRNDSFSTEDFSNCLYQDFRIPLSPVHKCSFYKNNTKVSYGFLSPPQLNKNSSGIYSEALLTTNIVPMYQSFQVIWRYFHDTLLRKYAEERNGVNVVSGPVFDFDYDGRCDSLENLRQKRRVIRNQEILIPTHFFIVLTSCKDTSQTPLHCENLDTLAFILPHRTDNSESCVHGKHDSSWVEELLMLHRARITDVEHITGLSFYQQRKEPVSDILKLKTHLPTFSQED

SEQ ID NO: 773 - DNA, 2358 bp, Homo sapiens
aaactcacacaacaactcttccccgctgagaggagacagccagtgcgactccaccctccagctcgacggcagccgccccggccgacagccccgagacgacagcccggcgcgtcccggtccccacctccgaccaccgccagcgctccaggccccgccgctccccgctcgccgccaccgcgccctccgctccgcccgcagtgccaaccatgaccgccgccagtatgggccccgtccgcgtcgccttcgtggtcctcctcgccctctgcagccggccggccgtcggccagaactgcagcgggccgtgccggtgcccggacgagccggcgccgcgctgcccggcgggcgtgagcctcgtgctggacggctgcggctgctgccgcgtctgcgccaagcagctgggcgagctgtgcaccgagcgcgacccctgcgacccgcacaagggcctcttctgtgacttcggctccccggccaaccgcaagatcggcgtgtgcaccgccaaagatggtgctccctgcatcttcggtggtacggtgtaccgcagcggagagtccttccagagcagctgcaagtaccagtgcacgtgcctggacggggcggtgggctgcatgcccctgtgcagcatggacgttcgtctgcccagccctgactgccccttcccgaggagggtcaagctgcccgggaaatgctgcgaggagtgggtgtgtgacgagcccaaggaccaaaccgtggttgggcctgccctcgcggcttaccgactggaagacacgtttggcccagacccaactatgattagagccaactgcctggtccagaccacagagtggagcgcctgttccaagacctgtgggatgggcatctccacccgggttaccaatgacaacgcctcctgcaggctagagaagcagagccgcctgtgcatggtcaggccttgcgaagctgacctggaagagaacattaagaagggcaaaaagtgcatccgtactcccaaaatctccaagcctatcaagtttgagctttctggctgcaccagcatgaagacataccgagctaaattctgtggagtatgtaccgacggccgatgctgcaccccccacagaaccaccaccctgccggtggagttcaagtgccctgacggcgaggtcatgaagaagaacatgatgttcatcaagacctgtgcctgccattacaactgtcccggagacaatgacatctttgaatcgctgtactacaggaagatgtacggagacatggcatgaagccagagagtgagagacattaactcattagactggaacttgaactgattcacatctcatttttccgtaaaaatgatttcagtagcacaagttatttaaatctgtttttctaactgggggaaaagattcccacccaattcaaaacattgtgccatgtcaaacaaatagtctatcaaccccagacactggtttgaagaatgttaagacttgacagtggaactacattagtacacagcaccagaatgtatattaaggtgtggctttaggagcagtgggagggtaccagcagaaaggttagtatcatcagatagcatcttatacgagtaatatgcctgctatttgaagtgtaattgagaaggaaaattttagcgtgctcactgacctgcctgtagccccagtgacagctaggatgtgcattctccagccatcaagagactgagtcaagttgttccttaagtcagaacagcagactcagctctgacattctgattcgaatgacactgttcaggaatcggaatcctgtcgattagactggacagcttgtggcaagtgaatttgcctgtaacaagccagattttttaaaatttatattgtaaatattgtgtgtgtgtgtgtgtgtgtatatatatatatatgtacagttatctaagttaatttaaagttgtttgtgcctttttatttttgtttttaatgctttgatatttcaatgttagcctcaatttctgaacaccataggtagaatgtaaagcttgtctgatcgttcaaagcatgaaatggatacttatatggaaattctgctcagatagaatgacagtccgtcaaaacagattgtttgcaaaggggaggcatcagtgtccttggcaggctgatttctaggtaggaaatgtggtagcctcacttttaatgaacaaatggcctttattaaaaactgagtgactctatatagctgatcagttttttcacctggaagcatttgtttctactttgatatgactgtttttcggacagtttatttgttgagagtgtgaccaaaagttacatgtttgcacctttctagttgaaaataaagtgtatattttttctataaaaaaaaaaaaaaaaa

SEQ ID NO: 774 - protein, 349 aa, Homo sapiens
MTAASMGPVRVAFVVLLALCSRPAVGQNCSGPCRCPDEPAPRCPAGVSLVLDGCGCCRVCAKQLGELCTERDPCDPHKGLFCDFGSPANRKIGVCTAKDGAPCIFGGTVYRSGESFQSSCKYQCTCLDGAVGCMPLCSMDVRLPSPDCPFPRRVKLPGKCCEEWVCDEPKDQTVVGPALAAYRLEDTFGPDPTMIRANCLVQTTEWSACSKTCGMGISTRVTNDNASCRLEKQSRLCMVRPCEADLEENIKKGKKCIRTPKISKPIKFELSGCTSMKTYRAKFCGVCTDGRCCTPHRTTTLPVEFKCPDGEVMKKNMMFIKTCACHYNCPGDNDIFESLYYRKMYGDMA

SEQ ID NO: 775 - DNA, 1558 bp, Homo sapiens
atggtccccgccgccgcggcccgagcggccgaggtgtccggccccggttcggggcgctgcccgtctccgggtctccgaattccagccaagaatcagtgtgctgatgctgcttgctttgaaaaggagagtagctcctgtgaactgaacctaacacaccagaatcaaggcagcatcattgtatctgcaagattaggggatgaccgtgacaaagtgatgcttgcggcaataaccagagccattgaaagacaacctggagccagacaggggccagccagatctcttttaaatgatgttattttaagtaccattgccacaaggccttctaatggtccttgggagcagactgctctgctggccctggccctgcccctgcaggatatcacccctgatgctgcctcaggagagccccacccagattctgcagggcccaccacaccctccagacctggtggtctccttctgggtagtgctgctgtaggcacagacctctgcctacgaccacagcttcagctgccaccagcgatgcctgggaagcttccagaggagggtccatatggcattgttctggattccattgtaacttcaagggaaactttcacaacgtctggagcccttgatatcctgcaaatgaaggaggaggatgtcctcaagtttcttgcagcagggacccaattaggtggcatcaacctcgacttccaaatggaacagtacacctataaaaggaaaagtgaaagcatctgcttcctaaatctgaacaggacctgggagaagcttcttctggcagctggcgccattgttgccattgaaaactgtgctgatgtcagtgtcacgccctccagaatactggccagtgggctgtgctgaagtttgctgctgccactggagtcactcctattgctggctgtttcattgtttcactcttgaaactttcactaaccagacccaggcagccttctgggagccatggctcttggcaattactgatcccagagctgaccaccagcctctcacagaggtgtcttatgctaacctgcctaccattgctttgggtcacacagattctcgtctgcgctgtggacattgccatcccctgcaacaacaagggcactcactcagtgggtctgatgtggaagatgccagcctggaagttctgcatatgcatggcaccatctcctgtgaacacccataggaggtcgtgcctgatctctatgtctacagagatcccaaggagattagaaagaaagagcaggctgctgctaaaaaagctgaggctaaggaggaatttcagggtgaagggactgccctggctcctgagtgtactgctactcagcctgaggttgcagcctgctttgaaggtgtgcaggtcacacaggtgccccctgtgtctgttcagcaggtccctactgaagactagagcactcagcctgccatggaagactggtccacagctcccactgcttgggccactgaatgggtatgaaaaaccactgagtggtcggtcttaagccattttccacaggctcctaagcaaaatggaaataaggttgttggaaaataa

SEQ ID NO: 776 - DNA, 6609 bp, Homo sapiens
ttcttttaaggagtttgccgcgagcgcgtctccttcattcgcaggctgggcgcgttcgcagtcggctggcggcgaaggaaggcgctctcgggacctcgcgggcgcgcgtcttttggctcttgcccctgtccctgcggcttggggaaggcgtaacccggcggctaggcgcgggagaagtgcggaggagccatgggcgccgggagctccaccgagcagcgcagcccggagcagccgcccgaggggagctccacgccggctgagcccgagcccagcggcggcggcccctcggccgaggcggcgccagacaccaccgcggaccccgccatcgctgcctcggaccccgccaccaagctcctacagaagaatggtcagctgtccaccatcaatggcgtagctgagcaagatgagctcagcctccaggagggtgacctaaatggccagaaaggagccctgaacggtcaaggagccctaaacagccaggaggaagaagaagtcattgtcacagaggttggacagagagactctgaagatgtgagcaaaagagactccgataaagagatggctactaagtcagcggttgttcacgacatcacagatgatgggcaggaggagacacccgaaataatcgaacagattccttcttcagaaagcaatttagaagagctaacacaacccactgagtcccaggctaatgatattggatttaagaaggtgtttaagtttgttggctttaaattcactgtgaaaaaggataagacagagaagcctgacactgtccagctactcactgtgaagaaagatgaaggggagggagcagcaggggctggcgaccacaaggaccccagccttggggctggagaagcagcatccaaagaaagcgaacccaaacaatctacagagaaacccgaagagaccctgaagcgtgagcaaagccacgcagaaatttctcccccagccgaatctggccaagcagtggaggaatgcaaagaggaaggagaagagaaacaagaaaaagaacctagcaagtctgcagaatctccgactagtcccgtgaccagtgaaacaggatcaaccttcaaaaaattcttcactcaaggttgggccggctggcgcaaaaagaccagtttcaggaagccgaaggaggatgaagtggaagcttcagagaagaaaaaggaacaagagccagaaaaagtagacacagaagaagacggaaaggcagaggttgcctccgagaaactgaccgcctccgagcaagcccacccacaggagccggcagaaagtgcccacgagccccggttatcagctgaatatgagaaagttgagctgccctcagaggagcaagtcagtggctcgcagggaccttctgaagagaaacctgctccgttggcgacagaagtgtttgatgagaaaatagaagtccaccaagaagaggttgtggccgaagtccacgtcagcaccgtggaggagagaaccgaagagcagaaaacggaggtggaagaaacagcagggtctgtgccagctgaagaattggttgaaatggatgcagaacctcaggaagctgaacctgccaaggagctggtgaagctcaaagaaacgtgtgtttccggagaggaccctacacagggagctgacctcagtcctgatgagaaggtgctgtccaaaccccccgaaggcgttgtgagtgaggtggaaatgctgtcatcacaggagagaatgaaggtgcagggaagtccactaaagaagctttttaccagcactggcttaaaaaagctttctggaaagaaacagaaagggaaaagaggaggaggagacgaggaatcaggggagcacactcaggttccagccgattctccggacagccaggaggagcaaaagggcgagagctctgcctcatcccctgaggagcccgaggagatcacgtgtctggaaaagggcttagccgaggtgcagcaggatggggaagctgaagaaggagctacttccgatggagagaaaaaaagagaaggtgtcactccctgggcatcattcaaaaagatggtgacgcccaagaagcgtgttagacggccttcggaaagtgataaagaagatgagctggacaaggtcaagagcgctaccttgtcttccaccgagagcacagcctctgaaatgcaagaagaaatgaaagggagcgtggaagagccaaagccggaagaaccaaagcgcaaggtggatacctcagtatcttgggaagctttaatttgtgtgggatcatccaagaaaagagcaaggagagggtcctcttctgatgaggaagggggaccaaaagcaatgggaggagaccaccagaaagctgatgaggccggaaaagacaaagagacggggacagacgggatccttgctggttcccaagaacatgatccagggcagggaagttcctccccggagcaagctggaagccctaccgaaggggagggcgtttccacctgggagtcatttaaaaggttagtcacgccaagaaaaaaatcaaagtccaagctggaagagaaaagcgaagactccatagctgggtctggtgtagaacattccactccagacactgaacccggtaaagaagaatcctgggtctcaatcaagaagtttattcctggacgaaggaagaaaaggccagatgggaaacaagaacaagcccctgttgaagacgcagggccaacaggggccaacgaagatgactctgatgtcccggccgtggtccctctgtctgagtatgatgctgtagaaagggagaaaatggaggcacagcaagcccaaaaaagcgcagagcagcccgagcagaaggcagccactgaggtgtccaaggagctcagcgagagtcaggttcatatgatggcagcagctgtcgctgacgggacgagggcagctaccattattgaagaaaggtctccttcttggatatctgcttcagtgacagaacctcttgaacaagtagaagctgaagccgcactgttaactgaggaggtattggaaagagaagtaattgcagaagaagaaccccccacggttactgaacctctgccagagaacagagaggcccggggcgacacggtcgttagtgaggcggaattgacccccgaagctgtgacagctgcagaaactgcagggccattgggtgccgaagaaggaaccgaagcatctgctgctgaagagaccacagaaatggtgtcagcagtctcccagttaaccgactccccagacaccacagaggaggccactccggtgcaggaggtggaaggtggcgtacctgacatagaagagcaagagaggcggactcaagaggtcctccaggcagtggcagaaaaagtgaaagaggaatcccagctgcctggcaccggtgggccagaagatgtgcttcagcctgtgcagagagcagaggcagaaagaccagaagagcaggctgaagcgtcgggtctgaagaaagagacggatgtagtgttgaaagtagatgctcaggaggcaaaaactgagccttttacacaagggaaggtggtggggcagaccaccccagaaagctttgaaaaagctcctcaagtcacagagagcatagagtccagtgagcttgtaaccacttgtcaagccgaaaccttagctggggtaaaatcacaggagatggtgatggaacaggctatcccccctgactcggtggaaacccctacagacagtgagactgatggaagcacccccgtagccgactttgacgcaccaggcacaacccagaaagacgagattgtggaaatccatgaggagaatgaggtcgcatctggtacccagtcagggggcacagaagcagaggcagttcctgcacagaaagagaggcctccagcaccttccagttttgtgttccaggaagaaactaaagaacaatcaaagatggaagacactctagagcatacagataaagaggtgtcagtggaaactgtatccattctgtcaaagactgaggggactcaagaggctgaccagtatgctgatgagaaaaccaaagacgtaccatttttcgaaggacttgaggggtctatagacacaggcataacagtcagtcgggaaaaggtcactgaagttgcccttaaaggtgaagggacagaagaagctgaatgtaaaaaggatgatgctcttgaactgcagagtcacgctaagtctcctccatcccccgtggagagagagatggtagttcaagtcgaaagggagaaaacagaagcagagccaacccatgtgaatgaagagaagcttgagcacgaaacagctgttaccgtatctgaagaggtcagtaagcagctcctccagacagtgaatgtgcccatcatagatggggcaaaggaagtcagcagtttggaaggaagccctcctccctgcctaggtcaagaggaggcagtatgcaccaaaattcaagttcagagctctgaggcatcattcactctaacagcggctgcagaggaggaaaaggtcttaggagaaactgccaacattttagaaacaggtgaaacgttggagcctgcaggtgcacatttagttctggaagagaaatcctctgaaaaaaatgaagactttgccgctcatccaggggaagatgctgtgcccacagggcccgactgtcaggcaaaatcgacaccagtgatagtatctgctactaccaagaaaggcttaagttccgacctggaaggagagaaaaccacatcactgaagtggaagtcagatgaagtcgatgagcaggttgcttgccaggaggtcaaagtgagtgtagcaattgaggatttagagcctgaaaatgggattttggaacttgagaccaaaagcagtaaacttgtccaaaacatcatccagacagccgttgaccagtttgtacgtacagaagaaacagccaccgaaatgttgacgtctgagttacagacacaagctcacgtgataaaagctgacagccaggacgctggacaggaaacggagaaagaaggagaggaacctcaggcctctgcacaggatgaaacaccaattacttcagccaaagaggagtcagagtcaaccgcagtgggacaagcacattctgatatttccaaagacatgagtgaagcctcagaaaagaccatgactgttgaggtagaaggttccactgtaaatgatcagcagctggaagaggtcgtcctcccatctgaggaagagggaggtggagctggaacaaagtctgtgccagaagatgatggtcatgccttgttagcagaaagaatagagaagtcactagttgaaccgaaagaagatgaaaaaggtgatgatgttgatgaccctgaaaaccagaactcagccctggctgatactgatgcctcaggaggcttaaccaaagagtccccagatacaaatggaccaaaacaaaaagagaaggaggatgcccaggaagtagaattgcaggaaggaaaagtgcacagtgaatcagataaagcgatcacaccccaagcacaggaggagttacagaaacaagagagagaatctgcaaagtcagaacttacagaatcttaaaacatcatgcagttaaactcattgtctgtttggaagaccagaatgtgaagacaagtagtagaagaaaatgaatgctgctgctgagactgaagaccagtatttcagaactttgagaattggagagcaggcacatcaactgatctcatttctagagagcccctgacaatcctgaggcttcatcaggagctagagccatttaacatttcctctttccaagaccaacctacaattttcccttgataaccatataaattctgatttaaggtcctaaattcttaacctggaactggagttggcaatacctagttctgcttctgaaactggagtatcattctttacatatttatatgtatgttttaagtagtcctcctgtatctattgtatatttttttcttaatgtttaaggaaatgtgcaggatactacatgctttttgtatcacacagtatatgatggggcatgtgccatagtgcaggcttggggagctttaagcctcagttatataacccacgaaaaacagagcctcctagatgtaacattcctgatcaaggtacaattctttaaaattcactaatgattgaggtccatatttagtggtactctgaaattggtcactttcctattacacggagtgtgctaaaactaaaaagcattttgaaacatacagaatgttctattgtcattgggaaatttttctttctaacccagtggaggttagaaagaagttatattctggtagcaaattaactttacatcctttttcctacttgttatggttgtttggaccgataagtgtgcttaatcctgaggcaaagtagtgaatatgttttatatgttatgaagaaaagaattgttgtaagtttttgattctactcttatatgctggactgcattcacacatggcatgaaataagtcaggttctttacaaatggtattttgatagatactggattgtgtttgtgccatatttgtgccattcttttaagaacaatgttgcaacacattcatttggataagttgtgatttgacgactgatttaaataaaatatttgcttcacttaaaaaaaaaaaa

SEQ ID NO: 777 - protein, 1782 aa, Homo sapiens
MGAGSSTEQRSPEQPPEGSSTPAEPEPSGGGPSAEAAPDTTADPAIAASDPATKLLQKNGQLSTINGVAEQDELSLQEGDLNGQKGALNGQGALNSQEEEEVIVTEVGQRDSEDVSKRDSDKEMATKSAVVHDITDDGQEETPEIIEQIPSSESNLEELTQPTESQANDIGFKKVFKFVGFKFTVKKDKTEKPDTVQLLTVKKDEGEGAAGAGDHKDPSLGAGEAASKESEPKQSTEKPEETLKREQSHAEISPPAESGQAVEECKEEGEEKQEKEPSKSAESPTSPVTSETGSTFKKFFTQGWAGWRKKTSFRKPKEDEVEASEKKKEQEPEKVDTEEDGKAEVASEKLTASEQAHPQEPAESAHEPRLSAEYEKVELPSEEQVSGSQGPSEEKPAPLATEVFDEKIEVHQEEVVAEVHVSTVEERTEEQKTEVEETAGSVPAEELVEMDAEPQEAEPAKELVKLKETCVSGEDPTQGADLSPDEKVLSKPPEGVVSEVEMLSSQERMKVQGSPLKKLFTSTGLKKLSGKKQKGKRGGGDEESGEHTQVPADSPDSQEEQKGESSASSPEEPEEITCLEKGLAEVQQDGEAEEGATSDGEKKREGVTPWASFKKMVTPKKRVRRPSESDKEDELDKVKSATLSSTESTASEMQEEMKGSVEEPKPEEPKRKVDTSVSWEALICVGSSKKRARRGSSSDEEGGPKAMGGDHQKADEAGKDKETGTDGILAGSQEHDPGQGSSSPEQAGSPTEGEGVSTWESFKRLVTPRKKSKSKLEEKSEDSIAGSGVEHSTPDTEPGKEESWVSIKKFIPGRRKKRPDGKQEQAPVEDAGPTGANEDDSDVPAVVPLSEYDAVEREKMEAQQAQKSAEQPEQKAATEVSKELSESQVHMMAAAVADGTRAATIIEERSPSWISASVTEPLEQVEAEAALLTEEVLEREVIAEEEPPTVTEPLPENREARGDTVVSEAELTPEAVTAAETAGPLGAEEGTEASAAEETTEMVSAVSQLTDSPDTTEEATPVQEVEGGVPDIEEQERRTQEVLQAVAEKVKEESQLPGTGGPEDVLQPVQRAEAERPEEQAEASGLKKETDVVLKVDAQEAKTEPFTQGKVVGQTTPESFEKAPQVTESIESSELVTTCQAETLAGVKSQEMVMEQAIPPDSVETPTDSETDGSTPVADFDAPGTTQKDEIVEIHEENEVASGTQSGGTEAEAVPAQKERPPAPSSFVFQEETKEQSKMEDTLEHTDKEVSVETVSILSKTEGTQEADQYADEKTKDVPFFEGLEGSIDTGITVSREKVTEVALKGEGTEEAECKKDDALELQSHAKSPPSPVEREMVVQVEREKTEAEPTHVNEEKLEHETAVTVSEEVSKQLLQTVNVPIIDGAKEVSSLEGSPPPCLGQEEAVCTKIQVQSSEASFTLTAAAEEEKVLGETANILETGETLEPAGAHLVLEEKSSEKNEDFAAHPGEDAVPTGPDCQAKSTPVIVSATTKKGLSSDLEGEKTTSLKWKSDEVDEQVACQEVKVSVAIEDLEPENGILELETKSSKLVQNIIQTAVDQFVRTEETATEMLTSELQTQAHVIKADSQDAGQETEKEGEEPQASAQDETPITSAKEESESTAVGQAHSDISKDMSEASEKTMTVEVEGSTVNDQQLEEVVLPSEEEGGGAGTKSVPEDDGHALLAERIEKSLVEPKEDEKGDDVDDPENQNSALADTDASGGLTKESPDTNGPKQKEKEDAQEVELQEGKVHSESDKAITPQAQEELQKQERESAKSELTES

SEQ ID NO: 778 - DNA, 6287 bp, Homo sapiens
ggcagctccgagggcacctccggttctcccccatcctccgggagtgtctgggcgctcagtccgctctgatcccgccgaaaccacctgcggttggcaggcaggagactaggcgtctgccggggagggcagggacccgctaagctgatctcctgtacagtagtgctacttaaaatatgctggggaccatcaccatcacagttggacagagagactctgaagatgtgagcaaaagagactccgataaagagatggctactaagtcagcggttgttcacgacatcacagatgatgggcaggaggagacacccgaaataatcgaacagattccttcttcagaaagcaatttagaagagctaacacaacccactgagtcccaggctaatgatattggatttaagaaggtgtttaagtttgttggctttaaattcactgtgaaaaaggataagacagagaagcctgacactgtccagctactcactgtgaagaaagatgaaggggagggagcagcaggggctggcgaccacaaggaccccagccttggggctggagaagcagcatccaaagaaagcgaacccaaacaatctacagagaaacccgaagagaccctgaagcgtgagcaaagccacgcagaaatttctcccccagccgaatctggccaagcagtggaggaatgcaaagaggaaggagaagagaaacaagaaaaagaacctagcaagtctgcagaatctccgactagtcccgtgaccagtgaaacaggatcaaccttcaaaaaattcttcactcaaggttgggccggctggcgcaaaaagaccagtttcaggaagccgaaggaggatgaagtggaagcttcagagaagaaaaaggaacaagagccagaaaaagtagacacagaagaagacggaaaggcagaggttgcctccgagaaactgaccgcctccgagcaagcccacccacaggagccggcagaaagtgcccacgagccccggttatcagctgaatatgagaaagttgagctgccctcagaggagcaagtcagtggctcgcagggaccttctgaagagaaacctgctccgttggcgacagaagtgtttgatgagaaaatagaagtccaccaagaagaggttgtggccgaagtccacgtcagcaccgtggaggagagaaccgaagagcagaaaacggaggtggaagaaacagcagggtctgtgccagctgaagaattggttgaaatggatgcagaacctcaggaagctgaacctgccaaggagctggtgaagctcaaagaaacgtgtgtttccggagaggaccctacacagggagctgacctcagtcctgatgagaaggtgctgtccaaaccccccgaaggcgttgtgagtgaggtggaaatgctgtcatcacaggagagaatgaaggtgcagggaagtccactaaagaagctttttaccagcactggcttaaaaaagctttctggaaagaaacagaaagggaaaagaggaggaggagacgaggaatcaggggagcacactcaggttccagccgattctccggacagccaggaggagcaaaagggcgagagctctgcctcatcccctgaggagcccgaggagatcacgtgtctggaaaagggcttagccgaggtgcagcaggatggggaagctgaagaaggagctacttccgatggagagaaaaaaagagaaggtgtcactccctgggcatcattcaaaaagatggtgacgcccaagaagcgtgttagacggccttcggaaagtgataaagaagatgagctggacaaggtcaagagcgctaccttgtcttccaccgagagcacagcctctgaaatgcaagaagaaatgaaagggagcgtggaagagccaaagccggaagaaccaaagcgcaaggtggatacctcagtatcttgggaagctttaatttgtgtgggatcatccaagaaaagagcaaggagagggtcctcttctgatgaggaagggggaccaaaagcaatgggaggagaccaccagaaagctgatgaggccggaaaagacaaagagacggggacagacgggatccttgctggttcccaagaacatgatccagggcagggaagttcctccccggagcaagctggaagccctaccgaaggggagggcgtttccacctgggagtcatttaaaaggttagtcacgccaagaaaaaaatcaaagtccaagctggaagagaaaagcgaagactccatagctgggtctggtgtagaacattccactccagacactgaacccggtaaagaagaatcctgggtctcaatcaagaagtttattcctggacgaaggaagaaaaggccagatgggaaacaagaacaagcccctgttgaagacgcagggccaacaggggccaacgaagatgactctgatgtcccggccgtggtccctctgtctgagtatgatgctgtagaaagggagaaaatggaggcacagcaagcccaaaaaagcgcagagcagcccgagcagaaggcagccactgaggtgtccaaggagctcagcgagagtcaggttcatatgatggcagcagctgtcgctgacgggacgagggcagctaccattattgaagaaaggtctccttcttggatatctgcttcagtgacagaacctcttgaacaagtagaagctgaagccgcactgttaactgaggaggtattggaaagagaagtaattgcagaagaagaaccccccacggttactgaacctctgccagagaacagagaggcccggggcgacacggtcgttagtgaggcggaattgacccccgaagctgtgacagctgcagaaactgcagggccattgggtgccgaagaaggaaccgaagcatctgctgctgaagagaccacagaaatggtgtcagcagtctcccagttaaccgactccccagacaccacagaggaggccactccggtgcaggaggtggaaggtggcgtacctgacatagaagagcaagagaggcggactcaagaggtcctccaggcagtggcagaaaaagtgaaagaggaatcccagctgcctggcaccggtgggccagaagatgtgcttcagcctgtgcagagagcagaggcagaaagaccagaagagcaggctgaagcgtcgggtctgaagaaagagacggatgtagtgttgaaagtagatgctcaggaggcaaaaactgagccttttacacaagggaaggtggtggggcagaccaccccagaaagctttgaaaaagctcctcaagtcacagagagcatagagtccagtgagcttgtaaccacttgtcaagccgaaaccttagctggggtaaaatcacaggagatggtgatggaacaggctatcccccctgactcggtggaaacccctacagacagtgagactgatggaagcacccccgtagccgactttgacgcaccaggcacaacccagaaagacgagattgtggaaatccatgaggagaatgaggtcgcatctggtacccagtcagggggcacagaagcagaggcagttcctgcacagaaagagaggcctccagcaccttccagttttgtgttccaggaagaaactaaagaacaatcaaagatggaagacactctagagcatacagataaagaggtgtcagtggaaactgtatccattctgtcaaagactgaggggactcaagaggctgaccagtatgctgatgagaaaaccaaagacgtaccatttttcgaaggacttgaggggtctatagacacaggcataacagtcagtcgggaaaaggtcactgaagttgcccttaaaggtgaagggacagaagaagctgaatgtaaaaaggatgatgctcttgaactgcagagtcacgctaagtctcctccatcccccgtggagagagagatggtagttcaagtcgaaagggagaaaacagaagcagagccaacccatgtgaatgaagagaagcttgagcacgaaacagctgttaccgtatctgaagaggtcagtaagcagctcctccagacagtgaatgtgcccatcatagatggggcaaaggaagtcagcagtttggaaggaagccctcctccctgcctaggtcaagaggaggcagtatgcaccaaaattcaagttcagagctctgaggcatcattcactctaacagcggctgcagaggaggaaaaggtcttaggagaaactgccaacattttagaaacaggtgaaacgttggagcctgcaggtgcacatttagttctggaagagaaatcctctgaaaaaaatgaagactttgccgctcatccaggggaagatgctgtgcccacagggcccgactgtcaggcaaaatcgacaccagtgatagtatctgctactaccaagaaaggcttaagttccgacctggaaggagagaaaaccacatcactgaagtggaagtcagatgaagtcgatgagcaggttgcttgccaggaggtcaaagtgagtgtagcaattgaggatttagagcctgaaaatgggattttggaacttgagaccaaaagcagtaaacttgtccaaaacatcatccagacagccgttgaccagtttgtacgtacagaagaaacagccaccgaaatgttgacgtctgagttacagacacaagctcacgtgataaaagctgacagccaggacgctggacaggaaacggagaaagaaggagaggaacctcaggcctctgcacaggatgaaacaccaattacttcagccaaagaggagtcagagtcaaccgcagtgggacaagcacattctgatatttccaaagacatgagtgaagcctcagaaaagaccatgactgttgaggtagaaggttccactgtaaatgatcagcagctggaagaggtcgtcctcccatctgaggaagagggaggtggagctggaacaaagtctgtgccagaagatgatggtcatgccttgttagcagaaagaatagagaagtcactagttgaaccgaaagaagatgaaaaaggtgatgatgttgatgaccctgaaaaccagaactcagccctggctgatactgatgcctcaggaggcttaaccaaagagtccccagatacaaatggaccaaaacaaaaagagaaggaggatgcccaggaagtagaattgcaggaaggaaaagtgcacagtgaatcagataaagcgatcacaccccaagcacaggaggagttacagaaacaagagagagaatctgcaaagtcagaacttacagaatcttaaaacatcatgcagttaaactcattgtctgtttggaagaccagaatgtgaagacaagtagtagaagaaaatgaatgctgctgctgagactgaagaccagtatttcagaactttgagaattggagagcaggcacatcaactgatctcatttctagagagcccctgacaatcctgaggcttcatcaggagctagagccatttaacatttcctctttccaagaccaacctacaattttcccttgataaccatataaattctgatttaaggtcctaaattcttaacctggaactggagttggcaatacctagttctgcttctgaaactggagtatcattctttacatatttatatgtatgttttaagtagtcctcctgtatctattgtatatttttttcttaatgtttaaggaaatgtgcaggatactacatgctttttgtatcacacagtatatgatggggcatgtgccatagtgcaggcttggggagctttaagcctcagttatataacccacgaaaaacagagcctcctagatgtaacattcctgatcaaggtacaattctttaaaattcactaatgattgaggtccatatttagtggtactctgaaattggtcactttcctattacacggagtgtgctaaaactaaaaagcattttgaaacatacagaatgttctattgtcattgggaaatttttctttctaacccagtggaggttagaaagaagttatattctggtagcaaattaactttacatcctttttcctacttgttatggttgtttggaccgataagtgtgcttaatcctgaggcaaagtagtgaatatgttttatatgttatgaagaaaagaattgttgtaagtttttgattctactcttatatgctggactgcattcacacatggcatgaaataagtcaggttctttacaaatggtattttgatagatactggattgtgtttgtgccatatttgtgccattcttttaagaacaatgttgcaacacattcatttggataagttgtgatttgacgactgatttaaataaaatatttgcttcactt

SEQ ID NO: 779 - protein, 1684 aa, Homo sapiens
MLGTITITVGQRDSEDVSKRDSDKEMATKSAVVHDITDDGQEETPEIIEQIPSSESNLEELTQPTESQANDIGFKKVFKFVGFKFTVKKDKTEKPDTVQLLTVKKDEGEGAAGAGDHKDPSLGAGEAASKESEPKQSTEKPEETLKREQSHAEISPPAESGQAVEECKEEGEEKQEKEPSKSAESPTSPVTSETGSTFKKFFTQGWAGWRKKTSFRKPKEDEVEASEKKKEQEPEKVDTEEDGKAEVASEKLTASEQAHPQEPAESAHEPRLSAEYEKVELPSEEQVSGSQGPSEEKPAPLATEVFDEKIEVHQEEVVAEVHVSTVEERTEEQKTEVEETAGSVPAEELVEMDAEPQEAEPAKELVKLKETCVSGEDPTQGADLSPDEKVLSKPPEGVVSEVEMLSSQERMKVQGSPLKKLFTSTGLKKLSGKKQKGKRGGGDEESGEHTQVPADSPDSQEEQKGESSASSPEEPEEITCLEKGLAEVQQDGEAEEGATSDGEKKREGVTPWASFKKMVTPKKRVRRPSESDKEDELDKVKSATLSSTESTASEMQEEMKGSVEEPKPEEPKRKVDTSVSWEALICVGSSKKRARRGSSSDEEGGPKAMGGDHQKADEAGKDKETGTDGILAGSQEHDPGQGSSSPEQAGSPTEGEGVSTWESFKRLVTPRKKSKSKLEEKSEDSIAGSGVEHSTPDTEPGKEESWVSIKKFIPGRRKKRPDGKQEQAPVEDAGPTGANEDDSDVPAVVPLSEYDAVEREKMEAQQAQKSAEQPEQKAATEVSKELSESQVHMMAAAVADGTRAATIIEERSPSWISASVTEPLEQVEAEAALLTEEVLEREVIAEEEPPTVTEPLPENREARGDTVVSEAELTPEAVTAAETAGPLGAEEGTEASAAEETTEMVSAVSQLTDSPDTTEEATPVQEVEGGVPDIEEQERRTQEVLQAVAEKVKEESQLPGTGGPEDVLQPVQRAEAERPEEQAEASGLKKETDVVLKVDAQEAKTEPFTQGKVVGQTTPESFEKAPQVTESIESSELVTTCQAETLAGVKSQEMVMEQAIPPDSVETPTDSETDGSTPVADFDAPGTTQKDEIVEIHEENEVASGTQSGGTEAEAVPAQKERPPAPSSFVFQEETKEQSKMEDTLEHTDKEVSVETVSILSKTEGTQEADQYADEKTKDVPFFEGLEGSIDTGITVSREKVTEVALKGEGTEEAECKKDDALELQSHAKSPPSPVEREMVVQVEREKTEAEPTHVNEEKLEHETAVTVSEEVSKQLLQTVNVPIIDGAKEVSSLEGSPPPCLGQEEAVCTKIQVQSSEASFTLTAAAEEEKVLGETANILETGETLEPAGAHLVLEEKSSEKNEDFAAHPGEDAVPTGPDCQAKSTPVIVSATTKKGLSSDLEGEKTTSLKWKSDEVDEQVACQEVKVSVAIEDLEPENGILELETKSSKLVQNIIQTAVDQFVRTEETATEMLTSELQTQAHVIKADSQDAGQETEKEGEEPQASAQDETPITSAKEESESTAVGQAHSDISKDMSEASEKTMTVEVEGSTVNDQQLEEVVLPSEEEGGGAGTKSVPEDDGHALLAERIEKSLVEPKEDEKGDDVDDPENQNSALADTDASGGLTKESPDTNGPKQKEKEDAQEVELQEGKVHSESDKAITPQAQEELQKQERESAKSELTES

SEQ ID NO: 780 - DNA, 10835 bp, Homo sapiens
caaaaatcagtctgatctcgggaaacctggagaaatttattttctgtactctaatgttctttcattttggtgaccatcaaggtgctgggagaggaattagatggctgtaattcaaagttaatggaattagatgcagcagtacagaaattcttggaacagaatggccaactgggtaagccactggccaagaagataggaaaactgactgaacttcaccagcagaccattagacaagctgagaatcggctctccaagctcaatcaggcagcatcacatttagaagaatacaatgaaatgcttgaattaattttgaagtggattgaaaaagctaaagtcttggctcatggaactattgcatggaattctgcaagccagcttcgggaacaatatattttgcatcagaccctgctagaagaatccaaagaaattgacagtgagctggaagcaatgactgagaaattacagtacctcactagcgtgtactgtacagaaaaaatgtctcagcaagtggcagaactgggacgggagactgaggagttgcgacagatgatcaaaattcgtttgcagaacctccaagatgcagctaaggatatgaaaaaatttgaagcagagttgaaaaagttacaagctgccttggagcaagcccaggcaacactgacttctccagaagttggacgtctcagtctcaaggagcagctctctcatcggcagcatttgttgtctgagatggagtcactgaagccgaaggtgcaagcagtgcagctctgccagagtgccctccggatccccgaggatgtggttgccagcttacctctctgtcatgctgctctgcggctgcaggaagaggccagccggctgcagcacaccgccatccagcagtgtaacatcatgcaggcagctgtggtacaatatgaacaatatgagcaagaaatgaaacatctccagcaactgatagaaggagctcacagagagattgaggataaacctgttgccaccagtaacatacaggagctgcaggctcagatttctcggcatgaggagctggcgcagaaaattaagggctaccaggagcagatcgcttctttgaattccaagtgcaagatgctgacgatgaaagccaagcacgccaccatgctgctgacggtgaccgaggtcgaggggctggcggaagggacagaggacctggatggggagctcctccccacgccttcggcccacccctctgtggtcatgatgactgcaggtcgctgtcacactttgctgtcaccggtcactgaggagtctggggaggagggaaccaacagtgagatttcctctccacctgcctgtcgctccccttcacctgtggctaatacagatgcttctgttaaccaggacattgcatattaccaagccttgtctgctgagaggttgcagacagatgctgcaaaaattcaccccagcacatccgcatcccaggagttctatgaaccgggattggagccatccgctactgccaaactgggtgatttgcagcgttcttgggaaaccttaaagaatgtgatcagtgagaagcagcgcacactctatgaagctttggaacgccagcagaagtaccaggactccctccagtccatctctacgaagatggaggccattgagctgaaactcagtgagagcccagagcctggcaggagtccagaaagccagatggctgaacatcaggcattgatggatgagattctcatgctccaggatgaaatcaatgagctccagtcctctctcgcagaggagctggtatccgagtcttgtgaggccgaccctgcggagcagctggccttgcagtccacgctcactgtcttagccgagcgaatgtccaccatcaggatgaaagcctcggggaaacggcagcttttggaggagaagttgaatgatcagctggaggaacaaaggcaggaacaggccctgcagaggtatcgctgtgaagccgatgagctggacagctggctcttgagtaccaaggccactctggacactgcgctgagtccacccaaggagcccatggacatggaggcccagcttatggactgccagaatatgctggtggaaatagagcagaaggtggtggctttatcagaactgtcagtccacaatgagaacctgctgctggagggcaaagctcacaccaaggacgaggccgagcagctggctggaaagctgagaaggctcaaggggagcctgctggagctgcagagagccctgcatgataagcagctcaacatgcagggaacagcacaggagaaggaggagagcgatgttgacctaacagccacgcagagccccggcgtccaggaatggctggcccaagctcgcaccacatggacccagcagcggcagagcagtctccagcaacaaaaagagttagaacaggaattagccgagcagaagagtctccttcgctcagtagccagtcgtggagaggagattctaattcaacattcggcggcagagacctctggtgatgctggcgaaaaacctgatgtgttatcccaggagttggggatggaaggggagaaatcatccgctgaagaccagatgagaatgaaatgggaaagcctacatcaagaatttagtaccaagcagaaactactacagaatgttctggaacaggaacaagagcaagtgctttatagcaggccaaatcgactcttgtctggtgtgccactgtacaaaggggacgtgccaacccaagataaatctgcagttacatctttgctggatggactgaaccaagccttcgaggaggtttcatcccagagtggaggggcaaagaggcagagtatacacttggagcagaagttgtatgatggagtctcagccacctctacttggttggatgacgttgaagaacgtttatttgttgccacagcacttttaccagaagaaacagagacttgtctcttcaaccaagagattcttgccaaagacattaaggaaatgtctgaagaaatggataagaacaaaaacttgttttcccaagcttttccagagaatggtgataatcgagatgttattgaagatactttgggttgtcttttgggcaggttatccttgctagactcagtagtgaatcaacgatgtcatcagatgaaagaaagacttcagcaaatactaaatttccagaatgatctgaaagtgctgtttacatcactggctgacaacaaatacatcattctgcaaaaactggcaaatgtgtttgaacagcccgtagcagaacaaatagaggcaatacaacaggctgaagatggactcaaagaatttgatgcaggaatcattgaattaaagaggcgtggtgacaagctacaggtcgagcagccgtccatgcaagaactctccaagctccaggacatgtatgatgagctgatgatgatcattggctcccggaggagtggtctgaatcagaaccttacactcaagagtcagtatgagagggccctacaagatctggctgacctgctagaaactggtcaggagaagatggcaggagaccagaaaatcatcgtgtcttccaaagaggaaatccagcaactacttgacaaacataaggaatactttcagggcctggaatctcatatgatcttgactgaaacactcttcagaaagataatcagctttgcagtccaaaaggaaacccagttccatacagagctgatggctcaggcttctgctgtactgaaacgggctcacaagaggggtgtggagctggagtacattctagagacgtggtcccatctggatgaggaccagcaggagctcagcagacagctggaggtggtggaaagcagcatcccaagcgtgggtctggtggaggagaacgaggacaggcttattgaccgcataacactctaccagcatttaaaatctagccttaatgaataccagcccaaattatatcaagtattagatgatgggaaacgacttctgatatccatcagctgctcagatctagaaagccaactaaatcaacttggagagtgctggctaagtaacaccaataaaatgtctaaggaacttcacagactggaaacaatattgaaacactggaccagatatcaaagtgaatctgcagatctaattcactggttacaatctgcaaaagaccggctagaattttggactcagcaatctgtgacagtcccacaagagctggaaatggtccgtgatcatctaaatgctttcctggagttttctaaagaagtggatgcccaatcttccctgaaatcatctgttctgagtactggaaatcagctccttcgactaaaaaaggtggacacagccacgctgcgctctgagctgtcgcgcattgatagccagtggactgacctgctaaccaatatcccagccgtccaggagaagctccaccagctccagatggataaactgccttcccgccatgccatttctgaagtcatgagttggatttctctaatggaaaatgttattcagaaggatgaagataatattaaaaattccataggttacaaggcaattcatgaataccttcagaaatataagggttttaagatagacattaactgtaaacagctgacagtggattttgtgaaccagtccgtgctacaaatcagcagtcaggatgtggaaagtaagcgtagtgataagactgattttgctgagcaacttggagcaatgaataaaagttggcaaattctgcaaggtctagtaactgagaagatccagctgttggaaggcttattggaatcttggtcagaatatgaaaataatgtacaatgtctgaaaacatggtttgaaacccaggaaaagagactaaaacaacagcatcgaattggagatcaggcttctgttcaaaatgcactgaaagactgtcaggatctggaagatttgattaaagcaaaagaaaaagaagtagagaaaattgagcagaatggacttgctttgattcagaacaagaaagaagacgtctctagcattgtcatgagcacactgcgagagctcggccaaacctgggcaaatttagatcacatggttggacaattaaagatactgctgaaatcagtgcttgaccaatggagtagtcacaaagtggcctttgacaagataaacagttacctcatggaggccagatactctctttcccgattccgtctgctgactggctccttagaagctgtgcaagttcaggtggacaatcttcagaatctccaagatgatctggaaaaacaggaaaggagcttacagaaatttggctctatcaccaaccaattattaaaagagtgtcacccacccgtgacagaaactcttaccaatacactgaaagaagtcaacatgagatggaataacttgctggaagagattgctgagcagctacagtccagcaaggccctacttcagctttggcaaagatacaaggactactccaaacagtgtgcttcgacagttcagcagcaggaggatcgaaccaatgagctgttgaaggcagccacaaacaaggacattgccgatgatgaggttgccacatggattcaagattgcaacgacctcctcaaaggactgggcacagttaaagattccctcttttttctccatgagctgggagagcaactgaagcaacaagtggatgcttccgcagcatcagctattcaatcggatcaactctctttgagtcaacacttgtgtgccctggagcaagctctctgcaaacagcagacttcattacaggctggagttcttgattatgaaacctttgccaagagtttagaagctttggaggcctggatagtggaagctgaagaaatactacaagggcaggaccctagccactcatctgacctctccacaatccaggaaaggatggaagaacttaagggacagatgttaaaattcagcagcatggctccagatttagaccgtctaaatgagcttggatataggttacccttgaatgataaggaaatcaaaagaatgcagaatctgaaccgccattggtctctgatctcctctcagactacagaaagattcagcaagttgcagtcatttttgctacaacatcagactttcttggaaaaatgtgaaacatggatggaattcctagttcagacagaacaaaagttagcagtagagatttcaggaaattatcagcaccttttggaacagcagagagcacacgagttgtttcaagccgagatgttcagtcgtcagcagattttgcactcaatcattattgatgggcaacgtcttctagaacaaggtcaagttgatgacagggatgaattcaacctgaaattgacactcctcagtaatcaatggcagggagtgattcgcagggcccagcagaggcgggggatcattgacagccagattcgccagtggcagcgctatagggagatggcagaaaagcttcgtaaatggttggttgaagtgtcctacctccccatgagtggtctcggaagtgttcctataccactgcaacaagcaaggaccctctttgatgaagtgcagttcaaagaaaaagtgtttctgcggcaacaaggcagctacatcctgactgtggaggctggcaagcaactccttctctcggcggacagtggcgctgaggccgccttgcaggccgaactcgctgaaatccaagagaaatggaaatcagccagcatgcggctggaagaacagaagaaaaaactagccttcttgttgaaagactgggaaaaatgtgagaaaggaatagcagattccctggagaaactacgaactttcaaaaagaagctttcgcagtctctcccggatcaccatgaagagctccatgcagaacaaatgcgttgcaaggaattagaaaatgcagttgggagctggacagatgacttgacccagttgagcctgctgaaggacaccctctctgcctatatcagtgctgatgatatctccattcttaatgaacgcgtagagcttctgcaaaggcagtgggaagaactatgccaccagctctccttaaggcggcagcaaataggtgaaagattgaatgaatgggcagtcttcagtgaaaagaacaaggaactctgtgagtggttgactcaaatggaaagcaaagtttctcagaatggagacattctcattgaagaaatgatagagaagctcaagaaggattatcaagaggaaattgctattgctcaagagaacaaaatacagctccaacaaatgggagaacgacttgctaaagccagccatgaaagcaaagcatctgagattgaatacaagctgggaaaggtcaacgaccggtggcagcatctcctggacctcattgcagccagggtgaagaagctgaaggagaccctggtagccgtgcagcagcttgataagaacatgagcagcctgaggacctggctcgctcacatcgagtcagagctggccaagccaatagtctacgattcctgtaactcggaagaaatacagagaaagcttaatgagcagcaggagcttcagagagacatagagaagcacagtacaggtgttgcatctgtcctcaacctgtgtgaagtcctgctgcacgactgtgacgcctgtgccactgatgccgagtgtgactctatacagcaggctacgagaaacctggaccggcggtggagaaacatttgtgctatgtccatggaaaggaggctgaaaatcgaagagacgtggcgattgtggcagaaatttctggatgactattcacgttttgaagattggctgaagtcttcagaaaggacagctgcttttcccagctcttctggggtgatctatacagttgccaaggaagaactaaagaaatttgaggctttccagcgacaggtccacgagtgcctgacgcagctggaactgatcaacaagcagtaccgccgcctggccagggagaaccgcactgattcagcatgtagcctcaaacagatggttcacgaaggcaaccagagatgggacaacctgcaaaagcgtgtcacctccatcttgcgcagactcaagcattttattggccagcgtgaggagtttgagactgcgcgggacagcattctggtctggctcacagagatggatctgcagctcactaatattgaacatttttctgagtgtgatgttcaagctaaaataaagcaactcaaggccttccagcaggaaatttcactgaaccacaataagattgagcagataattgcccaaggagaacagctgatagaaaagagtgagcccttggatgcagcgatcatcgaggaggaactagatgagctccgacggtactgccaggaggtcttcgggcgtgtggaaagataccataagaaactgatccgcctgcctctcccagacgatgagcacgacctctcagacagggagctggagctggaagactctgcagctctgtcggacctgcactggcacgaccgctctgcagacagcctgctttctccacagccttcctccaatctctccctctcgctcgctcagcccctccggagcgagcggtcaggacgagacaccccggctagtgtggactccatccccctggagtgggatcacgactatgacctcagtcgggacctggagtctgcaatgtccagagctctgccctctgaggatgaagaaggtcaggatgacaaagatttctacctccggggagctgttggcttatcaggggaccacagtgccctagagtcacagatccgacaactgggcaaagccctggatgatagccgttttcagatacagcaaaccgaaaatatcattcgcagcaaaactcccacggggccggagctagacaccagctacaaaggctacatgaaactgctgggcgaatgcagtagcagtatagactccgtgaagagactggagcacaaactgaaggaggaagaggagagccttcctggctttgttaacctgcatagtaccgaaacccaaacggctggtgtgattgaccgatgggagcttctccaggcccaggcattgagcaaggagttgaggatgaagcagaacctccagaagtggcagcagtttaactcagacttgaacagcatctgggcctggctgggggacacggaggaggagttggaacagctccagcgtctggaactcagcactgacatccagaccatcgagctccagatcaaaaagctcaaggagctccagaaagctgtggaccaccgcaaagccatcatcctctccatcaatctctgcagccctgagttcacccaggctgacagcaaggagagccgggacctgcaggatcgcttgtcgcagatgaatgggcgctgggaccgagtgtgctctctgctggaggagtggcggggcctgctgcaggatgccctgatgcagtgccagggtttccatgaaatgagccatggtttgcttcttatgctggagaacattgacagaaggaaaaatgaaattgtccctattgattctaaccttgatgcagagatacttcaggaccatcacaaacagcttatgcaaataaagcatgagctgttggaatcccaactcagagtagcctctttgcaagacatgtcttgccaactactggtgaatgctgaaggaacagactgtttagaagccaaagaaaaagtccatgttattggaaatcggctcaaacttctcttgaaggaggtcagtcgtcatatcaaggaactggagaagttattagacgtgtcaagtagtcagcaggatttgtcttcctggtcttctgctgatgaactggacacctcagggtctgtgagtcccacatcaggaaggagcaccccaaacagacagaaaacgccacgaggcaagtgtagtctctcacagcctggaccctctgtcagcagtccacatagcaggtccacaaaaggtggctccgattcctccctttctgagccagggccaggtcggtccggccgcggcttcctgttcagagtcctccgagcagctcttccccttcagcttctcctgctcctcctcatcgggcttgcctgccttgtaccaatgtcagaggaagactacagctgtgccctctccaacaactttgcccggtcattccaccccatgctcagatacacgaatggccctcctccactctgaactaagcagatgccatctgcagaagtgctggtagcataaggaggatcgggtcataagcaatcccaaactaccaacaagaggaccttgatcttggcgaaagccctcggtgtggcagctttagccctcctccagatcacatgtgtgcaaattatggcttcagaggtggaagataaacagtgacgggggaacaaacagacaacaagaaggtttggaagaaatctggtttgagactctgaaccttagcactaaggagattgagtaaggacctccaaagttccccggactcatgaattctgggcccttggcccattctgtgcacagccaaggacttcagtagaccatctgggcagctttcccatggtgctgctccaaccatcagataaatgaccctcccaagcaccatgtcagtgtcgtacaatctaccaaccaaccagtgctgaagagattttagaaccttgtaacatacaatttttaagagcttatatggcagcttcctttttaccttgttttcctttggggcatgatgttttaacctttgctttagaagcacaagctgtaaatctaaaaggcacttttttttagaggtataaagaaaaactagatgtaataaataagatcatggaaggctttatgtgaaaaaagttgaatgttatagtaaaaaaaaaaagatatttatgtatgtacagtttgctaaagccaagttttgtttgtattgatttctttgcatttattatagatattataaaata

SEQ ID NO: 781 - protein, 3321 aa, Homo sapiens
MELDAAVQKFLEQNGQLGKPLAKKIGKLTELHQQTIRQAENRLSKLNQAASHLEEYNEMLELILKWIEKAKVLAHGTIAWNSASQLREQYILHQTLLEESKEIDSELEAMTEKLQYLTSVYCTEKMSQQVAELGRETEELRQMIKIRLQNLQDAAKDMKKFEAELKKLQAALEQAQATLTSPEVGRLSLKEQLSHRQHLLSEMESLKPKVQAVQLCQSALRIPEDVVASLPLCHAALRLQEEASRLQHTAIQQCNIMQAAVVQYEQYEQEMKHLQQLIEGAHREIEDKPVATSNIQELQAQISRHEELAQKIKGYQEQIASLNSKCKMLTMKAKHATMLLTVTEVEGLAEGTEDLDGELLPTPSAHPSVVMMTAGRCHTLLSPVTEESGEEGTNSEISSPPACRSPSPVANTDASVNQDIAYYQALSAERLQTDAAKIHPSTSASQEFYEPGLEPSATAKLGDLQRSWETLKNVISEKQRTLYEALERQQKYQDSLQSISTKMEAIELKLSESPEPGRSPESQMAEHQALMDEILMLQDEINELQSSLAEELVSESCEADPAEQLALQSTLTVLAERMSTIRMKASGKRQLLEEKLNDQLEEQRQEQALQRYRCEADELDSWLLSTKATLDTALSPPKEPMDMEAQLMDCQNMLVEIEQKVVALSELSVHNENLLLEGKAHTKDEAEQLAGKLRRLKGSLLELQRALHDKQLNMQGTAQEKEESDVDLTATQSPGVQEWLAQARTTWTQQRQSSLQQQKELEQELAEQKSLLRSVASRGEEILIQHSAAETSGDAGEKPDVLSQELGMEGEKSSAEDQMRMKWESLHQEFSTKQKLLQNVLEQEQEQVLYSRPNRLLSGVPLYKGDVPTQDKSAVTSLLDGLNQAFEEVSSQSGGAKRQSIHLEQKLYDGVSATSTWLDDVEERLFVATALLPEETETCLFNQEILAKDIKEMSEEMDKNKNLFSQAFPENGDNRDVIEDTLGCLLGRLSLLDSVVNQRCHQMKERLQQILNFQNDLKVLFTSLADNKYIILQKLANVFEQPVAEQIEAIQQAEDGLKEFDAGIIELKRRGDKLQVEQPSMQELSKLQDMYDELMMIIGSRRSGLNQNLTLKSQYERALQDLADLLETGQEKMAGDQKIIVSSKEEIQQLLDKHKEYFQGLESHMILTETLFRKIISFAVQKETQFHTELMAQASAVLKRAHKRGVELEYILETWSHLDEDQQELSRQLEVVESSIPSVGLVEENEDRLIDRITLYQHLKSSLNEYQPKLYQVLDDGKRLLISISCSDLESQLNQLGECWLSNTNKMSKELHRLETILKHWTRYQSESADLIHWLQSAKDRLEFWTQQSVTVPQELEMVRDHLNAFLEFSKEVDAQSSLKSSVLSTGNQLLRLKKVDTATLRSELSRIDSQWTDLLTNIPAVQEKLHQLQMDKLPSRHAISEVMSWISLMENVIQKDEDNIKNSIGYKAIHEYLQKYKGFKIDINCKQLTVDFVNQSVLQISSQDVESKRSDKTDFAEQLGAMNKSWQILQGLVTEKIQLLEGLLESWSEYENNVQCLKTWFETQEKRLKQQHRIGDQASVQNALKDCQDLEDLIKAKEKEVEKIEQNGLALIQNKKEDVSSIVMSTLRELGQTWANLDHMVGQLKILLKSVLDQWSSHKVAFDKINSYLMEARYSLSRFRLLTGSLEAVQVQVDNLQNLQDDLEKQERSLQKFGSITNQLLKECHPPVTETLTNTLKEVNMRWNNLLEEIAEQLQSSKALLQLWQRYKDYSKQCASTVQQQEDRTNELLKAATNKDIADDEVATWIQDCNDLLKGLGTVKDSLFFLHELGEQLKQQVDASAASAIQSDQLSLSQHLCALEQALCKQQTSLQAGVLDYETFAKSLEALEAWIVEAEEILQGQDPSHSSDLSTIQERMEELKGQMLKFSSMAPDLDRLNELGYRLPLNDKEIKRMQNLNRHWSLISSQTTERFSKLQSFLLQHQTFLEKCETWMEFLVQTEQKLAVEISGNYQHLLEQQRAHELFQAEMFSRQQILHSIIIDGQRLLEQGQVDDRDEFNLKLTLLSNQWQGVIRRAQQRRGIIDSQIRQWQRYREMAEKLRKWLVEVSYLPMSGLGSVPIPLQQARTLFDEVQFKEKVFLRQQGSYILTVEAGKQLLLSADSGAEAALQAELAEIQEKWKSASMRLEEQKKKLAFLLKDWEKCEKGIADSLEKLRTFKKKLSQSLPDHHEELHAEQMRCKELENAVGSWTDDLTQLSLLKDTLSAYISADDISILNERVELLQRQWEELCHQLSLRRQQIGERLNEWAVFSEKNKELCEWLTQMESKVSQNGDILIEEMIEKLKKDYQEEIAIAQENKIQLQQMGERLAKASHESKASEIEYKLGKVNDRWQHLLDLIAARVKKLKETLVAVQQLDKNMSSLRTWLAHIESELAKPIVYDSCNSEEIQRKLNEQQELQRDIEKHSTGVASVLNLCEVLLHDCDACATDAECDSIQQATRNLDRRWRNICAMSMERRLKIEETWRLWQKFLDDYSRFEDWLKSSERTAAFPSSSGVIYTVAKEELKKFEAFQRQVHECLTQLELINKQYRRLARENRTDSACSLKQMVHEGNQRWDNLQKRVTSILRRLKHFIGQREEFETARDSILVWLTEMDLQLTNIEHFSECDVQAKIKQLKAFQQEISLNHNKIEQIIAQGEQLIEKSEPLDAAIIEEELDELRRYCQEVFGRVERYHKKLIRLPLPDDEHDLSDRELELEDSAALSDLHWHDRSADSLLSPQPSSNLSLSLAQPLRSERSGRDTPASVDSIPLEWDHDYDLSRDLESAMSRALPSEDEEGQDDKDFYLRGAVGLSGDHSALESQIRQLGKALDDSRFQIQQTENIIRSKTPTGPELDTSYKGYMKLLGECSSSIDSVKRLEHKLKEEEESLPGFVNLHSTETQTAGVIDRWELLQAQALSKELRMKQNLQKWQQFNSDLNSIWAWLGDTEEELEQLQRLELSTDIQTIELQIKKLKELQKAVDHRKAIILSINLCSPEFTQADSKESRDLQDRLSQMNGRWDRVCSLLEEWRGLLQDALMQCQGFHEMSHGLLLMLENIDRRKNEIVPIDSNLDAEILQDHHKQLMQIKHELLESQLRVASLQDMSCQLLVNAEGTDCLEAKEKVHVIGNRLKLLLKEVSRHIKELEKLLDVSSSQQDLSSWSSADELDTSGSVSPTSGRSTPNRQKTPRGKCSLSQPGPSVSSPHSRSTKGGSDSSLSEPGPGRSGRGFLFRVLRAALPLQLLLLLLIGLACLVPMSEEDYSCALSNNFARSFHPMLRYTNGPPPL

SEQ ID NO: 782 - DNA, 27436 bp, Homo sapiens
cggccgccggccgcagcgggctgagattgttgtcctctgtcaccagggcggctgggctcccgcagtcctgcagaccgcgcccgatcccggcgacagggcgggcggacagccgcgcatccccggggtcccgccgagcctgggcgcagagagccgggaggaagcgttcgctcgcttcgccttgctgctgggaaactgaacgaggccgagagagaaggttcttgagttcatgtaagaggacagtcttaaaacggaagaagaaaaagaagcagttcagtctttgggagagctgcctccttgttgagtgctgcaaaggcctggaattcatttatgacagaatagatctagaaaagtccaagcatgttttctagagtggtgtagccctgtgctgcctccagtgaagagtctcttggtgttggcttcgtgcttccggagggaccatggcaacctccagaggggcctcccggtgtcctcgggatatcgccaatgtgatgcagaggctgcaagatgagcaagagatagtacaaaaacgaactttcacaaaatggatcaactctcatctggccaagcggaaacctccaatggtggtggacgatctttttgaagacatgaaagatggtgttaaactgcttgcccttctggaggtcctgtctgggcagaaactgccttgtgaacaaggacgccggatgaagcgaatccatgctgtggctaacattggcacggcactcaagttcctcgaaggaagaaagtccatgcacagaggatcaccgattaaattagtcaacattaactccaccgatatagctgatggccgaccctcaatagttcttggattgatgtggaccattattctatatttccagattgaagagttgaccagcaacctgccccagctccagtctttgtccagcagcgcatcctccgtggacagcatagttagctctgagactcccagcccaccaagtaaacggaaggtgaccaccaagatccaaggaaatgctaagaaggctttattaaagtgggttcagtacacagctggcaagcagactggaatagaagtaaaagattttgggaagagttggagaagcggggttgcctttcattcagttattcatgccattcgaccggaattggtggacttggagacagtgaaaggcagatccaaccgagaaaatttggaggatgctttcactatcgccgaaacagaactggggatcccaagactgctagatcctgaagacgttgatgtggataaaccagatgagaaatctattatgacctatgtagcccagtttctgaaacattatcctgacatccacaatgcaagcactgatgggcaagaggatgatgaaatacttccaggtttcccatcttttgcaaattctgtacaaaattttaagagagaagacagagtaatttttaaggaaatgaaagtttggatagaacaatttgagagagatttgacaagagcacagatggtggaatcaaatttacaggataaatatcagtcatttaagcacttcagagttcaatatgaaatgaagaggaaacagattgaacatttaatacaaccattacacagagacggtaaattgtcacttgaccaagcattggtaaaacaatcttgggatagagtgacctccaggctctttgactggcatatacagcttgataaatctcttcctgcacctctgggcaccataggtgcctggctgtacagagcggaggtggccctgagagaggaaataaccgttcaacaggtccacgaggaaacagcaaacacgatacaacggaaacttgagcaacataaggatctgcttcaaaacacggatgcccacaaaagagcattccatgaaatctaccggaccaggtctgttaacgggattccagtgccacctgatcaattagaggacatggccgagaggtttcattttgtttcctccacatcagagctacacctaatgaaaatggaatttttagaattaaagtaccgtctgctctcactgctggttcttgcagagtcaaagctgaagtcttggatcattaagtacgggaggagagagtcagtggagcagcttctacaaaactacgtgtcttttatagaaaatagcaagttctttgaacaatatgaggtgacataccagatcttgaaacagacagctgagatgtatgtcaaagcagatggttcagtggaagaagctgagaatgtgatgaaattcatgaatgaaaccaccgctcagtggaggaatctctcagtagaagtgaggagtgtgaggagcatgctggaagaagtgatctctaactgggatcgctatggcaatacagtggctagtctgcaagcctggctagaggatgctgaaaaaatgctcaatcaatcagaaaatgccaaaaaggatttttttcgaaatttacctcattggattcagcagcatactgccatgaacgatgctggcaattttctaattgaaacctgtgatgagatggtttcccgtgacctgaagcagcaattactgttgctaaatgggcggtggagggagttgtttatggaagtcaagcaatatgctcaagctgatgagatggacagaatgaagaaggaatacacagactgtgttgttaccctgtctgcttttgcaacggaagcccataagaaactttctgaacccttagaagtctcttttatgaatgtcaagctattaattcaagacttggaggatattgagcagagggtgcctgtgatggatgcccaatacaagataattacaaagacagcacacctcattaccaaagaaagcccccaagaagaaggaaaagaaatgtttgcgaccatgtcaaagctcaaagagcagctaaccaaggtcaaagaatgttactccccactcctttatgagtctcagcagctgttgattccgttggaggaattagaaaagcagatgacgtccttttatgactcacttgggaaaatcaatgaaattatcacagttcttgagcgtgaggcacaatcgagtgccctttttaaacaaaaacatcaggaactgttagcttgtcaagaaaactgtaagaaaaccttgacacttattgagaaaggcagtcaaagtgttcaaaagtttgtgaccttgagcaacgtgttaaagcattttgatcagacgaggctacaaagacagattgcagatattcatgttgcttttcagagtatggtaaagaaaactggagattggaagaagcatgtggaaaccaacagtcgcttgatgaagaagtttgaggagtctcgagcagagttggagaaggtactgcggattgctcaggagggcctggaggaaaagggggatccagaggagctcctgcggagacacactgagtttttcagtcagctggatcagagggtgctcaatgctttcctgaaagcttgtgatgaactcaccgacatccttccagagcaggagcagcaggggctgcaggaagctgttcgaaagctccacaaacaatggaaggatcttcaaggagaagccccttatcatttgcttcatctgaagattgatgtggagaagaataggttcttagcctctgtagaagaatgcagaactgagctggatcgagagaccaagctgatgccccaggaaggcagtgaaaagataattaaagagcacagggttttcttcagtgacaaaggtcctcatcatctctgtgagaaaaggttacagctcatcgaggaactctgtgtgaaactcccagtgcgggacccagtaagggacacacctggaacctgtcacgtgactctcaaagagctcagagctgccattgacagcacctacaggaagctcatggaagacccagacaagtggaaggactacactagcagattctctgagttctcatcttggatatctacaaatgagacacaattaaaggggatcaagggtgaggccatcgatactgccaaccacggagaggttaaacgtgccgttgaagagatcagaaatggtgttaccaaaaggggtgagaccctcagctggctgaaatccaggctgaaagttttgacagaagtttcttctgagaatgaagcccaaaagcagggagatgagctggcaaaattatccagctctttcaaggctcttgtgacgctgctgtcagaggttgaaaagatgctaagcaattttggggactgtgtccagtacaaagaaatagtcaaaaattctctcgaagaattaatttctggctctaaagaagtccaggaacaagctgagaagatcttggatactgaaaatctgtttgaagcacagcagttacttcttcatcaccagcaaaagacaaagcggatctcagcaaagaagagagatgtgcagcagcagatcgcgcaggcgcagcagggagaaggggggctgcctgaccgaggccacgaggagctgcggaagctggagagcacactggatggcctggagcgcagccgggagaggcaggaacgccgcatccaggtcacattaagaaaatgggagcgatttgaaacaaacaaagaaacagtagtaagatacctttttcaaacaggttccagtcatgaacgcttcttgagttttagcagtttggaaagtttatcttcagaactggaacaaacaaaggagttttctaaacggacagaaagtattgcagtccaggctgagaaccttgtaaaggaagcttcagagataccgcttgggccccaaaataagcagctgcttcaacagcaggccaagtcaatcaaagaacaagtcaaaaaattagaagacacgcttgaagaagatattaaaaccatggaaatggtgaaaaccaagtgggatcattttggcagtaattttgagactctgtccgtctggataactgagaaagaaaaagaactcaatgccttggaaacttcgtcatctgccatggacatgcaaatcagccaaattaaggtcacaattcaggaaatagaaagtaagctcagcagcattgtaggattagaagaagaagcccagtcttttgctcagtttgttaccactggagaatctgctcgaattaaagccaagttgacacaaataagaagatacggggaagagcttcgagagcatgcacagtgtctggaaggaacaatcctgggacatttatctcagcagcaaaagtttgaagagaaccttagaaagatccagcaatctgtgtctgaatttgaagataaacttgctgttccaattaaaatatgttcttcagctacagaaacatacaaagttcttcaagaacatatggatctctgccaggccctggagtcactgagcagcgcgatcactgccttctcagccagtgccaggaaggttgtgaacagagattcctgtgttcaggaggctgcggctctacagcagcaatacgaggacatcctaaggagggcgaaggagagacagacggcgctggagaatctgctggcccactggcagaggctagagaaagaactatcatcctttttgacctggttagagcggggtgaagctaaagccagttccccagaaatggacatttctgcagacagagtcaaagtggaaggtgaacttcagttaatacaggcactgcaaaatgaagttgtatcccaggcctcattctatagcaaacttttgcaattgaaggaatcattgttctcagtagcctccaaagatgatgtgaaaatgatgaaactacatttggagcagttggatgagagatggagagatttaccacagatcattaacaaaaggattaattttcttcagtctgtggttgctgaacaccagcaatttgatgagctgctgctttccttttctgtctggattaaactgtttctcagtgaattacaaactacctctgagattagcataatggaccatcaagtagcccttactcggcataaggaccacgcagcagaagtagagagcaaaaagggcgaattgcagagtctgcagggtcacttagcaaagttgggttctctgggccgtgctgaggacctccacctcctgcagggaaaggctgaggactgcttccagctgtttgaggaggccagccaggttgtggagaggcggcagcttgccctgtcccatttggcagaattcctccagagccatgcctctctgtccggcattctccgccagctgaggcaaacagtggaagcaaccaacagtatgaataagaacgagtctgatttgatagaaaaggacctcaatgatgctcttcaaaatgctaaagcattagaatctgctgccgtcagtctggatggcattctttccaaagcccaataccatctgaaaatcgggagctctgagcaaaggacttcctgcagagccacggctgatcagctctgtggagaggtagagaggatccagaaccttctgggaaccaagcagagtgaggcagatgctctggcagtgttgaaaaaagcattccaagaccagaaagaggagcttctgaaaagcattgaggacattgaagaaaggactgacaaagagcgattgaaagaacctacccgccaagctcttcagcagaggttaagagtgtttaatcagctagaagatgaattgaattctcacgagcatgaactatgttggttgaaagacaaagccaagcaaattgcccagaaagatgtagcttttgcacctgaagttgacagggagataaaccgcttagaggtcacctgggatgataccaaaagactaattcatgaaaatcagggtcagtgctgtggacttattgacttaatgagagaatatcagaacctgaaatcagctgtatctaaagtcttagaaaatgccagcagtgtgattgtaaccagaactaccataaaagatcaggaggatcttaaatgggctttttccaagcatgaaactgccaagaacaaaatgaattacaaacagaaagacttggataactttaccagcaaaggaaaacacttgttatctgagctgaagaaaattcacagtagtgatttcagcttggtgaaaacagacatggagagcaccgtggacaaatggctggatgtatcagagaaacttgaagaaaacatggataggctgagagtaagcctgtccatttgggatgatgtactgtcaactagagatgagattgagggatggtcaaacaactgcgttccacagatggcagaaaacatcagcaacctggataaccacctcagagctgaagaactgcttaaagaatttgagtctgaagttaaaaacaaagcattgagattggaagaactgcattccaaagttaatgatctgaaagaattaactaaaaatctagaaacaccgccagaccttcagtttatagaagcagacttaatgcagaaactggagcatgccaaagaaataactgaagtagcaaaaggaaccctgaaggatttcacggctcaaagtacacaagtggagaagtttattaatgacataacaacatggttcacaaaagtggaagaatcgttgatgaactgtgcccaaaatgagacttgtgaagcattgaaaaaagtcaaggatatacaaaaagaacttcaaagtcaacaaagcaacatcagctctacccaagaaaatctcaatagcttgtgccgcaagtaccactcagctgagttggagagcctgggccgtgcaatgactggtctgataaagaaacatgaagccgtgagccagttgtgctccaaaacccaggccagcctgcaggaatctctggaaaaacacttcagtgagtctatgcaggaattccaagaatggtttttgggagcaaaggcagcagcaaaagaatcatcagatcgcaccggtgacagcaaagttctagaagcaaagctccatgatcttcagaacattttggactcagtcagtgatgggcagagcaaacttgatgcagtgactcaagaaggacaaactttgtatgcacatttgtctaaacaaattgtcagtagcattcaagaacaaatcacaaaggccaatgaagagtttcaagcatttctgaaacaatgccttaaagataagcaggctcttcaagactgtgcttcagaacttggaagctttgaagatcagcacagaaaactgaacttatggatccatgaaatggaagaaaggttcaatacggaaaacttgggagagagtaaacagcacattcctgagaagaaaaatgaagttcataaagttgaaatgtttttgggagaactgctggctgcaagagagtctcttgataagctttcccagagagggcagcttctgagtgaagaaggccacggtgctgggcaggagggccgcctgtgttcccagctcctcacaagccaccagaacctacttagaatgaccaaagagaaactccggagctgccaggtggcccttcaggagcacgaagccctggaggaagcactgcaaagcatgtggttctgggtgaaggccattcaggacagactggcctgtgcagagagcactcttgggagcaaagacaccctggagaaacggctgtcacaaatacaggatattctcctgatgaaaggtgaaggggaagttaagttgaatatggccattggcaagggggaacaggccttgagaagtagcaacaaagaaggtcagagggtgattcagactcagttagagacccttaaagaagtgtgggctgacatcatgagctcctccgtccacgctcaaagcactttagagtctgtgattagccaatggaatgactatgtagagaggaaaaaccagttggagcagtggatggaatcagtggatcaaaaaatagaacatcccttacaaccacagccaggtctgaaagagaagttcgtcctgcttgaccacctccagtccatcctgtctgaggcagaagatcacacgagagcccttcaccgtctaattgcgaagtccagggagctctacgaaaagacagaggatgagtctttcaaggacacagctcaagaggagctgaaaacacagtttaatgatataatgactgttgccaaggaaaaaatgaggaaagtggaagagattgtgaaagatcatctaatgtatttagatgcggtccacgagttcacagattggctccattcagcaaaggaagaacttcaccggtggtcagatatgtctggagattcatcagccacccagaaaaagttatcaaaaattaaggagctgatagattccagagagattggtgcaagccgtctcagcagagtggagtcgctggctcccgaagtgaaacagaacacaactgccagtgggtgtgagctcatgcacacggagatgcaggccctgcgtgccgactggaagcagtgggaagacagtgtattccaaacgcagagctgtttggagaacctggtcagccagatggccctttcggagcaggaattctcaggccaagtggctcaactggagcaggccctggaacagttcagtgcccttctgaaaacctgggctcagcagttaaccctcctggaaggcaagaacacggatgaggagatagtggaatgctggcacaaaggacaagagatactggatgctttgcaaaaagcagagcctagaacagaggatctcaagtctcagctgaatgaactttgtcgattttccagagacctgagtacctacagtggaaaagtttctggcttgattaaagagtataattgtctttgtttgcaagcatccaagggctgccagaataaagaacagattttacagcaaagatttcgaaaggccttcagggatttccagcagtggttggttaatgcaaaaatcactaccgccaagtgttttgatatacctcaaaatataagtgaagtttcaactagtcttcagaaaatacaggagtttttgtcagaaagtgaaaatggacagcacaagctaaacatgatgctgtctaaaggggaacttctgagtaccctgctgaccaaagagaaagcgaaagggatccaggccaaagttacagctgcaaaagaagattggaaaaattttcattcaaatctccaccaaaaagaatctgctctagagaatctaaagatccaaatgaaggactttgaagtaagtgctgagcctatccaggactggctgagtaaaactgagaagatggtccatgaaagcagcaatcgcctctatgatctgccagcaaagaggagggagcagcagaagctccagtctgtccttgaggaaatacactgctacgagcctcagctcaacaggctgaaagagaaagctcagcagctgtgggaaggacaagctgccagcaagagctttaggcacagagtgtcgcagctgtcttctcagtatctagcgctaagcaatttaacaaaggagaaagtgtcaagactggatagaatcgttgcagaacacaatcagttctctcttgggattaaagaattacaagactggatgacggatgcgattcacatgctggattcatactgccacccgacatccgacaaaagtgtgctggacagcaggacgctcaagctcgaggctctattatcagtcaaacaggaaaaagagattcagatgaaaatgatagtgaccaggggagaatctgtccttcagaatacttctccagaaggcattcccactattcagcagcagctgcagagtgtgaaggatatgtgggcatcccttttgtctgcagggattcgttgtaaaagccaactcgaaggagctctctccaagtggacaagttatcaggatggcgttcgacagttctccggttggatggatagtatggaagccaacctgaatgaatcagaaaggcagcatgcggagctgcgggataaaacaacgatgctcggaaaagccaagttattaaatgaagaagtgctgagttacagcagcttgctggagaccatcgaagtcaaaggggctggcatgacagaacactatgtcacccagctagaactccaggatctacaggaacgatacagagccatccaagagagggccaaggaagccgtaaccaagtctgaaaaacttgtccgcctgcaccaagagtatcagagagacctaaaggcatttgaagtttggttggggcaagaacaagaaaagctcgaccagtattcagttcttgaaggtgatgcccacactcatgagacaacattgcgtgatcttcaggagctacaggtacactgtgcagaggggcaggccctgttgaactcagtgctgcacaccagagaggatgtgatcccatcaggtatcccacaggcagaggaccgggctttagagtctctccggcaagactggcaggcttaccagcacaggctgtccgagactcgaactcagttcaataacgtggtgaacaaattgaggctaatggagcaaaagtttcagcaagtagatgaatggctcaaaacagcagaggagaaaaagtggcacgaagaagtgactgcatacagagatgaagttgaggaagtgggagctagagctcaggagatactggacgagagccacgtgaacagcagaatgggttgccaggccacccagctgacttccagataccaggccctgcttctccaagtgctggaacaaataaaattcctggaggaggagattcagagtttggaggaatcagaatcatccctcagttcctattctgattggtatggctctactcataaaaacttcaagaatgtggctaccaagattgacaaagtagatacagtaatgatggggaagaaattgaagacgttggaggttttgctcaaagacatggagaaaggtcacagtttgctgaaatcagcccgggagaaaggagagagggctgttaaatacttggaggaaggcgaggcagagaggttaagaaaggagattcatgatcacatggagcagttgaaggaactgaccagcactgtccggaaagaacacatgacgctggaaaaaggtcttcatttagcaaaggaattctcagataaatgcaaagcactgacacagtggatagcagaataccaggaaattctacatgttcctgaagaacccaaaatggaattatatgagaaaaaagctcagttatctaaatacaagtcacttcaacaaacggtgctgtcccatgaaccatcagtaaagtcagtgagagagaagggtgaagctcttttggaactggtgcaggacgtcactttaaaggacaaaatagatcaacttcaaagtgattaccaggacctgtgcagcataggaaaggcaatgatggaagaaattgctggttttgaagaccgtttgaacaatcttcaaatgaaaggtgatactttgattggccaatgtgcagaccacctgcaagcgaaacttaaacaaaacgtgcatgctcatctgcagggcacaaaggacagctactcagcgatctgcagcacagctcagaggatgtaccagagtttggaacacgaacttcagaagcacgtcagccgacaagacaccctgcagcagtgccaggcctggctttctgcagtccagccggatttagagccaagtcctcaaccacctcttagtagggcagaagccattaagcaggtcaaacacttcagagctttgcaagagcaggcaaggacctacctagatctcctttgctccatgtgtgacctgtcaaatgcttcggtgaaaaccacagcaaaagacattcaacaaacagagcaaacgattgaacaaaagcttgtccaggcccagaacttaactcagggctgggaagagatcaagcacctgaagtctgagctctggatttacctgcaagatgctgatcagcaactgcagaacatgaagaggaggcactctgagctggagctgaacattgcacagaacatggtttcacaagttaaggattttgttaagaaactacagagcaaacaggcatccgtgaacaccataatagaaaaggtgaataagttaacaaagaaggaggaatcgcctgaacacaaggaaataaatcatttaaatgatcagtggctcgatttgtgccgtcagtctaacaacctgtgcttgcaaagggaagaggatcttcagagaacaagagattaccatgactgtatgaatgttgttgaagtgttcctagaaaaatttactacagaatgggataacttggccagatctgatgcagagagtacagctgtccacctggaagctttgaaaaagttagcattggcattgcaggagagaaagtatgctattgaagatctgaaagatcaaaagcagaaaatgatagagcatctgaatttagatgacaaggagttagtcaaagaacagacgagtcatttagagcaacgttggtttcagcttgaggacctcattaaaaggaaaatccaagtgtcagtcaccaacttggaggagttaaatgtggtgcagtccagatttcaggagctaatggagtgggcagaagagcaacaacccaacatcgccgaggcccttaagcagagccctcctccagatatggctcagaaccttctcatggatcacctggccatctgcagtgaactggaggccaagcagatgctcctgaaatcgcttataaaggacgcagacagggtcatggcagatcttggtctcaatgagcgacaggtcatccagaaggctctctctgatgcacaaagccacgtgaattgtctcagtgacttagtgggccagcgaagaaagtacttaaacaaagccttgtccgagaaaacccagtttctcatggcagtgttccaggccaccagccaaattcagcaacatgagcgaaagataatgttccgtgaacacatctgtctgttaccagatgatgtgagcaaacaagtcaaaacatgtaagagtgcacaagccagcctcaagacttaccaaaatgaagtcactggactttgggcccagggtcgcgaactaatgaaggaagtcacagagcaggaaaagagtgaagtgctggggaagcttcaggaattgcagagtgtctatgacagtgttttacaaaagtgcagtcaccggttacaagaactagagaagaatttggtttctaggaagcattttaaggaagattttgataaagcttgccactggctaaaacaagcagatattgttacatttcctgaaatcaacctaatgaatgagagttctgagcttcatacacaactggctaaataccaaaacattcttgaacaatctccagaatatgaaaatcttctacttacgctgcagagaactgggcagaccatattaccatcgctgaatgaagtcgatcattcctacctcagtgaaaagctaaatgctttgcctcgacaatttaatgtaattgttgccttggctaaagacaagttctataaagtccaggaagcaattcttgctcggaaggaatatgcttccttgattgagttgacaacccagtctctgagtgaacttgaagcccaattcttgaggatgagcaaagttcccaccgacctggccgttgaggaggctctttctctgcaagatggttgcagagccattctggacgaggtggcgggccttggggaggcggtggatgaactgaaccagaaaaaagaaggttttcgcagcacaggtcagccttggcagccagacaagatgctgcaccttgtcaccttatatcacaggctgaagcgacaaacagaacagagggttagcttattagaagacaccaccagtgcttaccaagaacacgagaagatgtgccaacagctggagagacaactgaagtctgtaaaagaggagcagtccaaagtgaatgaggaaacgctgcctgcagaggagaagctcaaaatgtatcactccctggcaggaagtctccaggactcagggattgtactgaaacgagtaaccatacatcttgaagatcttgccccacaccttgaccccttggcttatgagaaagccaggcatcagatccagtcctggcaaggggagttaaaactgttgacttctgccattggtgagacggtgacagaatgtgagagccgaatggtgcagagtatagacttccagactgagatgagtcgctccctggactggctgaggagagtgaaggcagagctcagtgggccggtgtacctagacctcaacctgcaggacatccaagaggaaatcagaaaaatccaaattcatcaggaagaggtccagtccagcttgagaatcatgaatgcgctgagtcacaaggaaaaggagaagttcacaaaggccaaggagctgatttctgcggatttagaacacagcctcgctgagctctcagagctggatggagacatccaggaagccttacgcaccagacaggctaccttgactgaaatatatagccagtgtcaaaggtattatcaggtatttcaagcagccaatgactggcttgaggatgcccaagaattgttacagctggcaggcaatggcctagacgtggagagcgcagaggaaaatctcaaaagccacatggaatttttcagtacagaggatcagttccatagtaacctggaggagctccacagcctggtagccaccctggacccactcatcaagccaaccggcaaagaagacctagaacagaaagtggcttctctggaactcaggagccagaggatgagccgggactctggtgcccaagtggatctcttgcagagatgcacagctcaatggcacgattaccagaaagcaagggaagaggttattgaattgatgaatgatacagaaaagaaattgtctgagttttctttgttgaagacttcgtctagtcatgaagcggaagaaaaattgtcagaacacaaggctttagtgtcagtggttaactctttccatgagaaaattgtggcccttgaggaaaaagcttcacaactggagaaaaccggaaatgatgccagcaaagccaccctgagcaggtcaatgaccaccgtctggcagcgctggacacgccttcgagctgtggcccaggaccaggagaagatcctggaagatgcagtggatgagtggacgggctttaacaacaaggttaaaaaggccactgaaatgattgatcagctgcaagataagttacctggaagttcagcagagaaagcatcgaaagcagagctcttaactcttcttgaataccacgacacgttcgttctggagctggagcagcagcagtcggccttgggcatgctgcggcagcaaaccctgagcatgctccaggatggagccgccccaacccctggggaagagcctccgctcatgcaggaaatcaccgccatgcaagatcggtgcctgaacatgcaggagaaagtgaagactaatggaaagttggtgaagcaagagctgaaggaccgagaaatggtggagactcagatcaattctgtgaaatgttgggttcaggaaacgaaagaatatttagggaatccaacaatagaaatagatgctcaacttgaagaacttcagattctcctaacagaagccacaaatcaccgacagaacattgaaaaaatggcagaagaacagaaggagaagtacttaggtctttataccatattaccttctgaactctcccttcagttggctgaagtggcgttagatctaaagatccgagatcagatccaagacaaaataaaagaagttgagcagagcaaggccacgagccaggaactcagccggcaaattcagaagttagctaaagacctcacaactattctaactaagctgaaagcgaagacagataatgtagttcaagctaaaactgaccaaaaggtgctgggagaggaattagatggctgtaattcaaagttaatggaattagatgcagcagtacagaaattcttggaacagaatggccaactgggtaagccactggccaagaagataggaaaactgactgaacttcaccagcagaccattagacaagctgagaatcggctctccaagctcaatcaggcagcatcacatttagaagaatacaatgaaatgcttgaattaattttgaagtggattgaaaaagctaaagtcttggctcatggaactattgcatggaattctgcaagccagcttcgggaacaatatattttgcatcagaccctgctagaagaatccaaagaaattgacagtgagctggaagcaatgactgagaaattacagtacctcactagcgtgtactgtacagaaaaaatgtctcagcaagtggcagaactgggacgggagactgaggagttgcgacagatgatcaaaattcgtttgcagaacctccaagatgcagctaaggatatgaaaaaatttgaagcagagttgaaaaagttacaagctgccttggagcaagcccaggcaacactgacttctccagaagttggacgtctcagtctcaaggagcagctctctcatcggcagcatttgttgtctgagatggagtcactgaagccgaaggtgcaagcagtgcagctctgccagagtgccctccggatccccgaggatgtggttgccagcttacctctctgtcatgctgctctgcggctgcaggaagaggccagccggctgcagcacaccgccatccagcagtgtaacatcatgcaggcagctgtggtacaatatgaacaatatgagcaagaaatgaaacatctccagcaactgatagaaggagctcacagagagattgaggataaacctgttgccaccagtaacatacaggagctgcaggctcagatttctcggcatgaggagctggcgcagaaaattaagggctaccaggagcagatcgcttctttgaattccaagtgcaagatgctgacgatgaaagccaagcacgccaccatgctgctgacggtgaccgaggtcgaggggctggcggaagggacagaggacctggatggggagctcctccccacgccttcggcccacccctctgtggtcatgatgactgcaggtcgctgtcacactttgctgtcaccggtcactgaggagtctggggaggagggaaccaacagtgagatttcctctccacctgcctgtcgctccccttcacctgtggctaatacagatgcttctgttaaccaggacattgcatattaccaagccttgtctgctgagaggttgcagacagatgctgcaaaaattcaccccagcacatccgcatcccaggagttctatgaaccgggattggagccatccgctactgccaaactgggtgatttgcagcgttcttgggaaaccttaaagaatgtgatcagtgagaagcagcgcacactctatgaagctttggaacgccagcagaagtaccaggactccctccagtccatctctacgaagatggaggccattgagctgaaactcagtgagagcccagagcctggcaggagtccagaaagccagatggctgaacatcaggcattgatggatgagattctcatgctccaggatgaaatcaatgagctccagtcctctctcgcagaggagctggtatccgagtcttgtgaggccgaccctgcggagcagctggccttgcagtccacgctcactgtcttagccgagcgaatgtccaccatcaggatgaaagcctcggggaaacggcagcttttggaggagaagttgaatgatcagctggaggaacaaaggcaggaacaggccctgcagaggtatcgctgtgaagccgatgagctggacagctggctcttgagtaccaaggccactctggacactgcgctgagtccacccaaggagcccatggacatggaggcccagcttatggactgccagaatatgctggtggaaatagagcagaaggtggtggctttatcagaactgtcagtccacaatgagaacctgctgctggagggcaaagctcacaccaaggacgaggccgagcagctggctggaaagctgagaaggctcaaggggagcctgctggagctgcagagagccctgcatgataagcagctcaacatgcagggaacagcacaggagaaggaggagagcgatgttgacctaacagccacgcagagccccggcgtccaggaatggctggcccaagctcgcaccacatggacccagcagcggcagagcagtctccagcaacaaaaagagttagaacaggaattagccgagcagaagagtctccttcgctcagtagccagtcgtggagaggagattctaattcaacattcggcggcagagacctctggtgatgctggcgaaaaacctgatgtgttatcccaggagttggggatggaaggggagaaatcatccgctgaagaccagatgagaatgaaatgggaaagcctacatcaagaatttagtaccaagcagaaactactacagaatgttctggaacaggaacaagagcaagtgctttatagcaggccaaatcgactcttgtctggtgtgccactgtacaaaggggacgtgccaacccaagataaatctgcagttacatctttgctggatggactgaaccaagccttcgaggaggtttcatcccagagtggaggggcaaagaggcagagtatacacttggagcagaagttgtatgatggagtctcagccacctctacttggttggatgacgttgaagaacgtttatttgttgccacagcacttttaccagaagaaacagagacttgtctcttcaaccaagagattcttgccaaagacattaaggaaatgtctgaagaaatggataagaacaaaaacttgttttcccaagcttttccagagaatggtgataatcgagatgttattgaagatactttgggttgtcttttgggcaggttatccttgctagactcagtagtgaatcaacgatgtcatcagatgaaagaaagacttcagcaaatactaaatttccagaatgatctgaaagtgctgtttacatcactggctgacaacaaatacatcattctgcaaaaactggcaaatgtgtttgaacagcccgtagcagaacaaatagaggcaatacaacaggctgaagatggactcaaagaatttgatgcaggaatcattgaattaaagaggcgtggtgacaagctacaggtcgagcagccgtccatgcaagaactctccaagctccaggacatgtatgatgagctgatgatgatcattggctcccggaggagtggtctgaatcagaaccttacactcaagagtcagtatgagagggccctacaagatctggctgacctgctagaaactggtcaggagaagatggcaggagaccagaaaatcatcgtgtcttccaaagaggaaatccagcaactacttgacaaacataaggaatactttcagggcctggaatctcatatgatcttgactgaaacactcttcagaaagataatcagctttgcagtccaaaaggaaacccagttccatacagagctgatggctcaggcttctgctgtactgaaacgggctcacaagaggggtgtggagctggagtacattctagagacgtggtcccatctggatgaggaccagcaggagctcagcagacagctggaggtggtggaaagcagcatcccaagcgtgggtctggtggaggagaacgaggacaggcttattgaccgcataacactctaccagcatttaaaatctagccttaatgaataccagcccaaattatatcaagtattagatgatgggaaacgacttctgatatccatcagctgctcagatctagaaagccaactaaatcaacttggagagtgctggctaagtaacaccaataaaatgtctaaggaacttcacagactggaaacaatattgaaacactggaccagatatcaaagtgaatctgcagatctaattcactggttacaatctgcaaaagaccggctagaattttggactcagcaatctgtgacagtcccacaagagctggaaatggtccgtgatcatctaaatgctttcctggagttttctaaagaagtggatgcccaatcttccctgaaatcatctgttctgagtactggaaatcagctccttcgactaaaaaaggtggacacagccacgctgcgctctgagctgtcgcgcattgatagccagtggactgacctgctaaccaatatcccagccgtccaggagaagctccaccagctccagatggataaactgccttcccgccatgccatttctgaagtcatgagttggatttctctaatggaaaatgttattcagaaggatgaagataatattaaaaattccataggttacaaggcaattcatgaataccttcagaaatataagggttttaagatagacattaactgtaaacagctgacagtggattttgtgaaccagtccgtgctacaaatcagcagtcaggatgtggaaagtaagcgtagtgataagactgattttgctgagcaacttggagcaatgaataaaagttggcaaattctgcaaggtctagtaactgagaagatccagctgttggaaggcttattggaatcttggtcagaatatgaaaataatgtacaatgtctgaaaacatggtttgaaacccaggaaaagagactaaaacaacagcatcgaattggagatcaggcttctgttcaaaatgcactgaaagactgtcaggatctggaagatttgattaaagcaaaagaaaaagaagtagagaaaattgagcagaatggacttgctttgattcagaacaagaaagaagacgtctctagcattgtcatgagcacactgcgagagctcggccaaacctgggcaaatttagatcacatggttggacaattaaagatactgctgaaatcagtgcttgaccaatggagtagtcacaaagtggcctttgacaagataaacagttacctcatggaggccagatactctctttcccgattccgtctgctgactggctccttagaagctgtgcaagttcaggtggacaatcttcagaatctccaagatgatctggaaaaacaggaaaggagcttacagaaatttggctctatcaccaaccaattattaaaagagtgtcacccacccgtgacagaaactcttaccaatacactgaaagaagtcaacatgagatggaataacttgctggaagagattgctgagcagctacagtccagcaaggccctacttcagctttggcaaagatacaaggactactccaaacagtgtgcttcgacagttcagcagcaggaggatcgaaccaatgagctgttgaaggcagccacaaacaaggacattgccgatgatgaggttgccacatggattcaagattgcaacgacctcctcaaaggactgggcacagttaaagattccctcttttttctccatgagctgggagagcaactgaagcaacaagtggatgcttccgcagcatcagctattcaatcggatcaactctctttgagtcaacacttgtgtgccctggagcaagctctctgcaaacagcagacttcattacaggctggagttcttgattatgaaacctttgccaagagtttagaagctttggaggcctggatagtggaagctgaagaaatactacaagggcaggaccctagccactcatctgacctctccacaatccaggaaaggatggaagaacttaagggacagatgttaaaattcagcagcatggctccagatttagaccgtctaaatgagcttggatataggttacccttgaatgataaggaaatcaaaagaatgcagaatctgaaccgccattggtctctgatctcctctcagactacagaaagattcagcaagttgcagtcatttttgctacaacatcagactttcttggaaaaatgtgaaacatggatggaattcctagttcagacagaacaaaagttagcagtagagatttcaggaaattatcagcaccttttggaacagcagagagcacacgagttgtttcaagccgagatgttcagtcgtcagcagattttgcactcaatcattattgatgggcaacgtcttctagaacaaggtcaagttgatgacagggatgaattcaacctgaaattgacactcctcagtaatcaatggcagggagtgattcgcagggcccagcagaggcgggggatcattgacagccagattcgccagtggcagcgctatagggagatggcagaaaagcttcgtaaatggttggttgaagtgtcctacctccccatgagtggtctcggaagtgttcctataccactgcaacaagcaaggaccctctttgatgaagtgcagttcaaagaaaaagtgtttctgcggcaacaaggcagctacatcctgactgtggaggctggcaagcaactccttctctcggcggacagtggcgctgaggccgccttgcaggccgaactcgctgaaatccaagagaaatggaaatcagccagcatgcggctggaagaacagaagaaaaaactagccttcttgttgaaagactgggaaaaatgtgagaaaggaatagcagattccctggagaaactacgaactttcaaaaagaagctttcgcagtctctcccggatcaccatgaagagctccatgcagaacaaatgcgttgcaaggaattagaaaatgcagttgggagctggacagatgacttgacccagttgagcctgctgaaggacaccctctctgcctatatcagtgctgatgatatctccattcttaatgaacgcgtagagcttctgcaaaggcagtgggaagaactatgccaccagctctccttaaggcggcagcaaataggtgaaagattgaatgaatgggcagtcttcagtgaaaagaacaaggaactctgtgagtggttgactcaaatggaaagcaaagtttctcagaatggagacattctcattgaagaaatgatagagaagctcaagaaggattatcaagaggaaattgctattgctcaagagaacaaaatacagctccaacaaatgggagaacgacttgctaaagccagccatgaaagcaaagcatctgagattgaatacaagctgggaaaggtcaacgaccggtggcagcatctcctggacctcattgcagccagggtgaagaagctgaaggagaccctggtagccgtgcagcagcttgataagaacatgagcagcctgaggacctggctcgctcacatcgagtcagagctggccaagccaatagtctacgattcctgtaactcggaagaaatacagagaaagcttaatgagcagcaggagcttcagagagacatagagaagcacagtacaggtgttgcatctgtcctcaacctgtgtgaagtcctgctgcacgactgtgacgcctgtgccactgatgccgagtgtgactctatacagcaggctacgagaaacctggaccggcggtggagaaacatttgtgctatgtccatggaaaggaggctgaaaatcgaagagacgtggcgattgtggcagaaatttctggatgactattcacgttttgaagattggctgaagtcttcagaaaggacagctgcttttcccagctcttctggggtgatctatacagttgccaaggaagaactaaagaaatttgaggctttccagcgacaggtccacgagtgcctgacgcagctggaactgatcaacaagcagtaccgccgcctggccagggagaaccgcactgattcagcatgtagcctcaaacagatggttcacgaaggcaaccagagatgggacaacctgcaaaagcgtgtcacctccatcttgcgcagactcaagcattttattggccagcgtgaggagtttgagactgcgcgggacagcattctggtctggctcacagagatggatctgcagctcactaatattgaacatttttctgagtgtgatgttcaagctaaaataaagcaactcaaggccttccagcaggaaatttcactgaaccacaataagattgagcagataattgcccaaggagaacagctgatagaaaagagtgagcccttggatgcagcgatcatcgaggaggaactagatgagctccgacggtactgccaggaggtcttcgggcgtgtggaaagataccataagaaactgatccgcctgcctctcccagacgatgagcacgacctctcagacagggagctggagctggaagactctgcagctctgtcggacctgcactggcacgaccgctctgcagacagcctgctttctccacagccttcctccaatctctccctctcgctcgctcagcccctccggagcgagcggtcaggacgagacaccccggctagtgtggactccatccccctggagtgggatcacgactatgacctcagtcgggacctggagtctgcaatgtccagagctctgccctctgaggatgaagaaggtcaggatgacaaagatttctacctccggggagctgttggcttatcagatgtaatgatccccgaaagccctgaggcctatgtaaaactcacagaaaatgcaatcaaaaatacctccggggaccacagtgccctagagtcacagatccgacaactgggcaaagccctggatgatagccgttttcagatacagcaaaccgaaaatatcattcgcagcaaaactcccacggggccggagctagacaccagctacaaaggctacatgaaactgctgggcgaatgcagtagcagtatagactccgtgaagagactggagcacaaactgaaggaggaagaggagagccttcctggctttgttaacctgcatagtaccgaaacccaaacggctggtgtgattgaccgatgggagcttctccaggcccaggcattgagcaaggagttgaggatgaagcagaacctccagaagtggcagcagtttaactcagacttgaacagcatctgggcctggctgggggacacggaggaggagttggaacagctccagcgtctggaactcagcactgacatccagaccatcgagctccagatcaaaaagctcaaggagctccagaaagctgtggaccaccgcaaagccatcatcctctccatcaatctctgcagccctgagttcacccaggctgacagcaaggagagccgggacctgcaggatcgcttgtcgcagatgaatgggcgctgggaccgagtgtgctctctgctggaggagtggcggggcctgctgcaggatgccctgatgcagtgccagggtttccatgaaatgagccatggtttgcttcttatgctggagaacattgacagaaggaaaaatgaaattgtccctattgattctaaccttgatgcagagatacttcaggaccatcacaaacagcttatgcaaataaagcatgagctgttggaatcccaactcagagtagcctctttgcaagacatgtcttgccaactactggtgaatgctgaaggaacagactgtttagaagccaaagaaaaagtccatgttattggaaatcggctcaaacttctcttgaaggaggtcagtcgtcatatcaaggaactggagaagttattagacgtgtcaagtagtcagcaggatttgtcttcctggtcttctgctgatgaactggacacctcagggtctgtgagtcccacatcaggaaggagcaccccaaacagacagaaaacgccacgaggcaagtgtagtctctcacagcctggaccctctgtcagcagtccacatagcaggtccacaaaaggtggctccgattcctccctttctgagccagggccaggtcggtccggccgcggcttcctgttcagagtcctccgagcagctcttccccttcagcttctcctgctcctcctcatcgggcttgcctgccttgtaccaatgtcagaggaagactacagctgtgccctctccaacaactttgcccggtcattccaccccatgctcagatacacgaatggccctcctccactctgaactaagcagatgccatctgcagaagtgctggtagcataaggaggatcgggtcataagcaatcccaaactaccaacaagaggaccttgatcttggcgaaagccctcggtgtggcagctttagccctcctccagatcacatgtgtgcaaattatggcttcagaggtggaagataaacagtgacgggggaacaaacagacaacaagaaggtttggaagaaatctggtttgagactctgaaccttagcactaaggagattgagtaaggacctccaaagttccccggactcatgaattctgggcccttggcccattctgtgcacagccaaggacttcagtagaccatctgggcagctttcccatggtgctgctccaaccatcagataaatgaccctcccaagcaccatgtcagtgtcgtacaatctaccaaccaaccagtgctgaagagattttagaaccttgtaacatacaatttttaagagcttatatggcagcttcctttttaccttgttttcctttggggcatgatgttttaacctttgctttagaagcacaagctgtaaatctaaaaggcacttttttttagaggtataaagaaaaactagatgtaataaataagatcatggaaggctttatgtgaaaaaagttgaatgttatagtaaaaaaaaaaagatatttatgtatgtacagtttgctaaagccaagttttgtttgtattgatttctttgcatttattatagatattataaaata

SEQ ID NO: 783 - protein, 8749 aa, Homo sapiens
MATSRGASRCPRDIANVMQRLQDEQEIVQKRTFTKWINSHLAKRKPPMVVDDLFEDMKDGVKLLALLEVLSGQKLPCEQGRRMKRIHAVANIGTALKFLEGRKSMHRGSPIKLVNINSTDIADGRPSIVLGLMWTIILYFQIEELTSNLPQLQSLSSSASSVDSIVSSETPSPPSKRKVTTKIQGNAKKALLKWVQYTAGKQTGIEVKDFGKSWRSGVAFHSVIHAIRPELVDLETVKGRSNRENLEDAFTIAETELGIPRLLDPEDVDVDKPDEKSIMTYVAQFLKHYPDIHNASTDGQEDDEILPGFPSFANSVQNFKREDRVIFKEMKVWIEQFERDLTRAQMVESNLQDKYQSFKHFRVQYEMKRKQIEHLIQPLHRDGKLSLDQALVKQSWDRVTSRLFDWHIQLDKSLPAPLGTIGAWLYRAEVALREEITVQQVHEETANTIQRKLEQHKDLLQNTDAHKRAFHEIYRTRSVNGIPVPPDQLEDMAERFHFVSSTSELHLMKMEFLELKYRLLSLLVLAESKLKSWIIKYGRRESVEQLLQNYVSFIENSKFFEQYEVTYQILKQTAEMYVKADGSVEEAENVMKFMNETTAQWRNLSVEVRSVRSMLEEVISNWDRYGNTVASLQAWLEDAEKMLNQSENAKKDFFRNLPHWIQQHTAMNDAGNFLIETCDEMVSRDLKQQLLLLNGRWRELFMEVKQYAQADEMDRMKKEYTDCVVTLSAFATEAHKKLSEPLEVSFMNVKLLIQDLEDIEQRVPVMDAQYKIITKTAHLITKESPQEEGKEMFATMSKLKEQLTKVKECYSPLLYESQQLLIPLEELEKQMTSFYDSLGKINEIITVLEREAQSSALFKQKHQELLACQENCKKTLTLIEKGSQSVQKFVTLSNVLKHFDQTRLQRQIADIHVAFQSMVKKTGDWKKHVETNSRLMKKFEESRAELEKVLRIAQEGLEEKGDPEELLRRHTEFFSQLDQRVLNAFLKACDELTDILPEQEQQGLQEAVRKLHKQWKDLQGEAPYHLLHLKIDVEKNRFLASVEECRTELDRETKLMPQEGSEKIIKEHRVFFSDKGPHHLCEKRLQLIEELCVKLPVRDPVRDTPGTCHVTLKELRAAIDSTYRKLMEDPDKWKDYTSRFSEFSSWISTNETQLKGIKGEAIDTANHGEVKRAVEEIRNGVTKRGETLSWLKSRLKVLTEVSSENEAQKQGDELAKLSSSFKALVTLLSEVEKMLSNFGDCVQYKEIVKNSLEELISGSKEVQEQAEKILDTENLFEAQQLLLHHQQKTKRISAKKRDVQQQIAQAQQGEGGLPDRGHEELRKLESTLDGLERSRERQERRIQVTLRKWERFETNKETVVRYLFQTGSSHERFLSFSSLESLSSELEQTKEFSKRTESIAVQAENLVKEASEIPLGPQNKQLLQQQAKSIKEQVKKLEDTLEEDIKTMEMVKTKWDHFGSNFETLSVWITEKEKELNALETSSSAMDMQISQIKVTIQEIESKLSSIVGLEEEAQSFAQFVTTGESARIKAKLTQIRRYGEELREHAQCLEGTILGHLSQQQKFEENLRKIQQSVSEFEDKLAVPIKICSSATETYKVLQEHMDLCQALESLSSAITAFSASARKVVNRDSCVQEAAALQQQYEDILRRAKERQTALENLLAHWQRLEKELSSFLTWLERGEAKASSPEMDISADRVKVEGELQLIQALQNEVVSQASFYSKLLQLKESLFSVASKDDVKMMKLHLEQLDERWRDLPQIINKRINFLQSVVAEHQQFDELLLSFSVWIKLFLSELQTTSEISIMDHQVALTRHKDHAAEVESKKGELQSLQGHLAKLGSLGRAEDLHLLQGKAEDCFQLFEEASQVVERRQLALSHLAEFLQSHASLSGILRQLRQTVEATNSMNKNESDLIEKDLNDALQNAKALESAAVSLDGILSKAQYHLKIGSSEQRTSCRATADQLCGEVERIQNLLGTKQSEADALAVLKKAFQDQKEELLKSIEDIEERTDKERLKEPTRQALQQRLRVFNQLEDELNSHEHELCWLKDKAKQIAQKDVAFAPEVDREINRLEVTWDDTKRLIHENQGQCCGLIDLMREYQNLKSAVSKVLENASSVIVTRTTIKDQEDLKWAFSKHETAKNKMNYKQKDLDNFTSKGKHLLSELKKIHSSDFSLVKTDMESTVDKWLDVSEKLEENMDRLRVSLSIWDDVLSTRDEIEGWSNNCVPQMAENISNLDNHLRAEELLKEFESEVKNKALRLEELHSKVNDLKELTKNLETPPDLQFIEADLMQKLEHAKEITEVAKGTLKDFTAQSTQVEKFINDITTWFTKVEESLMNCAQNETCEALKKVKDIQKELQSQQSNISSTQENLNSLCRKYHSAELESLGRAMTGLIKKHEAVSQLCSKTQASLQESLEKHFSESMQEFQEWFLGAKAAAKESSDRTGDSKVLEAKLHDLQNILDSVSDGQSKLDAVTQEGQTLYAHLSKQIVSSIQEQITKANEEFQAFLKQCLKDKQALQDCASELGSFEDQHRKLNLWIHEMEERFNTENLGESKQHIPEKKNEVHKVEMFLGELLAARESLDKLSQRGQLLSEEGHGAGQEGRLCSQLLTSHQNLLRMTKEKLRSCQVALQEHEALEEALQSMWFWVKAIQDRLACAESTLGSKDTLEKRLSQIQDILLMKGEGEVKLNMAIGKGEQALRSSNKEGQRVIQTQLETLKEVWADIMSSSVHAQSTLESVISQWNDYVERKNQLEQWMESVDQKIEHPLQPQPGLKEKFVLLDHLQSILSEAEDHTRALHRLIAKSRELYEKTEDESFKDTAQEELKTQFNDIMTVAKEKMRKVEEIVKDHLMYLDAVHEFTDWLHSAKEELHRWSDMSGDSSATQKKLSKIKELIDSREIGASRLSRVESLAPEVKQNTTASGCELMHTEMQALRADWKQWEDSVFQTQSCLENLVSQMALSEQEFSGQVAQLEQALEQFSALLKTWAQQLTLLEGKNTDEEIVECWHKGQEILDALQKAEPRTEDLKSQLNELCRFSRDLSTYSGKVSGLIKEYNCLCLQASKGCQNKEQILQQRFRKAFRDFQQWLVNAKITTAKCFDIPQNISEVSTSLQKIQEFLSESENGQHKLNMMLSKGELLSTLLTKEKAKGIQAKVTAAKEDWKNFHSNLHQKESALENLKIQMKDFEVSAEPIQDWLSKTEKMVHESSNRLYDLPAKRREQQKLQSVLEEIHCYEPQLNRLKEKAQQLWEGQAASKSFRHRVSQLSSQYLALSNLTKEKVSRLDRIVAEHNQFSLGIKELQDWMTDAIHMLDSYCHPTSDKSVLDSRTLKLEALLSVKQEKEIQMKMIVTRGESVLQNTSPEGIPTIQQQLQSVKDMWASLLSAGIRCKSQLEGALSKWTSYQDGVRQFSGWMDSMEANLNESERQHAELRDKTTMLGKAKLLNEEVLSYSSLLETIEVKGAGMTEHYVTQLELQDLQERYRAIQERAKEAVTKSEKLVRLHQEYQRDLKAFEVWLGQEQEKLDQYSVLEGDAHTHETTLRDLQELQVHCAEGQALLNSVLHTREDVIPSGIPQAEDRALESLRQDWQAYQHRLSETRTQFNNVVNKLRLMEQKFQQVDEWLKTAEEKKWHEEVTAYRDEVEEVGARAQEILDESHVNSRMGCQATQLTSRYQALLLQVLEQIKFLEEEIQSLEESESSLSSYSDWYGSTHKNFKNVATKIDKVDTVMMGKKLKTLEVLLKDMEKGHSLLKSAREKGERAVKYLEEGEAERLRKEIHDHMEQLKELTSTVRKEHMTLEKGLHLAKEFSDKCKALTQWIAEYQEILHVPEEPKMELYEKKAQLSKYKSLQQTVLSHEPSVKSVREKGEALLELVQDVTLKDKIDQLQSDYQDLCSIGKAMMEEIAGFEDRLNNLQMKGDTLIGQCADHLQAKLKQNVHAHLQGTKDSYSAICSTAQRMYQSLEHELQKHVSRQDTLQQCQAWLSAVQPDLEPSPQPPLSRAEAIKQVKHFRALQEQARTYLDLLCSMCDLSNASVKTTAKDIQQTEQTIEQKLVQAQNLTQGWEEIKHLKSELWIYLQDADQQLQNMKRRHSELELNIAQNMVSQVKDFVKKLQSKQASVNTIIEKVNKLTKKEESPEHKEINHLNDQWLDLCRQSNNLCLQREEDLQRTRDYHDCMNVVEVFLEKFTTEWDNLARSDAESTAVHLEALKKLALALQERKYAIEDLKDQKQKMIEHLNLDDKELVKEQTSHLEQRWFQLEDLIKRKIQVSVTNLEELNVVQSRFQELMEWAEEQQPNIAEALKQSPPPDMAQNLLMDHLAICSELEAKQMLLKSLIKDADRVMADLGLNERQVIQKALSDAQSHVNCLSDLVGQRRKYLNKALSEKTQFLMAVFQATSQIQQHERKIMFREHICLLPDDVSKQVKTCKSAQASLKTYQNEVTGLWAQGRELMKEVTEQEKSEVLGKLQELQSVYDSVLQKCSHRLQELEKNLVSRKHFKEDFDKACHWLKQADIVTFPEINLMNESSELHTQLAKYQNILEQSPEYENLLLTLQRTGQTILPSLNEVDHSYLSEKLNALPRQFNVIVALAKDKFYKVQEAILARKEYASLIELTTQSLSELEAQFLRMSKVPTDLAVEEALSLQDGCRAILDEVAGLGEAVDELNQKKEGFRSTGQPWQPDKMLHLVTLYHRLKRQTEQRVSLLEDTTSAYQEHEKMCQQLERQLKSVKEEQSKVNEETLPAEEKLKMYHSLAGSLQDSGIVLKRVTIHLEDLAPHLDPLAYEKARHQIQSWQGELKLLTSAIGETVTECESRMVQSIDFQTEMSRSLDWLRRVKAELSGPVYLDLNLQDIQEEIRKIQIHQEEVQSSLRIMNALSHKEKEKFTKAKELISADLEHSLAELSELDGDIQEALRTRQATLTEIYSQCQRYYQVFQAANDWLEDAQELLQLAGNGLDVESAEENLKSHMEFFSTEDQFHSNLEELHSLVATLDPLIKPTGKEDLEQKVASLELRSQRMSRDSGAQVDLLQRCTAQWHDYQKAREEVIELMNDTEKKLSEFSLLKTSSSHEAEEKLSEHKALVSVVNSFHEKIVALEEKASQLEKTGNDASKATLSRSMTTVWQRWTRLRAVAQDQEKILEDAVDEWTGFNNKVKKATEMIDQLQDKLPGSSAEKASKAELLTLLEYHDTFVLELEQQQSALGMLRQQTLSMLQDGAAPTPGEEPPLMQEITAMQDRCLNMQEKVKTNGKLVKQELKDREMVETQINSVKCWVQETKEYLGNPTIEIDAQLEELQILLTEATNHRQNIEKMAEEQKEKYLGLYTILPSELSLQLAEVALDLKIRDQIQDKIKEVEQSKATSQELSRQIQKLAKDLTTILTKLKAKTDNVVQAKTDQKVLGEELDGCNSKLMELDAAVQKFLEQNGQLGKPLAKKIGKLTELHQQTIRQAENRLSKLNQAASHLEEYNEMLELILKWIEKAKVLAHGTIAWNSASQLREQYILHQTLLEESKEIDSELEAMTEKLQYLTSVYCTEKMSQQVAELGRETEELRQMIKIRLQNLQDAAKDMKKFEAELKKLQAALEQAQATLTSPEVGRLSLKEQLSHRQHLLSEMESLKPKVQAVQLCQSALRIPEDVVASLPLCHAALRLQEEASRLQHTAIQQCNIMQAAVVQYEQYEQEMKHLQQLIEGAHREIEDKPVATSNIQELQAQISRHEELAQKIKGYQEQIASLNSKCKMLTMKAKHATMLLTVTEVEGLAEGTEDLDGELLPTPSAHPSVVMMTAGRCHTLLSPVTEESGEEGTNSEISSPPACRSPSPVANTDASVNQDIAYYQALSAERLQTDAAKIHPSTSASQEFYEPGLEPSATAKLGDLQRSWETLKNVISEKQRTLYEALERQQKYQDSLQSISTKMEAIELKLSESPEPGRSPESQMAEHQALMDEILMLQDEINELQSSLAEELVSESCEADPAEQLALQSTLTVLAERMSTIRMKASGKRQLLEEKLNDQLEEQRQEQALQRYRCEADELDSWLLSTKATLDTALSPPKEPMDMEAQLMDCQNMLVEIEQKVVALSELSVHNENLLLEGKAHTKDEAEQLAGKLRRLKGSLLELQRALHDKQLNMQGTAQEKEESDVDLTATQSPGVQEWLAQARTTWTQQRQSSLQQQKELEQELAEQKSLLRSVASRGEEILIQHSAAETSGDAGEKPDVLSQELGMEGEKSSAEDQMRMKWESLHQEFSTKQKLLQNVLEQEQEQVLYSRPNRLLSGVPLYKGDVPTQDKSAVTSLLDGLNQAFEEVSSQSGGAKRQSIHLEQKLYDGVSATSTWLDDVEERLFVATALLPEETETCLFNQEILAKDIKEMSEEMDKNKNLFSQAFPENGDNRDVIEDTLGCLLGRLSLLDSVVNQRCHQMKERLQQILNFQNDLKVLFTSLADNKYIILQKLANVFEQPVAEQIEAIQQAEDGLKEFDAGIIELKRRGDKLQVEQPSMQELSKLQDMYDELMMIIGSRRSGLNQNLTLKSQYERALQDLADLLETGQEKMAGDQKIIVSSKEEIQQLLDKHKEYFQGLESHMILTETLFRKIISFAVQKETQFHTELMAQASAVLKRAHKRGVELEYILETWSHLDEDQQELSRQLEVVESSIPSVGLVEENEDRLIDRITLYQHLKSSLNEYQPKLYQVLDDGKRLLISISCSDLESQLNQLGECWLSNTNKMSKELHRLETILKHWTRYQSESADLIHWLQSAKDRLEFWTQQSVTVPQELEMVRDHLNAFLEFSKEVDAQSSLKSSVLSTGNQLLRLKKVDTATLRSELSRIDSQWTDLLTNIPAVQEKLHQLQMDKLPSRHAISEVMSWISLMENVIQKDEDNIKNSIGYKAIHEYLQKYKGFKIDINCKQLTVDFVNQSVLQISSQDVESKRSDKTDFAEQLGAMNKSWQILQGLVTEKIQLLEGLLESWSEYENNVQCLKTWFETQEKRLKQQHRIGDQASVQNALKDCQDLEDLIKAKEKEVEKIEQNGLALIQNKKEDVSSIVMSTLRELGQTWANLDHMVGQLKILLKSVLDQWSSHKVAFDKINSYLMEARYSLSRFRLLTGSLEAVQVQVDNLQNLQDDLEKQERSLQKFGSITNQLLKECHPPVTETLTNTLKEVNMRWNNLLEEIAEQLQSSKALLQLWQRYKDYSKQCASTVQQQEDRTNELLKAATNKDIADDEVATWIQDCNDLLKGLGTVKDSLFFLHELGEQLKQQVDASAASAIQSDQLSLSQHLCALEQALCKQQTSLQAGVLDYETFAKSLEALEAWIVEAEEILQGQDPSHSSDLSTIQERMEELKGQMLKFSSMAPDLDRLNELGYRLPLNDKEIKRMQNLNRHWSLISSQTTERFSKLQSFLLQHQTFLEKCETWMEFLVQTEQKLAVEISGNYQHLLEQQRAHELFQAEMFSRQQILHSIIIDGQRLLEQGQVDDRDEFNLKLTLLSNQWQGVIRRAQQRRGIIDSQIRQWQRYREMAEKLRKWLVEVSYLPMSGLGSVPIPLQQARTLFDEVQFKEKVFLRQQGSYILTVEAGKQLLLSADSGAEAALQAELAEIQEKWKSASMRLEEQKKKLAFLLKDWEKCEKGIADSLEKLRTFKKKLSQSLPDHHEELHAEQMRCKELENAVGSWTDDLTQLSLLKDTLSAYISADDISILNERVELLQRQWEELCHQLSLRRQQIGERLNEWAVFSEKNKELCEWLTQMESKVSQNGDILIEEMIEKLKKDYQEEIAIAQENKIQLQQMGERLAKASHESKASEIEYKLGKVNDRWQHLLDLIAARVKKLKETLVAVQQLDKNMSSLRTWLAHIESELAKPIVYDSCNSEEIQRKLNEQQELQRDIEKHSTGVASVLNLCEVLLHDCDACATDAECDSIQQATRNLDRRWRNICAMSMERRLKIEETWRLWQKFLDDYSRFEDWLKSSERTAAFPSSSGVIYTVAKEELKKFEAFQRQVHECLTQLELINKQYRRLARENRTDSACSLKQMVHEGNQRWDNLQKRVTSILRRLKHFIGQREEFETARDSILVWLTEMDLQLTNIEHFSECDVQAKIKQLKAFQQEISLNHNKIEQIIAQGEQLIEKSEPLDAAIIEEELDELRRYCQEVFGRVERYHKKLIRLPLPDDEHDLSDRELELEDSAALSDLHWHDRSADSLLSPQPSSNLSLSLAQPLRSERSGRDTPASVDSIPLEWDHDYDLSRDLESAMSRALPSEDEEGQDDKDFYLRGAVGLSDVMIPESPEAYVKLTENAIKNTSGDHSALESQIRQLGKALDDSRFQIQQTENIIRSKTPTGPELDTSYKGYMKLLGECSSSIDSVKRLEHKLKEEEESLPGFVNLHSTETQTAGVIDRWELLQAQALSKELRMKQNLQKWQQFNSDLNSIWAWLGDTEEELEQLQRLELSTDIQTIELQIKKLKELQKAVDHRKAIILSINLCSPEFTQADSKESRDLQDRLSQMNGRWDRVCSLLEEWRGLLQDALMQCQGFHEMSHGLLLMLENIDRRKNEIVPIDSNLDAEILQDHHKQLMQIKHELLESQLRVASLQDMSCQLLVNAEGTDCLEAKEKVHVIGNRLKLLLKEVSRHIKELEKLLDVSSSQQDLSSWSSADELDTSGSVSPTSGRSTPNRQKTPRGKCSLSQPGPSVSSPHSRSTKGGSDSSLSEPGPGRSGRGFLFRVLRAALPLQLLLLLLIGLACLVPMSEEDYSCALSNNFARSFHPMLRYTNGPPPL

SEQ ID NO: 784 - DNA, 3894 bp, Homo sapiens
aaggtaaagccactagagagaaactgaaagaaaacattcttaagataaattgaattgacattttctctctaaaatatgatttatagaccacagataggaattaagagtttcctgataattttggcttcatattattttaaaggattatcaagaggaaattgctattgctcaagagaacaaaatacagctccaacaaatgggagaacgacttgctaaagccagccatgaaagcaaagcatctgagattgaatacaagctgggaaaggtcaacgaccggtggcagcatctcctggacctcattgcagccagggtgaagaagctgaaggagaccctggtagccgtgcagcagcttgataagaacatgagcagcctgaggacctggctcgctcacatcgagtcagagctggccaagccaatagtctacgattcctgtaactcggaagaaatacagagaaagcttaatgagcagcaggagcttcagagagacatagagaagcacagtacaggtgttgcatctgtcctcaacctgtgtgaagtcctgctgcacgactgtgacgcctgtgccactgatgccgagtgtgactctatacagcaggctacgagaaacctggaccggcggtggagaaacatttgtgctatgtccatggaaaggaggctgaaaatcgaagagacgtggcgattgtggcagaaatttctggatgactattcacgttttgaagattggctgaagtcttcagaaaggacagctgcttttcccagctcttctggggtgatctatacagttgccaaggaagaactaaagaaatttgaggctttccagcgacaggtccacgagtgcctgacgcagctggaactgatcaacaagcagtaccgccgcctggccagggagaaccgcactgattcagcatgtagcctcaaacagatggttcacgaaggcaaccagagatgggacaacctgcaaaagcgtgtcacctccatcttgcgcagactcaagcattttattggccagcgtgaggagtttgagactgcgcgggacagcattctggtctggctcacagagatggatctgcagctcactaatattgaacatttttctgagtgtgatgttcaagctaaaataaagcaactcaaggccttccagcaggaaatttcactgaaccacaataagattgagcagataattgcccaaggagaacagctgatagaaaagagtgagcccttggatgcagcgatcatcgaggaggaactagatgagctccgacggtactgccaggaggtcttcgggcgtgtggaaagataccataagaaactgatccgcctgcctctcccagacgatgagcacgacctctcagacagggagctggagctggaagactctgcagctctgtcggacctgcactggcacgaccgctctgcagacagcctgctttctccacagccttcctccaatctctccctctcgctcgctcagcccctccggagcgagcggtcaggacgagacaccccggctagtgtggactccatccccctggagtgggatcacgactatgacctcagtcgggacctggagtctgcaatgtccagagctctgccctctgaggatgaagaaggtcaggatgacaaagatttctacctccggggagctgttggcttatcagatgtaatgatccccgaaagccctgaggcctatgtaaaactcacagaaaatgcaatcaaaaatacctccggggaccacagtgccctagagtcacagatccgacaactgggcaaagccctggatgatagccgttttcagatacagcaaaccgaaaatatcattcgcagcaaaactcccacggggccggagctagacaccagctacaaaggctacatgaaactgctgggcgaatgcagtagcagtatagactccgtgaagagactggagcacaaactgaaggaggaagaggagagccttcctggctttgttaacctgcatagtaccgaaacccaaacggctggtgtgattgaccgatgggagcttctccaggcccaggcattgagcaaggagttgaggatgaagcagaacctccagaagtggcagcagtttaactcagacttgaacagcatctgggcctggctgggggacacggaggaggagttggaacagctccagcgtctggaactcagcactgacatccagaccatcgagctccagatcaaaaagctcaaggagctccagaaagctgtggaccaccgcaaagccatcatcctctccatcaatctctgcagccctgagttcacccaggctgacagcaaggagagccgggacctgcaggatcgcttgtcgcagatgaatgggcgctgggaccgagtgtgctctctgctggaggagtggcggggcctgctgcaggatgccctgatgcagtgccagggtttccatgaaatgagccatggtttgcttcttatgctggagaacattgacagaaggaaaaatgaaattgtccctattgattctaaccttgatgcagagatacttcaggaccatcacaaacagcttatgcaaataaagcatgagctgttggaatcccaactcagagtagcctctttgcaagacatgtcttgccaactactggtgaatgctgaaggaacagactgtttagaagccaaagaaaaagtccatgttattggaaatcggctcaaacttctcttgaaggaggtcagtcgtcatatcaaggaactggagaagttattagacgtgtcaagtagtcagcaggatttgtcttcctggtcttctgctgatgaactggacacctcagggtctgtgagtcccacatcaggaaggagcaccccaaacagacagaaaacgccacgaggcaagtgtagtctctcacagcctggaccctctgtcagcagtccacatagcaggtccacaaaaggtggctccgattcctccctttctgagccagggccaggtcggtccggccgcggcttcctgttcagagtcctccgagcagctcttccccttcagcttctcctgctcctcctcatcgggcttgcctgccttgtaccaatgtcagaggaagactacagctgtgccctctccaacaactttgcccggtcattccaccccatgctcagatacacgaatggccctcctccactctgaactaagcagatgccatctgcagaagtgctggtagcataaggaggatcgggtcataagcaatcccaaactaccaacaagaggaccttgatcttggcgaaagccctcggtgtggcagctttagccctcctccagatcacatgtgtgcaaattatggcttcagaggtggaagataaacagtgacgggggaacaaacagacaacaagaaggtttggaagaaatctggtttgagactctgaaccttagcactaaggagattgagtaaggacctccaaagttccccggactcatgaattctgggcccttggcccattctgtgcacagccaaggacttcagtagaccatctgggcagctttcccatggtgctgctccaaccatcagataaatgaccctcccaagcaccatgtcagtgtcgtacaatctaccaaccaaccagtgctgaagagattttagaaccttgtaacatacaatttttaagagcttatatggcagcttcctttttaccttgttttcctttggggcatgatgttttaacctttgctttagaagcacaagctgtaaatctaaaaggcacttttttttagaggtataaagaaaaactagatgtaataaataagatcatggaaggctttatgtgaaaaaagttgaatgttatagtaaaaaaaaaaagatatttatgtatgtacagtttgctaaagccaagttttgtttgtattgatttctttgcatttattatagatattataaaata

SEQ ID NO: 785 - protein, 982 aa, Homo sapiens
MGERLAKASHESKASEIEYKLGKVNDRWQHLLDLIAARVKKLKETLVAVQQLDKNMSSLRTWLAHIESELAKPIVYDSCNSEEIQRKLNEQQELQRDIEKHSTGVASVLNLCEVLLHDCDACATDAECDSIQQATRNLDRRWRNICAMSMERRLKIEETWRLWQKFLDDYSRFEDWLKSSERTAAFPSSSGVIYTVAKEELKKFEAFQRQVHECLTQLELINKQYRRLARENRTDSACSLKQMVHEGNQRWDNLQKRVTSILRRLKHFIGQREEFETARDSILVWLTEMDLQLTNIEHFSECDVQAKIKQLKAFQQEISLNHNKIEQIIAQGEQLIEKSEPLDAAIIEEELDELRRYCQEVFGRVERYHKKLIRLPLPDDEHDLSDRELELEDSAALSDLHWHDRSADSLLSPQPSSNLSLSLAQPLRSERSGRDTPASVDSIPLEWDHDYDLSRDLESAMSRALPSEDEEGQDDKDFYLRGAVGLSDVMIPESPEAYVKLTENAIKNTSGDHSALESQIRQLGKALDDSRFQIQQTENIIRSKTPTGPELDTSYKGYMKLLGECSSSIDSVKRLEHKLKEEEESLPGFVNLHSTETQTAGVIDRWELLQAQALSKELRMKQNLQKWQQFNSDLNSIWAWLGDTEEELEQLQRLELSTDIQTIELQIKKLKELQKAVDHRKAIILSINLCSPEFTQADSKESRDLQDRLSQMNGRWDRVCSLLEEWRGLLQDALMQCQGFHEMSHGLLLMLENIDRRKNEIVPIDSNLDAEILQDHHKQLMQIKHELLESQLRVASLQDMSCQLLVNAEGTDCLEAKEKVHVIGNRLKLLLKEVSRHIKELEKLLDVSSSQQDLSSWSSADELDTSGSVSPTSGRSTPNRQKTPRGKCSLSQPGPSVSSPHSRSTKGGSDSSLSEPGPGRSGRGFLFRVLRAALPLQLLLLLLIGLACLVPMSEEDYSCALSNNFARSFHPMLRYTNGPPPL

SEQ ID NO: 786 - DNA, 27745 bp, Homo sapiens
cccgggcagtggaaaccgtgggcaaaagttagctggcaggacagcgcagctcctccaggcagcggaggcagcgcgtcccggctctcagggacatttccttcccacctcgacccccgggaggtggtcccggtataaaggctcgctgagcgggtgggtcacagcacagctttgcagctgcggagaaacgcccaaggccgtgcatctccaggagggcggctgggctcccgcagtcctgcagaccgcgcccgatcccggcgacagggcgggcggacagccgcgcatccccggggtcccgccgagcctgggcgcagagagccgggaggaagcgttcgctcgcttcgccttgctgctgggaaactgaacgaggccgagagagaaggttcttgagttcatgtaagaggacagtcttaaaacggaagaagaaaaagaagcagttcagtctttgggagagctgcctccttgttgagtgctgcaaaggcctggaattcatttatgacagaatagatctagaaaagtccaagcatgttttctagagtggtgtagccctgtgctgcctccagtgaagagtctcttggtgttggcttcgtgcttccggagggaccatggcaacctccagaggggcctcccggtgtcctcgggatatcgccaatgtgatgcagaggctgcaagatgagcaagagatagtacaaaaacgaactttcacaaaatggatcaactctcatctggccaagcggaaacctccaatggtggtggacgatctttttgaagacatgaaagatggtgttaaactgcttgcccttctggaggtcctgtctgggcagaaactgccttgtgaacaaggacgccggatgaagcgaatccatgctgtggctaacattggcacggcactcaagttcctcgaaggaagaaagattaaattagtcaacattaactccaccgatatagctgatggccgaccctcaatagttcttggattgatgtggaccattattctatatttccagattgaagagttgaccagcaacctgccccagctccagtctttgtccagcagcgcatcctccgtggacagcatagttagctctgagactcccagcccaccaagtaaacggaaggtgaccaccaagatccaaggaaatgctaagaaggctttattaaagtgggttcagtacacagctggcaagcagactggaatagaagtaaaagattttgggaagagttggagaagcggggttgcctttcattcagttattcatgccattcgaccggaattggtggacttggagacagtgaaaggcagatccaaccgagaaaatttggaggatgctttcactatcgccgaaacagaactggggatcccaagactgctagatcctgaagacgttgatgtggataaaccagatgagaaatctattatgacctatgtagcccagtttctgaaacattatcctgacatccacaatgcaagcactgatgggcaagaggatgatgaaatacttccaggtttcccatcttttgcaaattctgtacaaaattttaagagagaagacagagtaatttttaaggaaatgaaagtttggatagaacaatttgagagagatttgacaagagcacagatggtggaatcaaatttacaggataaatatcagtcatttaagcacttcagagttcaatatgaaatgaagaggaaacagattgaacatttaatacaaccattacacagagacggtaaattgtcacttgaccaagcattggtaaaacaatcttgggatagagtgacctccaggctctttgactggcatatacagcttgataaatctcttcctgcacctctgggcaccataggtgcctggctgtacagagcggaggtggccctgagagaggaaataaccgttcaacaggtccacgaggaaacagcaaacacgatacaacggaaacttgagcaacataaggatctgcttcaaaacacggatgcccacaaaagagcattccatgaaatctaccggaccaggtctgttaacgggattccagtgccacctgatcaattagaggacatggccgagaggtttcattttgtttcctccacatcagagctacacctaatgaaaatggaatttttagaattaaagtaccgtctgctctcactgctggttcttgcagagtcaaagctgaagtcttggatcattaagtacgggaggagagagtcagtggagcagcttctacaaaactacgtgtcttttatagaaaatagcaagttctttgaacaatatgaggtgacataccagatcttgaaacagacagctgagatgtatgtcaaagcagatggttcagtggaagaagctgagaatgtgatgaaattcatgaatgaaaccaccgctcagtggaggaatctctcagtagaagtgaggagtgtgaggagcatgctggaagaagtgatctctaactgggatcgctatggcaatacagtggctagtctgcaagcctggctagaggatgctgaaaaaatgctcaatcaatcagaaaatgccaaaaaggatttttttcgaaatttacctcattggattcagcagcatactgccatgaacgatgctggcaattttctaattgaaacctgtgatgagatggtttcccgtgacctgaagcagcaattactgttgctaaatgggcggtggagggagttgtttatggaagtcaagcaatatgctcaagctgatgagatggacagaatgaagaaggaatacacagactgtgttgttaccctgtctgcttttgcaacggaagcccataagaaactttctgaacccttagaagtctcttttatgaatgtcaagctattaattcaagacttggaggatattgagcagagggtgcctgtgatggatgcccaatacaagataattacaaagacagcacacctcattaccaaagaaagcccccaagaagaaggaaaagaaatgtttgcgaccatgtcaaagctcaaagagcagctaaccaaggtcaaagaatgttactccccactcctttatgagtctcagcagctgttgattccgttggaggaattagaaaagcagatgacgtccttttatgactcacttgggaaaatcaatgaaattatcacagttcttgagcgtgaggcacaatcgagtgccctttttaaacaaaaacatcaggaactgttagcttgtcaagaaaactgtaagaaaaccttgacacttattgagaaaggcagtcaaagtgttcaaaagtttgtgaccttgagcaacgtgttaaagcattttgatcagacgaggctacaaagacagattgcagatattcatgttgcttttcagagtatggtaaagaaaactggagattggaagaagcatgtggaaaccaacagtcgcttgatgaagaagtttgaggagtctcgagcagagttggagaaggtactgcggattgctcaggagggcctggaggaaaagggggatccagaggagctcctgcggagacacactgagtttttcagtcagctggatcagagggtgctcaatgctttcctgaaagcttgtgatgaactcaccgacatccttccagagcaggagcagcaggggctgcaggaagctgttcgaaagctccacaaacaatggaaggatcttcaaggagaagccccttatcatttgcttcatctgaagattgatgtggagaagaataggttcttagcctctgtagaagaatgcagaactgagctggatcgagagaccaagctgatgccccaggaaggcagtgaaaagataattaaagagcacagggttttcttcagtgacaaaggtcctcatcatctctgtgagaaaaggttacagctcatcgaggaactctgtgtgaaactcccagtgcgggacccagtaagggacacacctggaacctgtcacgtgactctcaaagagctcagagctgccattgacagcacctacaggaagctcatggaagacccagacaagtggaaggactacactagcagattctctgagttctcatcttggatatctacaaatgagacacaattaaaggggatcaagggtgaggccatcgatactgccaaccacggagaggttaaacgtgccgttgaagagatcagaaatggtgttaccaaaaggggtgagaccctcagctggctgaaatccaggctgaaagttttgacagaagtttcttctgagaatgaagcccaaaagcagggagatgagctggcaaaattatccagctctttcaaggctcttgtgacgctgctgtcagaggttgaaaagatgctaagcaattttggggactgtgtccagtacaaagaaatagtcaaaaattctctcgaagaattaatttctggctctaaagaagtccaggaacaagctgagaagatcttggatactgaaaatctgtttgaagcacagcagttacttcttcatcaccagcaaaagacaaagcggatctcagcaaagaagagagatgtgcagcagcagatcgcgcaggcgcagcagggagaaggggggctgcctgaccgaggccacgaggagctgcggaagctggagagcacactggatggcctggagcgcagccgggagaggcaggaacgccgcatccaggtcacattaagaaaatgggagcgatttgaaacaaacaaagaaacagtagtaagatacctttttcaaacaggttccagtcatgaacgcttcttgagttttagcagtttggaaagtttatcttcagaactggaacaaacaaaggagttttctaaacggacagaaagtattgcagtccaggctgagaaccttgtaaaggaagcttcagagataccgcttgggccccaaaataagcagctgcttcaacagcaggccaagtcaatcaaagaacaagtcaaaaaattagaagacacgcttgaagaagatattaaaaccatggaaatggtgaaaaccaagtgggatcattttggcagtaattttgagactctgtccgtctggataactgagaaagaaaaagaactcaatgccttggaaacttcgtcatctgccatggacatgcaaatcagccaaattaaggtcacaattcaggaaatagaaagtaagctcagcagcattgtaggattagaagaagaagcccagtcttttgctcagtttgttaccactggagaatctgctcgaattaaagccaagttgacacaaataagaagatacggggaagagcttcgagagcatgcacagtgtctggaaggaacaatcctgggacatttatctcagcagcaaaagtttgaagagaaccttagaaagatccagcaatctgtgtctgaatttgaagataaacttgctgttccaattaaaatatgttcttcagctacagaaacatacaaagttcttcaagaacatatggatctctgccaggccctggagtcactgagcagcgcgatcactgccttctcagccagtgccaggaaggttgtgaacagagattcctgtgttcaggaggctgcggctctacagcagcaatacgaggacatcctaaggagggcgaaggagagacagacggcgctggagaatctgctggcccactggcagaggctagagaaagaactatcatcctttttgacctggttagagcggggtgaagctaaagccagttccccagaaatggacatttctgcagacagagtcaaagtggaaggtgaacttcagttaatacaggcactgcaaaatgaagttgtatcccaggcctcattctatagcaaacttttgcaattgaaggaatcattgttctcagtagcctccaaagatgatgtgaaaatgatgaaactacatttggagcagttggatgagagatggagagatttaccacagatcattaacaaaaggattaattttcttcagtctgtggttgctgaacaccagcaatttgatgagctgctgctttccttttctgtctggattaaactgtttctcagtgaattacaaactacctctgagattagcataatggaccatcaagtagcccttactcggcataaggaccacgcagcagaagtagagagcaaaaagggcgaattgcagagtctgcagggtcacttagcaaagttgggttctctgggccgtgctgaggacctccacctcctgcagggaaaggctgaggactgcttccagctgtttgaggaggccagccaggttgtggagaggcggcagcttgccctgtcccatttggcagaattcctccagagccatgcctctctgtccggcattctccgccagctgaggcaaacagtggaagcaaccaacagtatgaataagaacgagtctgatttgatagaaaaggacctcaatgatgctcttcaaaatgctaaagcattagaatctgctgccgtcagtctggatggcattctttccaaagcccaataccatctgaaaatcgggagctctgagcaaaggacttcctgcagagccacggctgatcagctctgtggagaggtagagaggatccagaaccttctgggaaccaagcagagtgaggcagatgctctggcagtgttgaaaaaagcattccaagaccagaaagaggagcttctgaaaagcattgaggacattgaagaaaggactgacaaagagcgattgaaagaacctacccgccaagctcttcagcagaggttaagagtgtttaatcagctagaagatgaattgaattctcacgagcatgaactatgttggttgaaagacaaagccaagcaaattgcccagaaagatgtagcttttgcacctgaagttgacagggagataaaccgcttagaggtcacctgggatgataccaaaagactaattcatgaaaatcagggtcagtgctgtggacttattgacttaatgagagaatatcagaacctgaaatcagctgtatctaaagtcttagaaaatgccagcagtgtgattgtaaccagaactaccataaaagatcaggaggatcttaaatgggctttttccaagcatgaaactgccaagaacaaaatgaattacaaacagaaagacttggataactttaccagcaaaggaaaacacttgttatctgagctgaagaaaattcacagtagtgatttcagcttggtgaaaacagacatggagagcaccgtggacaaatggctggatgtatcagagaaacttgaagaaaacatggataggctgagagtaagcctgtccatttgggatgatgtactgtcaactagagatgagattgagggatggtcaaacaactgcgttccacagatggcagaaaacatcagcaacctggataaccacctcagagctgaagaactgcttaaagaatttgagtctgaagttaaaaacaaagcattgagattggaagaactgcattccaaagttaatgatctgaaagaattaactaaaaatctagaaacaccgccagaccttcagtttatagaagcagacttaatgcagaaactggagcatgccaaagaaataactgaagtagcaaaaggaaccctgaaggatttcacggctcaaagtacacaagtggagaagtttattaatgacataacaacatggttcacaaaagtggaagaatcgttgatgaactgtgcccaaaatgagacttgtgaagcattgaaaaaagtcaaggatatacaaaaagaacttcaaagtcaacaaagcaacatcagctctacccaagaaaatctcaatagcttgtgccgcaagtaccactcagctgagttggagagcctgggccgtgcaatgactggtctgataaagaaacatgaagccgtgagccagttgtgctccaaaacccaggccagcctgcaggaatctctggaaaaacacttcagtgagtctatgcaggaattccaagaatggtttttgggagcaaaggcagcagcaaaagaatcatcagatcgcaccggtgacagcaaagttctagaagcaaagctccatgatcttcagaacattttggactcagtcagtgatgggcagagcaaacttgatgcagtgactcaagaaggacaaactttgtatgcacatttgtctaaacaaattgtcagtagcattcaagaacaaatcacaaaggccaatgaagagtttcaagcatttctgaaacaatgccttaaagataagcaggctcttcaagactgtgcttcagaacttggaagctttgaagatcagcacagaaaactgaacttatggatccatgaaatggaagaaaggttcaatacggaaaacttgggagagagtaaacagcacattcctgagaagaaaaatgaagttcataaagttgaaatgtttttgggagaactgctggctgcaagagagtctcttgataagctttcccagagagggcagcttctgagtgaagaaggccacggtgctgggcaggagggccgcctgtgttcccagctcctcacaagccaccagaacctacttagaatgaccaaagagaaactccggagctgccaggtggcccttcaggagcacgaagccctggaggaagcactgcaaagcatgtggttctgggtgaaggccattcaggacagactggcctgtgcagagagcactcttgggagcaaagacaccctggagaaacggctgtcacaaatacaggatattctcctgatgaaaggtgaaggggaagttaagttgaatatggccattggcaagggggaacaggccttgagaagtagcaacaaagaaggtcagagggtgattcagactcagttagagacccttaaagaagtgtgggctgacatcatgagctcctccgtccacgctcaaagcactttagagtctgtgattagccaatggaatgactatgtagagaggaaaaaccagttggagcagtggatggaatcagtggatcaaaaaatagaacatcccttacaaccacagccaggtctgaaagagaagttcgtcctgcttgaccacctccagtccatcctgtctgaggcagaagatcacacgagagcccttcaccgtctaattgcgaagtccagggagctctacgaaaagacagaggatgagtctttcaaggacacagctcaagaggagctgaaaacacagtttaatgatataatgactgttgccaaggaaaaaatgaggaaagtggaagagattgtgaaagatcatctaatgtatttagatgcggtccacgagttcacagattggctccattcagcaaaggaagaacttcaccggtggtcagatatgtctggagattcatcagccacccagaaaaagttatcaaaaattaaggagctgatagattccagagagattggtgcaagccgtctcagcagagtggagtcgctggctcccgaagtgaaacagaacacaactgccagtgggtgtgagctcatgcacacggagatgcaggccctgcgtgccgactggaagcagtgggaagacagtgtattccaaacgcagagctgtttggagaacctggtcagccagatggccctttcggagcaggaattctcaggccaagtggctcaactggagcaggccctggaacagttcagtgcccttctgaaaacctgggctcagcagttaaccctcctggaaggcaagaacacggatgaggagatagtggaatgctggcacaaaggacaagagatactggatgctttgcaaaaagcagagcctagaacagaggatctcaagtctcagctgaatgaactttgtcgattttccagagacctgagtacctacagtggaaaagtttctggcttgattaaagagtataattgtctttgtttgcaagcatccaagggctgccagaataaagaacagattttacagcaaagatttcgaaaggccttcagggatttccagcagtggttggttaatgcaaaaatcactaccgccaagtgttttgatatacctcaaaatataagtgaagtttcaactagtcttcagaaaatacaggagtttttgtcagaaagtgaaaatggacagcacaagctaaacatgatgctgtctaaaggggaacttctgagtaccctgctgaccaaagagaaagcgaaagggatccaggccaaagttacagctgcaaaagaagattggaaaaattttcattcaaatctccaccaaaaagaatctgctctagagaatctaaagatccaaatgaaggactttgaagtaagtgctgagcctatccaggactggctgagtaaaactgagaagatggtccatgaaagcagcaatcgcctctatgatctgccagcaaagaggagggagcagcagaagctccagtctgtccttgaggaaatacactgctacgagcctcagctcaacaggctgaaagagaaagctcagcagctgtgggaaggacaagctgccagcaagagctttaggcacagagtgtcgcagctgtcttctcagtatctagcgctaagcaatttaacaaaggagaaagtgtcaagactggatagaatcgttgcagaacacaatcagttctctcttgggattaaagaattacaagactggatgacggatgcgattcacatgctggattcatactgccacccgacatccgacaaaagtgtgctggacagcaggacgctcaagctcgaggctctattatcagtcaaacaggaaaaagagattcagatgaaaatgatagtgaccaggggagaatctgtccttcagaatacttctccagaaggcattcccactattcagcagcagctgcagagtgtgaaggatatgtgggcatcccttttgtctgcagggattcgttgtaaaagccaactcgaaggagctctctccaagtggacaagttatcaggatggcgttcgacagttctccggttggatggatagtatggaagccaacctgaatgaatcagaaaggcagcatgcggagctgcgggataaaacaacgatgctcggaaaagccaagttattaaatgaagaagtgctgagttacagcagcttgctggagaccatcgaagtcaaaggggctggcatgacagaacactatgtcacccagctagaactccaggatctacaggaacgatacagagccatccaagagagggccaaggaagccgtaaccaagtctgaaaaacttgtccgcctgcaccaagagtatcagagagacctaaaggcatttgaagtttggttggggcaagaacaagaaaagctcgaccagtattcagttcttgaaggtgatgcccacactcatgagacaacattgcgtgatcttcaggagctacaggtacactgtgcagaggggcaggccctgttgaactcagtgctgcacaccagagaggatgtgatcccatcaggtatcccacaggcagaggaccgggctttagagtctctccggcaagactggcaggcttaccagcacaggctgtccgagactcgaactcagttcaataacgtggtgaacaaattgaggctaatggagcaaaagtttcagcaagtagatgaatggctcaaaacagcagaggagaaagttagtcccaggaccagacgtcagtctaacagggcaaccaaggagatacaattacatcagatgaagaagtggcacgaagaagtgactgcatacagagatgaagttgaggaagtgggagctagagctcaggagatactggacgagagccacgtgaacagcagaatgggttgccaggccacccagctgacttccagataccaggccctgcttctccaagtgctggaacaaataaaattcctggaggaggagattcagagtttggaggaatcagaatcatccctcagttcctattctgattggtatggctctactcataaaaacttcaagaatgtggctaccaagattgacaaagtagatacagtaatgatggggaagaaattgaagacgttggaggttttgctcaaagacatggagaaaggtcacagtttgctgaaatcagcccgggagaaaggagagagggctgttaaatacttggaggaaggcgaggcagagaggttaagaaaggagattcatgatcacatggagcagttgaaggaactgaccagcactgtccggaaagaacacatgacgctggaaaaaggtcttcatttagcaaaggaattctcagataaatgcaaagcactgacacagtggatagcagaataccaggaaattctacatgttcctgaagaacccaaaatggaattatatgagaaaaaagctcagttatctaaatacaagtcacttcaacaaacggtgctgtcccatgaaccatcagtaaagtcagtgagagagaagggtgaagctcttttggaactggtgcaggacgtcactttaaaggacaaaatagatcaacttcaaagtgattaccaggacctgtgcagcataggaaaggagcatgtcttcagtctggaggcgaaagtcaaagaccatgaagactacaacagtgagctccaagaggtcgaaaagtggctgctgcagatgtctggcagactggtggcacctgacctcctggagacaagcagcctggagacaatcacccagcaattggcccaccacaaggcaatgatggaagaaattgctggttttgaagaccgtttgaacaatcttcaaatgaaaggtgatactttgattggccaatgtgcagaccacctgcaagcgaaacttaaacaaaacgtgcatgctcatctgcagggcacaaaggacagctactcagcgatctgcagcacagctcagaggatgtaccagagtttggaacacgaacttcagaagcacgtcagccgacaagacaccctgcagcagtgccaggcctggctttctgcagtccagccggatttagagccaagtcctcaaccacctcttagtagggcagaagccattaagcaggtcaaacacttcagagctttgcaagagcaggcaaggacctacctagatctcctttgctccatgtgtgacctgtcaaatgcttcggtgaaaaccacagcaaaagacattcaacaaacagagcaaacgattgaacaaaagcttgtccaggcccagaacttaactcagggctgggaagagatcaagcacctgaagtctgagctctggatttacctgcaagatgctgatcagcaactgcagaacatgaagaggaggcactctgagctggagctgaacattgcacagaacatggtttcacaagttaaggattttgttaagaaactacagagcaaacaggcatccgtgaacaccataatagaaaaggtgaataagttaacaaagaaggaggaatcgcctgaacacaaggaaataaatcatttaaatgatcagtggctcgatttgtgccgtcagtctaacaacctgtgcttgcaaagggaagaggatcttcagagaacaagagattaccatgactgtatgaatgttgttgaagtgttcctagaaaaatttactacagaatgggataacttggccagatctgatgcagagagtacagctgtccacctggaagctttgaaaaagttagcattggcattgcaggagagaaagtatgctattgaagatctgaaagatcaaaagcagaaaatgatagagcatctgaatttagatgacaaggagttagtcaaagaacagacgagtcatttagagcaacgttggtttcagcttgaggacctcattaaaaggaaaatccaagtgtcagtcaccaacttggaggagttaaatgtggtgcagtccagatttcaggagctaatggagtgggcagaagagcaacaacccaacatcgccgaggcccttaagcagagccctcctccagatatggctcagaaccttctcatggatcacctggccatctgcagtgaactggaggccaagcagatgctcctgaaatcgcttataaaggacgcagacagggtcatggcagatcttggtctcaatgagcgacaggtcatccagaaggctctctctgatgcacaaagccacgtgaattgtctcagtgacttagtgggccagcgaagaaagtacttaaacaaagccttgtccgagaaaacccagtttctcatggcagtgttccaggccaccagccaaattcagcaacatgagcgaaagataatgttccgtgaacacatctgtctgttaccagatgatgtgagcaaacaagtcaaaacatgtaagagtgcacaagccagcctcaagacttaccaaaatgaagtcactggactttgggcccagggtcgcgaactaatgaaggaagtcacagagcaggaaaagagtgaagtgctggggaagcttcaggaattgcagagtgtctatgacagtgttttacaaaagtgcagtcaccggttacaagaactagagaagaatttggtttctaggaagcattttaaggaagattttgataaagcttgccactggctaaaacaagcagatattgttacatttcctgaaatcaacctaatgaatgagagttctgagcttcatacacaactggctaaataccaaaacattcttgaacaatctccagaatatgaaaatcttctacttacgctgcagagaactgggcagaccatattaccatcgctgaatgaagtcgatcattcctacctcagtgaaaagctaaatgctttgcctcgacaatttaatgtaattgttgccttggctaaagacaagttctataaagtccaggaagcaattcttgctcggaaggaatatgcttccttgattgagttgacaacccagtctctgagtgaacttgaagcccaattcttgaggatgagcaaagttcccaccgacctggccgttgaggaggctctttctctgcaagatggttgcagagccattctggacgaggtggcgggccttggggaggcggtggatgaactgaaccagaaaaaagaaggttttcgcagcacaggtcagccttggcagccagacaagatgctgcaccttgtcaccttatatcacaggctgaagcgacaaacagaacagagggttagcttattagaagacaccaccagtgcttaccaagaacacgagaagatgtgccaacagctggagagacaactgaagtctgtaaaagaggagcagtccaaagtgaatgaggaaacgctgcctgcagaggagaagctcaaaatgtatcactccctggcaggaagtctccaggactcagggattgtactgaaacgagtaaccatacatcttgaagatcttgccccacaccttgaccccttggcttatgagaaagccaggcatcagatccagtcctggcaaggggagttaaaactgttgacttctgccattggtgagacggtgacagaatgtgagagccgaatggtgcagagtatagacttccagactgagatgagtcgctccctggactggctgaggagagtgaaggcagagctcagtgggccggtgtacctagacctcaacctgcaggacatccaagaggaaatcagaaaaatccaaattcatcaggaagaggtccagtccagcttgagaatcatgaatgcgctgagtcacaaggaaaaggagaagttcacaaaggccaaggagctgatttctgcggatttagaacacagcctcgctgagctctcagagctggatggagacatccaggaagccttacgcaccagacaggctaccttgactgaaatatatagccagtgtcaaaggtattatcaggtatttcaagcagccaatgactggcttgaggatgcccaagaattgttacagctggcaggcaatggcctagacgtggagagcgcagaggaaaatctcaaaagccacatggaatttttcagtacagaggatcagttccatagtaacctggaggagctccacagcctggtagccaccctggacccactcatcaagccaaccggcaaagaagacctagaacagaaagtggcttctctggaactcaggagccagaggatgagccgggactctggtgcccaagtggatctcttgcagagatgcacagctcaatggcacgattaccagaaagcaagggaagaggttattgaattgatgaatgatacagaaaagaaattgtctgagttttctttgttgaagacttcgtctagtcatgaagcggaagaaaaattgtcagaacacaaggctttagtgtcagtggttaactctttccatgagaaaattgtggcccttgaggaaaaagcttcacaactggagaaaaccggaaatgatgccagcaaagccaccctgagcaggtcaatgaccaccgtctggcagcgctggacacgccttcgagctgtggcccaggaccaggagaagatcctggaagatgcagtggatgagtggacgggctttaacaacaaggttaaaaaggccactgaaatgattgatcagctgcaagataagttacctggaagttcagcagagaaagcatcgaaagcagagctcttaactcttcttgaataccacgacacgttcgttctggagctggagcagcagcagtcggccttgggcatgctgcggcagcaaaccctgagcatgctccaggatggagccgccccaacccctggggaagagcctccgctcatgcaggaaatcaccgccatgcaagatcggtgcctgaacatgcaggagaaagtgaagactaatggaaagttggtgaagcaagagctgaaggaccgagaaatggtggagactcagatcaattctgtgaaatgttgggttcaggaaacgaaagaatatttagggaatccaacaatagaaatagatgctcaacttgaagaacttcagattctcctaacagaagccacaaatcaccgacagaacattgaaaaaatggcagaagaacagaaggagaagtacttaggtctttataccatattaccttctgaactctcccttcagttggctgaagtggcgttagatctaaagatccgagatcagatccaagacaaaataaaagaagttgagcagagcaaggccacgagccaggaactcagccggcaaattcagaagttagctaaagacctcacaactattctaactaagctgaaagcgaagacagataatgtagttcaagctaaaactgaccaaaaggtgctgggagaggaattagatggctgtaattcaaagttaatggaattagatgcagcagtacagaaattcttggaacagaatggccaactgggtaagccactggccaagaagataggaaaactgactgaacttcaccagcagaccattagacaagctgagaatcggctctccaagctcaatcaggcagcatcacatttagaagaatacaatgaaatgcttgaattaattttgaagtggattgaaaaagctaaagtcttggctcatggaactattgcatggaattctgcaagccagcttcgggaacaatatattttgcatcagaccctgctagaagaatccaaagaaattgacagtgagctggaagcaatgactgagaaattacagtacctcactagcgtgtactgtacagaaaaaatgtctcagcaagtggcagaactgggacgggagactgaggagttgcgacagatgatcaaaattcgtttgcagaacctccaagatgcagctaaggatatgaaaaaatttgaagcagagttgaaaaagttacaagctgccttggagcaagcccaggcaacactgacttctccagaagttggacgtctcagtctcaaggagcagctctctcatcggcagcatttgttgtctgagatggagtcactgaagccgaaggtgcaagcagtgcagctctgccagagtgccctccggatccccgaggatgtggttgccagcttacctctctgtcatgctgctctgcggctgcaggaagaggccagccggctgcagcacaccgccatccagcagtgtaacatcatgcaggcagctgtggtacaatatgaacaatatgagcaagaaatgaaacatctccagcaactgatagaaggagctcacagagagattgaggataaacctgttgccaccagtaacatacaggagctgcaggctcagatttctcggcatgaggagctggcgcagaaaattaagggctaccaggagcagatcgcttctttgaattccaagtgcaagatgctgacgatgaaagccaagcacgccaccatgctgctgacggtgaccgaggtcgaggggctggcggaagggacagaggacctggatggggagctcctccccacgccttcggcccacccctctgtggtcatgatgactgcaggtcgctgtcacactttgctgtcaccggtcactgaggagtctggggaggagggaaccaacagtgagatttcctctccacctgcctgtcgctccccttcacctgtggctaatacagatgcttctgttaaccaggacattgcatattaccaagccttgtctgctgagaggttgcagacagatgctgcaaaaattcaccccagcacatccgcatcccaggagttctatgaaccgggattggagccatccgctactgccaaactgggtgatttgcagcgttcttgggaaaccttaaagaatgtgatcagtgagaagcagcgcacactctatgaagctttggaacgccagcagaagtaccaggactccctccagtccatctctacgaagatggaggccattgagctgaaactcagtgagagcccagagcctggcaggagtccagaaagccagatggctgaacatcaggcattgatggatgagattctcatgctccaggatgaaatcaatgagctccagtcctctctcgcagaggagctggtatccgagtcttgtgaggccgaccctgcggagcagctggccttgcagtccacgctcactgtcttagccgagcgaatgtccaccatcaggatgaaagcctcggggaaacggcagcttttggaggagaagttgaatgatcagctggaggaacaaaggcaggaacaggccctgcagaggtatcgctgtgaagccgatgagctggacagctggctcttgagtaccaaggccactctggacactgcgctgagtccacccaaggagcccatggacatggaggcccagcttatggactgccagaatatgctggtggaaatagagcagaaggtggtggctttatcagaactgtcagtccacaatgagaacctgctgctggagggcaaagctcacaccaaggacgaggccgagcagctggctggaaagctgagaaggctcaaggggagcctgctggagctgcagagagccctgcatgataagcagctcaacatgcagggaacagcacaggagaaggaggagagcgatgttgacctaacagccacgcagagccccggcgtccaggaatggctggcccaagctcgcaccacatggacccagcagcggcagagcagtctccagcaacaaaaagagttagaacaggaattagccgagcagaagagtctccttcgctcagtagccagtcgtggagaggagattctaattcaacattcggcggcagagacctctggtgatgctggcgaaaaacctgatgtgttatcccaggagttggggatggaaggggagaaatcatccgctgaagaccagatgagaatgaaatgggaaagcctacatcaagaatttagtaccaagcagaaactactacagaatgttctggaacaggaacaagagcaagtgctttatagcaggccaaatcgactcttgtctggtgtgccactgtacaaaggggacgtgccaacccaagataaatctgcagttacatctttgctggatggactgaaccaagccttcgaggaggtttcatcccagagtggaggggcaaagaggcagagtatacacttggagcagaagttgtatgatggagtctcagccacctctacttggttggatgacgttgaagaacgtttatttgttgccacagcacttttaccagaagaaacagagacttgtctcttcaaccaagagattcttgccaaagacattaaggaaatgtctgaagaaatggataagaacaaaaacttgttttcccaagcttttccagagaatggtgataatcgagatgttattgaagatactttgggttgtcttttgggcaggttatccttgctagactcagtagtgaatcaacgatgtcatcagatgaaagaaagacttcagcaaatactaaatttccagaatgatctgaaagtgctgtttacatcactggctgacaacaaatacatcattctgcaaaaactggcaaatgtgtttgaacagcccgtagcagaacaaatagaggcaatacaacaggctgaagatggactcaaagaatttgatgcaggaatcattgaattaaagaggcgtggtgacaagctacaggtcgagcagccgtccatgcaagaactctccaagctccaggacatgtatgatgagctgatgatgatcattggctcccggaggagtggtctgaatcagaaccttacactcaagagtcagtatgagagggccctacaagatctggctgacctgctagaaactggtcaggagaagatggcaggagaccagaaaatcatcgtgtcttccaaagaggaaatccagcaactacttgacaaacataaggaatactttcagggcctggaatctcatatgatcttgactgaaacactcttcagaaagataatcagctttgcagtccaaaaggaaacccagttccatacagagctgatggctcaggcttctgctgtactgaaacgggctcacaagaggggtgtggagctggagtacattctagagacgtggtcccatctggatgaggaccagcaggagctcagcagacagctggaggtggtggaaagcagcatcccaagcgtgggtctggtggaggagaacgaggacaggcttattgaccgcataacactctaccagcatttaaaatctagccttaatgaataccagcccaaattatatcaagtattagatgatgggaaacgacttctgatatccatcagctgctcagatctagaaagccaactaaatcaacttggagagtgctggctaagtaacaccaataaaatgtctaaggaacttcacagactggaaacaatattgaaacactggaccagatatcaaagtgaatctgcagatctaattcactggttacaatctgcaaaagaccggctagaattttggactcagcaatctgtgacagtcccacaagagctggaaatggtccgtgatcatctaaatgctttcctggagttttctaaagaagtggatgcccaatcttccctgaaatcatctgttctgagtactggaaatcagctccttcgactaaaaaaggtggacacagccacgctgcgctctgagctgtcgcgcattgatagccagtggactgacctgctaaccaatatcccagccgtccaggagaagctccaccagctccagatggataaactgccttcccgccatgccatttctgaagtcatgagttggatttctctaatggaaaatgttattcagaaggatgaagataatattaaaaattccataggttacaaggcaattcatgaataccttcagaaatataagggttttaagatagacattaactgtaaacagctgacagtggattttgtgaaccagtccgtgctacaaatcagcagtcaggatgtggaaagtaagcgtagtgataagactgattttgctgagcaacttggagcaatgaataaaagttggcaaattctgcaaggtctagtaactgagaagatccagctgttggaaggcttattggaatcttggtcagaatatgaaaataatgtacaatgtctgaaaacatggtttgaaacccaggaaaagagactaaaacaacagcatcgaattggagatcaggcttctgttcaaaatgcactgaaagactgtcaggatctggaagatttgattaaagcaaaagaaaaagaagtagagaaaattgagcagaatggacttgctttgattcagaacaagaaagaagacgtctctagcattgtcatgagcacactgcgagagctcggccaaacctgggcaaatttagatcacatggttggacaattaaagatactgctgaaatcagtgcttgaccaatggagtagtcacaaagtggcctttgacaagataaacagttacctcatggaggccagatactctctttcccgattccgtctgctgactggctccttagaagctgtgcaagttcaggtggacaatcttcagaatctccaagatgatctggaaaaacaggaaaggagcttacagaaatttggctctatcaccaaccaattattaaaagagtgtcacccacccgtgacagaaactcttaccaatacactgaaagaagtcaacatgagatggaataacttgctggaagagattgctgagcagctacagtccagcaaggccctacttcagctttggcaaagatacaaggactactccaaacagtgtgcttcgacagttcagcagcaggaggatcgaaccaatgagctgttgaaggcagccacaaacaaggacattgccgatgatgaggttgccacatggattcaagattgcaacgacctcctcaaaggactgggcacagttaaagattccctcttttttctccatgagctgggagagcaactgaagcaacaagtggatgcttccgcagcatcagctattcaatcggatcaactctctttgagtcaacacttgtgtgccctggagcaagctctctgcaaacagcagacttcattacaggctggagttcttgattatgaaacctttgccaagagtttagaagctttggaggcctggatagtggaagctgaagaaatactacaagggcaggaccctagccactcatctgacctctccacaatccaggaaaggatggaagaacttaagggacagatgttaaaattcagcagcatggctccagatttagaccgtctaaatgagcttggatataggttacccttgaatgataaggaaatcaaaagaatgcagaatctgaaccgccattggtctctgatctcctctcagactacagaaagattcagcaagttgcagtcatttttgctacaacatcagactttcttggaaaaatgtgaaacatggatggaattcctagttcagacagaacaaaagttagcagtagagatttcaggaaattatcagcaccttttggaacagcagagagcacacgagttgtttcaagccgagatgttcagtcgtcagcagattttgcactcaatcattattgatgggcaacgtcttctagaacaaggtcaagttgatgacagggatgaattcaacctgaaattgacactcctcagtaatcaatggcagggagtgattcgcagggcccagcagaggcgggggatcattgacagccagattcgccagtggcagcgctatagggagatggcagaaaagcttcgtaaatggttggttgaagtgtcctacctccccatgagtggtctcggaagtgttcctataccactgcaacaagcaaggaccctctttgatgaagtgcagttcaaagaaaaagtgtttctgcggcaacaaggcagctacatcctgactgtggaggctggcaagcaactccttctctcggcggacagtggcgctgaggccgccttgcaggccgaactcgctgaaatccaagagaaatggaaatcagccagcatgcggctggaagaacagaagaaaaaactagccttcttgttgaaagactgggaaaaatgtgagaaaggaatagcagattccctggagaaactacgaactttcaaaaagaagctttcgcagtctctcccggatcaccatgaagagctccatgcagaacaaatgcgttgcaaggaattagaaaatgcagttgggagctggacagatgacttgacccagttgagcctgctgaaggacaccctctctgcctatatcagtgctgatgatatctccattcttaatgaacgcgtagagcttctgcaaaggcagtgggaagaactatgccaccagctctccttaaggcggcagcaaataggtgaaagattgaatgaatgggcagtcttcagtgaaaagaacaaggaactctgtgagtggttgactcaaatggaaagcaaagtttctcagaatggagacattctcattgaagaaatgatagagaagctcaagaaggattatcaagaggaaattgctattgctcaagagaacaaaatacagctccaacaaatgggagaacgacttgctaaagccagccatgaaagcaaagcatctgagattgaatacaagctgggaaaggtcaacgaccggtggcagcatctcctggacctcattgcagccagggtgaagaagctgaaggagaccctggtagccgtgcagcagcttgataagaacatgagcagcctgaggacctggctcgctcacatcgagtcagagctggccaagccaatagtctacgattcctgtaactcggaagaaatacagagaaagcttaatgagcagcaggagcttcagagagacatagagaagcacagtacaggtgttgcatctgtcctcaacctgtgtgaagtcctgctgcacgactgtgacgcctgtgccactgatgccgagtgtgactctatacagcaggctacgagaaacctggaccggcggtggagaaacatttgtgctatgtccatggaaaggaggctgaaaatcgaagagacgtggcgattgtggcagaaatttctggatgactattcacgttttgaagattggctgaagtcttcagaaaggacagctgcttttcccagctcttctggggtgatctatacagttgccaaggaagaactaaagaaatttgaggctttccagcgacaggtccacgagtgcctgacgcagctggaactgatcaacaagcagtaccgccgcctggccagggagaaccgcactgattcagcatgtagcctcaaacagatggttcacgaaggcaaccagagatgggacaacctgcaaaagcgtgtcacctccatcttgcgcagactcaagcattttattggccagcgtgaggagtttgagactgcgcgggacagcattctggtctggctcacagagatggatctgcagctcactaatattgaacatttttctgagtgtgatgttcaagctaaaataaagcaactcaaggccttccagcaggaaatttcactgaaccacaataagattgagcagataattgcccaaggagaacagctgatagaaaagagtgagcccttggatgcagcgatcatcgaggaggaactagatgagctccgacggtactgccaggaggtcttcgggcgtgtggaaagataccataagaaactgatccgcctgcctctcccagacgatgagcacgacctctcagacagggagctggagctggaagactctgcagctctgtcggacctgcactggcacgaccgctctgcagacagcctgctttctccacagccttcctccaatctctccctctcgctcgctcagcccctccggagcgagcggtcaggacgagacaccccggctagtgtggactccatccccctggagtgggatcacgactatgacctcagtcgggacctggagtctgcaatgtccagagctctgccctctgaggatgaagaaggtcaggatgacaaagatttctacctccggggagctgttggcttatcaggggaccacagtgccctagagtcacagatccgacaactgggcaaagccctggatgatagccgttttcagatacagcaaaccgaaaatatcattcgcagcaaaactcccacggggccggagctagacaccagctacaaaggctacatgaaactgctgggcgaatgcagtagcagtatagactccgtgaagagactggagcacaaactgaaggaggaagaggagagccttcctggctttgttaacctgcatagtaccgaaacccaaacggctggtgtgattgaccgatgggagcttctccaggcccaggcattgagcaaggagttgaggatgaagcagaacctccagaagtggcagcagtttaactcagacttgaacagcatctgggcctggctgggggacacggaggaggagttggaacagctccagcgtctggaactcagcactgacatccagaccatcgagctccagatcaaaaagctcaaggagctccagaaagctgtggaccaccgcaaagccatcatcctctccatcaatctctgcagccctgagttcacccaggctgacagcaaggagagccgggacctgcaggatcgcttgtcgcagatgaatgggcgctgggaccgagtgtgctctctgctggaggagtggcggggcctgctgcaggatgccctgatgcagtgccagggtttccatgaaatgagccatggtttgcttcttatgctggagaacattgacagaaggaaaaatgaaattgtccctattgattctaaccttgatgcagagatacttcaggaccatcacaaacagcttatgcaaataaagcatgagctgttggaatcccaactcagagtagcctctttgcaagacatgtcttgccaactactggtgaatgctgaaggaacagactgtttagaagccaaagaaaaagtccatgttattggaaatcggctcaaacttctcttgaaggaggtcagtcgtcatatcaaggaactggagaagttattagacgtgtcaagtagtcagcaggatttgtcttcctggtcttctgctgatgaactggacacctcagggtctgtgagtcccacatcaggaaggagcaccccaaacagacagaaaacgccacgaggcaagtgtagtctctcacagcctggaccctctgtcagcagtccacatagcaggtccacaaaaggtggctccgattcctccctttctgagccagggccaggtcggtccggccgcggcttcctgttcagagtcctccgagcagctcttccccttcagcttctcctgctcctcctcatcgggcttgcctgccttgtaccaatgtcagaggaagactacagctgtgccctctccaacaactttgcccggtcattccaccccatgctcagatacacgaatggccctcctccactctgaactaagcagatgccatctgcagaagtgctggtagcataaggaggatcgggtcataagcaatcccaaactaccaacaagaggaccttgatcttggcgaaagccctcggtgtggcagctttagccctcctccagatcacatgtgtgcaaattatggcttcagaggtggaagataaacagtgacgggggaacaaacagacaacaagaaggtttggaagaaatctggtttgagactctgaaccttagcactaaggagattgagtaaggacctccaaagttccccggactcatgaattctgggcccttggcccattctgtgcacagccaaggacttcagtagaccatctgggcagctttcccatggtgctgctccaaccatcagataaatgaccctcccaagcaccatgtcagtgtcgtacaatctaccaaccaaccagtgctgaagagattttagaaccttgtaacatacaatttttaagagcttatatggcagcttcctttttaccttgttttcctttggggcatgatgttttaacctttgctttagaagcacaagctgtaaatctaaaaggcacttttttttagaggtataaagaaaaactagatgtaataaataagatcatggaaggctttatgtgaaaaaagttgaatgttatagtaaaaaaaaaaagatatttatgtatgtacagtttgctaaagccaagttttgtttgtattgatttctttgcatttattatagatattataaaata

SEQ ID NO: 787 - protein, 8797 aa, Homo sapiens
MATSRGASRCPRDIANVMQRLQDEQEIVQKRTFTKWINSHLAKRKPPMVVDDLFEDMKDGVKLLALLEVLSGQKLPCEQGRRMKRIHAVANIGTALKFLEGRKIKLVNINSTDIADGRPSIVLGLMWTIILYFQIEELTSNLPQLQSLSSSASSVDSIVSSETPSPPSKRKVTTKIQGNAKKALLKWVQYTAGKQTGIEVKDFGKSWRSGVAFHSVIHAIRPELVDLETVKGRSNRENLEDAFTIAETELGIPRLLDPEDVDVDKPDEKSIMTYVAQFLKHYPDIHNASTDGQEDDEILPGFPSFANSVQNFKREDRVIFKEMKVWIEQFERDLTRAQMVESNLQDKYQSFKHFRVQYEMKRKQIEHLIQPLHRDGKLSLDQALVKQSWDRVTSRLFDWHIQLDKSLPAPLGTIGAWLYRAEVALREEITVQQVHEETANTIQRKLEQHKDLLQNTDAHKRAFHEIYRTRSVNGIPVPPDQLEDMAERFHFVSSTSELHLMKMEFLELKYRLLSLLVLAESKLKSWIIKYGRRESVEQLLQNYVSFIENSKFFEQYEVTYQILKQTAEMYVKADGSVEEAENVMKFMNETTAQWRNLSVEVRSVRSMLEEVISNWDRYGNTVASLQAWLEDAEKMLNQSENAKKDFFRNLPHWIQQHTAMNDAGNFLIETCDEMVSRDLKQQLLLLNGRWRELFMEVKQYAQADEMDRMKKEYTDCVVTLSAFATEAHKKLSEPLEVSFMNVKLLIQDLEDIEQRVPVMDAQYKIITKTAHLITKESPQEEGKEMFATMSKLKEQLTKVKECYSPLLYESQQLLIPLEELEKQMTSFYDSLGKINEIITVLEREAQSSALFKQKHQELLACQENCKKTLTLIEKGSQSVQKFVTLSNVLKHFDQTRLQRQIADIHVAFQSMVKKTGDWKKHVETNSRLMKKFEESRAELEKVLRIAQEGLEEKGDPEELLRRHTEFFSQLDQRVLNAFLKACDELTDILPEQEQQGLQEAVRKLHKQWKDLQGEAPYHLLHLKIDVEKNRFLASVEECRTELDRETKLMPQEGSEKIIKEHRVFFSDKGPHHLCEKRLQLIEELCVKLPVRDPVRDTPGTCHVTLKELRAAIDSTYRKLMEDPDKWKDYTSRFSEFSSWISTNETQLKGIKGEAIDTANHGEVKRAVEEIRNGVTKRGETLSWLKSRLKVLTEVSSENEAQKQGDELAKLSSSFKALVTLLSEVEKMLSNFGDCVQYKEIVKNSLEELISGSKEVQEQAEKILDTENLFEAQQLLLHHQQKTKRISAKKRDVQQQIAQAQQGEGGLPDRGHEELRKLESTLDGLERSRERQERRIQVTLRKWERFETNKETVVRYLFQTGSSHERFLSFSSLESLSSELEQTKEFSKRTESIAVQAENLVKEASEIPLGPQNKQLLQQQAKSIKEQVKKLEDTLEEDIKTMEMVKTKWDHFGSNFETLSVWITEKEKELNALETSSSAMDMQISQIKVTIQEIESKLSSIVGLEEEAQSFAQFVTTGESARIKAKLTQIRRYGEELREHAQCLEGTILGHLSQQQKFEENLRKIQQSVSEFEDKLAVPIKICSSATETYKVLQEHMDLCQALESLSSAITAFSASARKVVNRDSCVQEAAALQQQYEDILRRAKERQTALENLLAHWQRLEKELSSFLTWLERGEAKASSPEMDISADRVKVEGELQLIQALQNEVVSQASFYSKLLQLKESLFSVASKDDVKMMKLHLEQLDERWRDLPQIINKRINFLQSVVAEHQQFDELLLSFSVWIKLFLSELQTTSEISIMDHQVALTRHKDHAAEVESKKGELQSLQGHLAKLGSLGRAEDLHLLQGKAEDCFQLFEEASQVVERRQLALSHLAEFLQSHASLSGILRQLRQTVEATNSMNKNESDLIEKDLNDALQNAKALESAAVSLDGILSKAQYHLKIGSSEQRTSCRATADQLCGEVERIQNLLGTKQSEADALAVLKKAFQDQKEELLKSIEDIEERTDKERLKEPTRQALQQRLRVFNQLEDELNSHEHELCWLKDKAKQIAQKDVAFAPEVDREINRLEVTWDDTKRLIHENQGQCCGLIDLMREYQNLKSAVSKVLENASSVIVTRTTIKDQEDLKWAFSKHETAKNKMNYKQKDLDNFTSKGKHLLSELKKIHSSDFSLVKTDMESTVDKWLDVSEKLEENMDRLRVSLSIWDDVLSTRDEIEGWSNNCVPQMAENISNLDNHLRAEELLKEFESEVKNKALRLEELHSKVNDLKELTKNLETPPDLQFIEADLMQKLEHAKEITEVAKGTLKDFTAQSTQVEKFINDITTWFTKVEESLMNCAQNETCEALKKVKDIQKELQSQQSNISSTQENLNSLCRKYHSAELESLGRAMTGLIKKHEAVSQLCSKTQASLQESLEKHFSESMQEFQEWFLGAKAAAKESSDRTGDSKVLEAKLHDLQNILDSVSDGQSKLDAVTQEGQTLYAHLSKQIVSSIQEQITKANEEFQAFLKQCLKDKQALQDCASELGSFEDQHRKLNLWIHEMEERFNTENLGESKQHIPEKKNEVHKVEMFLGELLAARESLDKLSQRGQLLSEEGHGAGQEGRLCSQLLTSHQNLLRMTKEKLRSCQVALQEHEALEEALQSMWFWVKAIQDRLACAESTLGSKDTLEKRLSQIQDILLMKGEGEVKLNMAIGKGEQALRSSNKEGQRVIQTQLETLKEVWADIMSSSVHAQSTLESVISQWNDYVERKNQLEQWMESVDQKIEHPLQPQPGLKEKFVLLDHLQSILSEAEDHTRALHRLIAKSRELYEKTEDESFKDTAQEELKTQFNDIMTVAKEKMRKVEEIVKDHLMYLDAVHEFTDWLHSAKEELHRWSDMSGDSSATQKKLSKIKELIDSREIGASRLSRVESLAPEVKQNTTASGCELMHTEMQALRADWKQWEDSVFQTQSCLENLVSQMALSEQEFSGQVAQLEQALEQFSALLKTWAQQLTLLEGKNTDEEIVECWHKGQEILDALQKAEPRTEDLKSQLNELCRFSRDLSTYSGKVSGLIKEYNCLCLQASKGCQNKEQILQQRFRKAFRDFQQWLVNAKITTAKCFDIPQNISEVSTSLQKIQEFLSESENGQHKLNMMLSKGELLSTLLTKEKAKGIQAKVTAAKEDWKNFHSNLHQKESALENLKIQMKDFEVSAEPIQDWLSKTEKMVHESSNRLYDLPAKRREQQKLQSVLEEIHCYEPQLNRLKEKAQQLWEGQAASKSFRHRVSQLSSQYLALSNLTKEKVSRLDRIVAEHNQFSLGIKELQDWMTDAIHMLDSYCHPTSDKSVLDSRTLKLEALLSVKQEKEIQMKMIVTRGESVLQNTSPEGIPTIQQQLQSVKDMWASLLSAGIRCKSQLEGALSKWTSYQDGVRQFSGWMDSMEANLNESERQHAELRDKTTMLGKAKLLNEEVLSYSSLLETIEVKGAGMTEHYVTQLELQDLQERYRAIQERAKEAVTKSEKLVRLHQEYQRDLKAFEVWLGQEQEKLDQYSVLEGDAHTHETTLRDLQELQVHCAEGQALLNSVLHTREDVIPSGIPQAEDRALESLRQDWQAYQHRLSETRTQFNNVVNKLRLMEQKFQQVDEWLKTAEEKVSPRTRRQSNRATKEIQLHQMKKWHEEVTAYRDEVEEVGARAQEILDESHVNSRMGCQATQLTSRYQALLLQVLEQIKFLEEEIQSLEESESSLSSYSDWYGSTHKNFKNVATKIDKVDTVMMGKKLKTLEVLLKDMEKGHSLLKSAREKGERAVKYLEEGEAERLRKEIHDHMEQLKELTSTVRKEHMTLEKGLHLAKEFSDKCKALTQWIAEYQEILHVPEEPKMELYEKKAQLSKYKSLQQTVLSHEPSVKSVREKGEALLELVQDVTLKDKIDQLQSDYQDLCSIGKEHVFSLEAKVKDHEDYNSELQEVEKWLLQMSGRLVAPDLLETSSLETITQQLAHHKAMMEEIAGFEDRLNNLQMKGDTLIGQCADHLQAKLKQNVHAHLQGTKDSYSAICSTAQRMYQSLEHELQKHVSRQDTLQQCQAWLSAVQPDLEPSPQPPLSRAEAIKQVKHFRALQEQARTYLDLLCSMCDLSNASVKTTAKDIQQTEQTIEQKLVQAQNLTQGWEEIKHLKSELWIYLQDADQQLQNMKRRHSELELNIAQNMVSQVKDFVKKLQSKQASVNTIIEKVNKLTKKEESPEHKEINHLNDQWLDLCRQSNNLCLQREEDLQRTRDYHDCMNVVEVFLEKFTTEWDNLARSDAESTAVHLEALKKLALALQERKYAIEDLKDQKQKMIEHLNLDDKELVKEQTSHLEQRWFQLEDLIKRKIQVSVTNLEELNVVQSRFQELMEWAEEQQPNIAEALKQSPPPDMAQNLLMDHLAICSELEAKQMLLKSLIKDADRVMADLGLNERQVIQKALSDAQSHVNCLSDLVGQRRKYLNKALSEKTQFLMAVFQATSQIQQHERKIMFREHICLLPDDVSKQVKTCKSAQASLKTYQNEVTGLWAQGRELMKEVTEQEKSEVLGKLQELQSVYDSVLQKCSHRLQELEKNLVSRKHFKEDFDKACHWLKQADIVTFPEINLMNESSELHTQLAKYQNILEQSPEYENLLLTLQRTGQTILPSLNEVDHSYLSEKLNALPRQFNVIVALAKDKFYKVQEAILARKEYASLIELTTQSLSELEAQFLRMSKVPTDLAVEEALSLQDGCRAILDEVAGLGEAVDELNQKKEGFRSTGQPWQPDKMLHLVTLYHRLKRQTEQRVSLLEDTTSAYQEHEKMCQQLERQLKSVKEEQSKVNEETLPAEEKLKMYHSLAGSLQDSGIVLKRVTIHLEDLAPHLDPLAYEKARHQIQSWQGELKLLTSAIGETVTECESRMVQSIDFQTEMSRSLDWLRRVKAELSGPVYLDLNLQDIQEEIRKIQIHQEEVQSSLRIMNALSHKEKEKFTKAKELISADLEHSLAELSELDGDIQEALRTRQATLTEIYSQCQRYYQVFQAANDWLEDAQELLQLAGNGLDVESAEENLKSHMEFFSTEDQFHSNLEELHSLVATLDPLIKPTGKEDLEQKVASLELRSQRMSRDSGAQVDLLQRCTAQWHDYQKAREEVIELMNDTEKKLSEFSLLKTSSSHEAEEKLSEHKALVSVVNSFHEKIVALEEKASQLEKTGNDASKATLSRSMTTVWQRWTRLRAVAQDQEKILEDAVDEWTGFNNKVKKATEMIDQLQDKLPGSSAEKASKAELLTLLEYHDTFVLELEQQQSALGMLRQQTLSMLQDGAAPTPGEEPPLMQEITAMQDRCLNMQEKVKTNGKLVKQELKDREMVETQINSVKCWVQETKEYLGNPTIEIDAQLEELQILLTEATNHRQNIEKMAEEQKEKYLGLYTILPSELSLQLAEVALDLKIRDQIQDKIKEVEQSKATSQELSRQIQKLAKDLTTILTKLKAKTDNVVQAKTDQKVLGEELDGCNSKLMELDAAVQKFLEQNGQLGKPLAKKIGKLTELHQQTIRQAENRLSKLNQAASHLEEYNEMLELILKWIEKAKVLAHGTIAWNSASQLREQYILHQTLLEESKEIDSELEAMTEKLQYLTSVYCTEKMSQQVAELGRETEELRQMIKIRLQNLQDAAKDMKKFEAELKKLQAALEQAQATLTSPEVGRLSLKEQLSHRQHLLSEMESLKPKVQAVQLCQSALRIPEDVVASLPLCHAALRLQEEASRLQHTAIQQCNIMQAAVVQYEQYEQEMKHLQQLIEGAHREIEDKPVATSNIQELQAQISRHEELAQKIKGYQEQIASLNSKCKMLTMKAKHATMLLTVTEVEGLAEGTEDLDGELLPTPSAHPSVVMMTAGRCHTLLSPVTEESGEEGTNSEISSPPACRSPSPVANTDASVNQDIAYYQALSAERLQTDAAKIHPSTSASQEFYEPGLEPSATAKLGDLQRSWETLKNVISEKQRTLYEALERQQKYQDSLQSISTKMEAIELKLSESPEPGRSPESQMAEHQALMDEILMLQDEINELQSSLAEELVSESCEADPAEQLALQSTLTVLAERMSTIRMKASGKRQLLEEKLNDQLEEQRQEQALQRYRCEADELDSWLLSTKATLDTALSPPKEPMDMEAQLMDCQNMLVEIEQKVVALSELSVHNENLLLEGKAHTKDEAEQLAGKLRRLKGSLLELQRALHDKQLNMQGTAQEKEESDVDLTATQSPGVQEWLAQARTTWTQQRQSSLQQQKELEQELAEQKSLLRSVASRGEEILIQHSAAETSGDAGEKPDVLSQELGMEGEKSSAEDQMRMKWESLHQEFSTKQKLLQNVLEQEQEQVLYSRPNRLLSGVPLYKGDVPTQDKSAVTSLLDGLNQAFEEVSSQSGGAKRQSIHLEQKLYDGVSATSTWLDDVEERLFVATALLPEETETCLFNQEILAKDIKEMSEEMDKNKNLFSQAFPENGDNRDVIEDTLGCLLGRLSLLDSVVNQRCHQMKERLQQILNFQNDLKVLFTSLADNKYIILQKLANVFEQPVAEQIEAIQQAEDGLKEFDAGIIELKRRGDKLQVEQPSMQELSKLQDMYDELMMIIGSRRSGLNQNLTLKSQYERALQDLADLLETGQEKMAGDQKIIVSSKEEIQQLLDKHKEYFQGLESHMILTETLFRKIISFAVQKETQFHTELMAQASAVLKRAHKRGVELEYILETWSHLDEDQQELSRQLEVVESSIPSVGLVEENEDRLIDRITLYQHLKSSLNEYQPKLYQVLDDGKRLLISISCSDLESQLNQLGECWLSNTNKMSKELHRLETILKHWTRYQSESADLIHWLQSAKDRLEFWTQQSVTVPQELEMVRDHLNAFLEFSKEVDAQSSLKSSVLSTGNQLLRLKKVDTATLRSELSRIDSQWTDLLTNIPAVQEKLHQLQMDKLPSRHAISEVMSWISLMENVIQKDEDNIKNSIGYKAIHEYLQKYKGFKIDINCKQLTVDFVNQSVLQISSQDVESKRSDKTDFAEQLGAMNKSWQILQGLVTEKIQLLEGLLESWSEYENNVQCLKTWFETQEKRLKQQHRIGDQASVQNALKDCQDLEDLIKAKEKEVEKIEQNGLALIQNKKEDVSSIVMSTLRELGQTWANLDHMVGQLKILLKSVLDQWSSHKVAFDKINSYLMEARYSLSRFRLLTGSLEAVQVQVDNLQNLQDDLEKQERSLQKFGSITNQLLKECHPPVTETLTNTLKEVNMRWNNLLEEIAEQLQSSKALLQLWQRYKDYSKQCASTVQQQEDRTNELLKAATNKDIADDEVATWIQDCNDLLKGLGTVKDSLFFLHELGEQLKQQVDASAASAIQSDQLSLSQHLCALEQALCKQQTSLQAGVLDYETFAKSLEALEAWIVEAEEILQGQDPSHSSDLSTIQERMEELKGQMLKFSSMAPDLDRLNELGYRLPLNDKEIKRMQNLNRHWSLISSQTTERFSKLQSFLLQHQTFLEKCETWMEFLVQTEQKLAVEISGNYQHLLEQQRAHELFQAEMFSRQQILHSIIIDGQRLLEQGQVDDRDEFNLKLTLLSNQWQGVIRRAQQRRGIIDSQIRQWQRYREMAEKLRKWLVEVSYLPMSGLGSVPIPLQQARTLFDEVQFKEKVFLRQQGSYILTVEAGKQLLLSADSGAEAALQAELAEIQEKWKSASMRLEEQKKKLAFLLKDWEKCEKGIADSLEKLRTFKKKLSQSLPDHHEELHAEQMRCKELENAVGSWTDDLTQLSLLKDTLSAYISADDISILNERVELLQRQWEELCHQLSLRRQQIGERLNEWAVFSEKNKELCEWLTQMESKVSQNGDILIEEMIEKLKKDYQEEIAIAQENKIQLQQMGERLAKASHESKASEIEYKLGKVNDRWQHLLDLIAARVKKLKETLVAVQQLDKNMSSLRTWLAHIESELAKPIVYDSCNSEEIQRKLNEQQELQRDIEKHSTGVASVLNLCEVLLHDCDACATDAECDSIQQATRNLDRRWRNICAMSMERRLKIEETWRLWQKFLDDYSRFEDWLKSSERTAAFPSSSGVIYTVAKEELKKFEAFQRQVHECLTQLELINKQYRRLARENRTDSACSLKQMVHEGNQRWDNLQKRVTSILRRLKHFIGQREEFETARDSILVWLTEMDLQLTNIEHFSECDVQAKIKQLKAFQQEISLNHNKIEQIIAQGEQLIEKSEPLDAAIIEEELDELRRYCQEVFGRVERYHKKLIRLPLPDDEHDLSDRELELEDSAALSDLHWHDRSADSLLSPQPSSNLSLSLAQPLRSERSGRDTPASVDSIPLEWDHDYDLSRDLESAMSRALPSEDEEGQDDKDFYLRGAVGLSGDHSALESQIRQLGKALDDSRFQIQQTENIIRSKTPTGPELDTSYKGYMKLLGECSSSIDSVKRLEHKLKEEEESLPGFVNLHSTETQTAGVIDRWELLQAQALSKELRMKQNLQKWQQFNSDLNSIWAWLGDTEEELEQLQRLELSTDIQTIELQIKKLKELQKAVDHRKAIILSINLCSPEFTQADSKESRDLQDRLSQMNGRWDRVCSLLEEWRGLLQDALMQCQGFHEMSHGLLLMLENIDRRKNEIVPIDSNLDAEILQDHHKQLMQIKHELLESQLRVASLQDMSCQLLVNAEGTDCLEAKEKVHVIGNRLKLLLKEVSRHIKELEKLLDVSSSQQDLSSWSSADELDTSGSVSPTSGRSTPNRQKTPRGKCSLSQPGPSVSSPHSRSTKGGSDSSLSEPGPGRSGRGFLFRVLRAALPLQLLLLLLIGLACLVPMSEEDYSCALSNNFARSFHPMLRYTNGPPPL

SEQ ID NO: 788 - DNA, 1891 bp, Homo sapiens
gatgagcctctgtgaactactaaggtgggagggggctatacgcagaggagaatgtcagatgctcagctcggtcccctccgcctgacgctcctctctgtctcagccaggactggtttctgtaagaaacagcaggagctgtggcagcggcgaaaggaagcggctgaggcgcttggaacccgaaaagtctcggtgctcctggctacctcgcacagcggtgcccgcccggccgtcagtaccatggacagcagcgctgcccccacgaacgccagcaattgcactgatgccttggcgtactcaagttgctccccagcacccagccccggttcctgggtcaacttgtcccacttagatggcaacctgtccgacccatgcggtccgaaccgcaccgacctgggcgggagagacagcctgtgccctccgaccggcagtccctccatgatcacggccatcacgatcatggccctctactccatcgtgtgcgtggtggggctcttcggaaacttcctggtcatgtatgtgattgtcagatacaccaagatgaagactgccaccaacatctacattttcaaccttgctctggcagatgccttagccaccagtaccctgcccttccagagtgtgaattacctaatgggaacatggccatttggaaccatcctttgcaagatagtgatctccatagattactataacatgttcaccagcatattcaccctctgcaccatgagtgttgatcgatacattgcagtctgccaccctgtcaaggccttagatttccgtactccccgaaatgccaaaattatcaatgtctgcaactggatcctctcttcagccattggtcttcctgtaatgttcatggctacaacaaaatacaggcaaggttccatagattgtacactaacattctctcatccaacctggtactgggaaaacctgctgaagatctgtgttttcatcttcgccttcattatgccagtgctcatcattaccgtgtgctatggactgatgatcttgcgcctcaagagtgtccgcatgctctctggctccaaagaaaaggacaggaatcttcgaaggatcaccaggatggtgctggtggtggtggctgtgttcatcgtctgctggactcccattcacatttacgtcatcattaaagccttggttacaatcccagaaactacgttccagactgtttcttggcacttctgcattgctctaggttacacaaacagctgcctcaacccagtcctttatgcatttctggatgaaaacttcaaacgatgcttcagagagttctgtatcccaacctcttccaacattgagcaacaaaactccactcgaattcgtcagaacactagagaccacccctccacggccaatacagtggatagaactaatcatcagctagaaaatctggaagcagaaactgctccgttgccctaacagggtctcatgccattccgaccttcaccaagcttagaagccaccatgtatgtggaagcaggttgcttcaagaatgtgtaggaggctctaattctctaggaaagtgcctgcttttaggtcatccaacctctttcctctctggccactctgctctgcacattagagggacagccaaaagtaagtggagcatttggaaggaaaggaatataccacaccgaggagtccagtttgtgcaagacacccagtggaaccaaaacccatcgtggtatgtgaattgaagtcatcataaaaggtgacccttctgtctgtaagattttattttcaagcaaatatttatgacctcaacaaagaagaaccatcttttgttaagttcaccgtagtaacacataaagtaaatgctacctctgatcaaagcaccttgaatggaaggtccgagtctttttagtgtttt

SEQ ID NO: 789 - protein, 400 aa, Homo sapiens
MDSSAAPTNASNCTDALAYSSCSPAPSPGSWVNLSHLDGNLSDPCGPNRTDLGGRDSLCPPTGSPSMITAITIMALYSIVCVVGLFGNFLVMYVIVRYTKMKTATNIYIFNLALADALATSTLPFQSVNYLMGTWPFGTILCKIVISIDYYNMFTSIFTLCTMSVDRYIAVCHPVKALDFRTPRNAKIINVCNWILSSAIGLPVMFMATTKYRQGSIDCTLTFSHPTWYWENLLKICVFIFAFIMPVLIITVCYGLMILRLKSVRMLSGSKEKDRNLRRITRMVLVVVAVFIVCWTPIHIYVIIKALVTIPETTFQTVSWHFCIALGYTNSCLNPVLYAFLDENFKRCFREFCIPTSSNIEQQNSTRIRQNTRDHPSTANTVDRTNHQLENLEAETAPLP

SEQ ID NO: 790 - DNA, 1576 bp, Homo sapiens
gatgagcctctgtgaactactaaggtgggagggggctatacgcagaggagaatgtcagatgctcagctcggtcccctccgcctgacgctcctctctgtctcagccaggactggtttctgtaagaaacagcaggagctgtggcagcggcgaaaggaagcggctgaggcgcttggaacccgaaaagtctcggtgctcctggctacctcgcacagcggtgcccgcccggccgtcagtaccatggacagcagcgctgcccccacgaacgccagcaattgcactgatgccttggcgtactcaagttgctccccagcacccagccccggttcctgggtcaacttgtcccacttagatggcaacctgtccgacccatgcggtccgaaccgcaccgacctgggcgggagagacagcctgtgccctccgaccggcagtccctccatgatcacggccatcacgatcatggccctctactccatcgtgtgcgtggtggggctcttcggaaacttcctggtcatgtatgtgattgtcagatacaccaagatgaagactgccaccaacatctacattttcaaccttgctctggcagatgccttagccaccagtaccctgcccttccagagtgtgaattacctaatgggaacatggccatttggaaccatcctttgcaagatagtgatctccatagattactataacatgttcaccagcatattcaccctctgcaccatgagtgttgatcgatacattgcagtctgccaccctgtcaaggccttagatttccgtactccccgaaatgccaaaattatcaatgtctgcaactggatcctctcttcagccattggtcttcctgtaatgttcatggctacaacaaaatacaggcaaggttccatagattgtacactaacattctctcatccaacctggtactgggaaaacctgctgaagatctgtgttttcatcttcgccttcattatgccagtgctcatcattaccgtgtgctatggactgatgatcttgcgcctcaagagtgtccgcatgctctctggctccaaagaaaaggacaggaatcttcgaaggatcaccaggatggtgctggtggtggtggctgtgttcatcgtctgctggactcccattcacatttacgtcatcattaaagccttggttacaatcccagaaactacgttccagactgtttcttggcacttctgcattgctctaggttacacaaacagctgcctcaacccagtcctttatgcatttctggatgaaaacttcaaacgatgcttcagagagttctgtatcccaacctcttccaacattgagcaacaaaactccactcgaattcgtcagaacactagagaccacccctccacggccaatacagtggatagaactaatcatcagccacccttggcagtcagcatggcccagatctttacacgatatcctcctccgactcatcgtgagaaaacctgcaatgattacatgaagaggtagataatgtattaccctgatttggtaggtaaagtattatcctgatttatgtgacagagtgaaaggcaacttttaattgttaacc

SEQ ID NO: 791 - protein, 418 aa, Homo sapiens
MDSSAAPTNASNCTDALAYSSCSPAPSPGSWVNLSHLDGNLSDPCGPNRTDLGGRDSLCPPTGSPSMITAITIMALYSIVCVVGLFGNFLVMYVIVRYTKMKTATNIYIFNLALADALATSTLPFQSVNYLMGTWPFGTILCKIVISIDYYNMFTSIFTLCTMSVDRYIAVCHPVKALDFRTPRNAKIINVCNWILSSAIGLPVMFMATTKYRQGSIDCTLTFSHPTWYWENLLKICVFIFAFIMPVLIITVCYGLMILRLKSVRMLSGSKEKDRNLRRITRMVLVVVAVFIVCWTPIHIYVIIKALVTIPETTFQTVSWHFCIALGYTNSCLNPVLYAFLDENFKRCFREFCIPTSSNIEQQNSTRIRQNTRDHPSTANTVDRTNHQPPLAVSMAQIFTRYPPPTHREKTCNDYMKR

SEQ ID NO: 792 - DNA, 1511 bp, Homo sapiens
gatgagcctctgtgaactactaaggtgggagggggctatacgcagaggagaatgtcagatgctcagctcggtcccctccgcctgacgctcctctctgtctcagccaggactggtttctgtaagaaacagcaggagctgtggcagcggcgaaaggaagcggctgaggcgcttggaacccgaaaagtctcggtgctcctggctacctcgcacagcggtgcccgcccggccgtcagtaccatggacagcagcgctgcccccacgaacgccagcaattgcactgatgccttggcgtactcaagttgctccccagcacccagccccggttcctgggtcaacttgtcccacttagatggcaacctgtccgacccatgcggtccgaaccgcaccgacctgggcgggagagacagcctgtgccctccgaccggcagtccctccatgatcacggccatcacgatcatggccctctactccatcgtgtgcgtggtggggctcttcggaaacttcctggtcatgtatgtgattgtcagatacaccaagatgaagactgccaccaacatctacattttcaaccttgctctggcagatgccttagccaccagtaccctgcccttccagagtgtgaattacctaatgggaacatggccatttggaaccatcctttgcaagatagtgatctccatagattactataacatgttcaccagcatattcaccctctgcaccatgagtgttgatcgatacattgcagtctgccaccctgtcaaggccttagatttccgtactccccgaaatgccaaaattatcaatgtctgcaactggatcctctcttcagccattggtcttcctgtaatgttcatggctacaacaaaatacaggcaaggttccatagattgtacactaacattctctcatccaacctggtactgggaaaacctgctgaagatctgtgttttcatcttcgccttcattatgccagtgctcatcattaccgtgtgctatggactgatgatcttgcgcctcaagagtgtccgcatgctctctggctccaaagaaaaggacaggaatcttcgaaggatcaccaggatggtgctggtggtggtggctgtgttcatcgtctgctggactcccattcacatttacgtcatcattaaagccttggttacaatcccagaaactacgttccagactgtttcttggcacttctgcattgctctaggttacacaaacagctgcctcaacccagtcctttatgcatttctggatgaaaacttcaaacgatgcttcagagagttctgtatcccaacctcttccaacattgagcaacaaaactccactcgaattcgtcagaacactagagaccacccctccacggccaatacagtggatagaactaatcatcaggtacgcagtctctagaattaggtatatctactggggatgacataaaaattataaggctttgtgctaaactaggagtttaatccattatagaggatgagaatggagggaag

SEQ ID NO: 793 - protein, 392 aa, Homo sapiens
MDSSAAPTNASNCTDALAYSSCSPAPSPGSWVNLSHLDGNLSDPCGPNRTDLGGRDSLCPPTGSPSMITAITIMALYSIVCVVGLFGNFLVMYVIVRYTKMKTATNIYIFNLALADALATSTLPFQSVNYLMGTWPFGTILCKIVISIDYYNMFTSIFTLCTMSVDRYIAVCHPVKALDFRTPRNAKIINVCNWILSSAIGLPVMFMATTKYRQGSIDCTLTFSHPTWYWENLLKICVFIFAFIMPVLIITVCYGLMILRLKSVRMLSGSKEKDRNLRRITRMVLVVVAVFIVCWTPIHIYVIIKALVTIPETTFQTVSWHFCIALGYTNSCLNPVLYAFLDENFKRCFREFCIPTSSNIEQQNSTRIRQNTRDHPSTANTVDRTNHQVRSL

SEQ ID NO: 794 - DNA, 1652 bp, Homo sapiens
gatgagcctctgtgaactactaaggtgggagggggctatacgcagaggagaatgtcagatgctcagctcggtcccctccgcctgacgctcctctctgtctcagccaggactggtttctgtaagaaacagcaggagctgtggcagcggcgaaaggaagcggctgaggcgcttggaacccgaaaagtctcggtgctcctggctacctcgcacagcggtgcccgcccggccgtcagtaccatggacagcagcgctgcccccacgaacgccagcaattgcactgatgccttggcgtactcaagttgctccccagcacccagccccggttcctgggtcaacttgtcccacttagatggcaacctgtccgacccatgcggtccgaaccgcaccgacctgggcgggagagacagcctgtgccctccgaccggcagtccctccatgatcacggccatcacgatcatggccctctactccatcgtgtgcgtggtggggctcttcggaaacttcctggtcatgtatgtgattgtcagatacaccaagatgaagactgccaccaacatctacattttcaaccttgctctggcagatgccttagccaccagtaccctgcccttccagagtgtgaattacctaatgggaacatggccatttggaaccatcctttgcaagatagtgatctccatagattactataacatgttcaccagcatattcaccctctgcaccatgagtgttgatcgatacattgcagtctgccaccctgtcaaggccttagatttccgtactccccgaaatgccaaaattatcaatgtctgcaactggatcctctcttcagccattggtcttcctgtaatgttcatggctacaacaaaatacaggcaaggttccatagattgtacactaacattctctcatccaacctggtactgggaaaacctgctgaagatctgtgttttcatcttcgccttcattatgccagtgctcatcattaccgtgtgctatggactgatgatcttgcgcctcaagagtgtccgcatgctctctggctccaaagaaaaggacaggaatcttcgaaggatcaccaggatggtgctggtggtggtggctgtgttcatcgtctgctggactcccattcacatttacgtcatcattaaagccttggttacaatcccagaaactacgttccagactgtttcttggcacttctgcattgctctaggttacacaaacagctgcctcaacccagtcctttatgcatttctggatgaaaacttcaaacgatgcttcagagagttctgtatcccaacctcttccaacattgagcaacaaaactccactcgaattcgtcagaacactagagaccacccctccacggccaatacagtggatagaactaatcatcagtgcctacctataccttccctgtcttgctgggctctagagcaaggctgcttggttgtgtaccctggaccactgcaaggacctcttgtcagatatgacctcccagctatccttcactcgtcctgccttcgtggaaatactgctcccagcccgtctggtggagcatttctcctgagttaagcatgattattcttcagttgcccgacactgcccttgactcccttccaaattcggcattttcacatcagtatggc

SEQ ID NO: 795 - protein, 446 aa, Homo sapiens
MDSSAAPTNASNCTDALAYSSCSPAPSPGSWVNLSHLDGNLSDPCGPNRTDLGGRDSLCPPTGSPSMITAITIMALYSIVCVVGLFGNFLVMYVIVRYTKMKTATNIYIFNLALADALATSTLPFQSVNYLMGTWPFGTILCKIVISIDYYNMFTSIFTLCTMSVDRYIAVCHPVKALDFRTPRNAKIINVCNWILSSAIGLPVMFMATTKYRQGSIDCTLTFSHPTWYWENLLKICVFIFAFIMPVLIITVCYGLMILRLKSVRMLSGSKEKDRNLRRITRMVLVVVAVFIVCWTPIHIYVIIKALVTIPETTFQTVSWHFCIALGYTNSCLNPVLYAFLDENFKRCFREFCIPTSSNIEQQNSTRIRQNTRDHPSTANTVDRTNHQCLPIPSLSCWALEQGCLVVYPGPLQGPLVRYDLPAILHSSCLRGNTAPSPSGGAFLLS

SEQ ID NO: 796 - DNA, 6687 bp, Homo sapiens
gtttaagtagaatcctcaagcttggcctcagagtactatgaggcttctgaatccaggaataagactgctcttggatttactctctttgtattgcatgtcaaaggcaacagaactggaccaagaaaattcataactttttgtttgtttctactaagatgacatcatacatggctattgatggcagtgctcttgttcccttgcgtcagaagcccaggaggaaaactcaaggttttctcacgatgagtcggaggaggatatcgtgtaaagatctgggccatgctgactgccaagggtggctgtataagaaaaaggaaaagggaagtttcctaagcaacaaatggaaaaagttctgggtgatactgaaggggtcgtcactgtactggtatagcaatcaaatggcagagaaagctgatggatttgtcaacctgcctgatttcactgtggaaagagcatctgaatgcaagaaaaagcatgcttttaagatcagccatccacagatcaagaccttttattttgcagctgagaatgtgcaggaaatgaacgtgtggttaaataaacttggatcggctgtaatccatcaggaatccactacaaaggatgaagaatgttacagtgaaagtgaacaggaagatccagaaatagctgcggagacaccaccccctcctcacgcttcccagactcagtctttgactgcacagcaggcatcttcatcctcacccagcctgagtggaacgtcgtattctttctcttccctggaaaatacagtgaagacacccagcagttttccttcctccttatctaaagagagacaatccttgcctgacacagttaacagtttgtctgctgctgaagatgagggacaaccaataacgtttgctgtgcaagttcattcacctgtaccctcagaggcaggcatccacaaggccctggaaaacagttttgtcacatcagaaagtggatttttgaactctttatctagtgatgatacttcttcattgagtagcaatcatgaccatcttactgtcccagataagcctgctggatcaaagatcatggacaaagaagagacaaaagtgtctgaagatgatgaaatggagaagctgtacaaatcattagagcaagctagtctatctcctcttggggaccgacgaccttcgactaaaaaggagttgagaaaatcctttgttaagcggtgtaaaaatccatctataaacgagaaactccacaaaatccgaacattgaatagcacattaaagtgtaaagaacatgatctggccatgattaaccagttgctggatgacccgaagctgacagccaggaaatacagagagtggaaagtcatgaacaccctgctgatccaggacatctatcagcagcagcgggcttcgcctgcccctgatgacactgatgacaccccccaggaactcaagaaatcaccttcttctccctctgttgaaaattccatttgagacaaagtcagggttttctcctcttatattttatcacaagcaactcttcaagatgttgcaaaagcttacatttttccttaaaaggaaaactgaaacccagtccttcaagcatcagcttcccatctaaagatgcacgttagatgaagataatcaccgaatacaccagggctcctcatttcagtcgtaacgcatccattgagattggaatgattgagttcagttgaaaggcgttttttgtgttcctactgggagctcacggtgatgtggggctctaggggggatgtgagaaatgtctcttctgttcattgctctccagagaatgctatggacaagaatcaaattttaccaggagtaattgcccatggaaacattctgtttttcaaaagaagaatgtacatattccacttgactgggaagctgtgtggcccaaatcactgtttgagtggaggaatgttttctagagcagtgactggaaggacaaacgtggtgttgcagaacaaaaattccttgcctttggtatggaatggtggtgccttttccatgtgatgagaaatgcttcatagacagtggcatgtgggagagctgaaggaggaggcgtgttccatattccactcattcaaaggacagcttggtgttttcacactttatgcaggttaggggatctgattaatgtttcctttccttacaacagctagagaaaacatctcatcacaattggagacctctacttcctttgagctttcctactcaatggtaggagataggaatatgttccgcaaagaatgtctactgctcttgtccttggctgtgatccctatacatagtgtgaatttatatccaggtttcccaggatcaatattgacaagacgactttggcatctgaattgttttaatatctttactcaaaaaaacaaaaaaacaaaaacccatggaagcaacaaaagagttaaacatgagggatttatttttgtatgtttatatgtcacttgtgtgctatgtgaatagctatgtttgttatttaaatatatttatagaagttcaaattactagtgtttaaaagatgatatactattatatattgtgcttagtatatatttgatgagtctatactttttgcttgagaaaaatagaaatactattgattcactggtgttatgatgttgcactgtgtctgaggaatgctcaggaaatcttgtgggaaaaaaatggggcatgcattcataatttttcattttcttccccaccccaacccccatgagctcttaaatttagatttctatctcttgtaagtcactcttttaaccagcaaaggactttcatcttagattatcctttctattaaataaactttaagctttgtgccatttatgcctgcaaaccttagaccaaaggcaacacaactaatgtcatcttttcattaaagactaatagaaatttagaaatcattgtgttaaagagagctatagagaaacaatatgaaagtcttcccttactaatcaccatgaatatttctcaccataggaataaccacaacccaccaagtacccatgttggccctgcctacccgtaacaaattgttcacacaacctattttgttttatagcttcaaagtgtggcttgacattcaaaatggaaggaaccacctgaattatatctgcaaacaaaatggaaatagttgttgaatagttccccaagctttactaagaagccttaatactctgtaaacaaacaaacaaacaaaaaacaaccttagcattaagaaataaaaacaaaaaacaagaagcaagttgtactgctagaaacttctctaagataagaggccaggccagtcagtttggcccagcaaacatgtgggtacttctccacctagggaagccactgaagatgagtttgacctgtggtgacctgacagagagaacattcagatcctcagattgcaccctgatgccctggtttaggaaagcagtgctttaaccttttgcccctggaaattactgattctttctgtgattagcagataccagaagggaaattatttaggattggcaatgtaaagagtattgaaggaacaacaaataacaatagcagaaataacagtgtgacataaagtgcccttccacctatttttctttggtttgcaacaccagcctgtagacttccagtttttcttaaattgaagagctccagacacttttgagcagggtttgtgaatagctttgaatgctttcctttggcttttcgtgaagacatatttccccagcctttcaactgtaaactcctttagtaccattgaaacttaaggcaaaaaagatccctgggattacttagccaaggcttaaatttatttttcaaagtcaagaacattagcctagaagtttttgctttgctagttaaagcttactttgcagagcttcccaaagtgaaagggaaactgaacttcacaattttgcacctggctttctggagccccattgcctgctcattcgtgtttttccccctgtaaattattttgcttttgaccaggttgtgctagaaagtagggctgcttctgtgagttctcagcctaggctgtggccactaagacgtgggtggggggatagacaggagtgagagggagagtgggtgacactttccgtgacacttaatgtaggaagacatgggcttctctctcttggcctcaagccacttttctggtccaaagaatattgggaaaactggattactttcagtatatttcttgagaccgggtcatctctgaaatgcatttggggtagtttcctggggtccaagggccaattcctatacccagtcctgcagtgtctgtgagctgtggaatgagagagaaaaccatggctgctcaggaaggaagtggagaatctctcagcacacgtagatccaaatctgtggcacctgctaaagattaggatttggagaggactcctctttggggttgtgaagaggaccttttccctctgttgttagcctgtagatccagaacggagcctgatgtgatgccttcactggttgatatattgcaaatagacactctgagccctgcattgcaagggcgtcttttgctttaaagaattcttagttttgccacaacagctcaaatctcagaataggatcaaaggcctagaaagactcctaaagtataggattacaaagactccaggaagcgtaagaaagagattgtgtttggagtcagatttcaatgtgaaacccatgccttacatttacacagcactttgtagtttgcaaattggtgtgttttcagccccctcccgctgccccatgctctgagatgattgtggattattacagtgaagtgcctggcccggagcccccagtgatgaagcaggaacttgagtctcaggactcccagcggctctctgcccatttcctcctctccgccccccacctcgcttcacctgttaccttgtgaagttgctgttggcacatagcccactaggaaaccaagaagtttgactgggagcgtgtgtttcattgcactgggcttagcatacggctggccctggtggctgtttggctaaattctccatttgaaacctaaagggccctctctgtgcttgagcacagtctcctcctagtggtcctgcctcaacctgctggcgggctgtctatggattggggtttcacctaatcatgctgtgtttcctttcttttctttctgtacattagactacttgggaggtgctgtgtgatccttggatgaaaaacatatatttaaagaaatggagagtgtttattttgtttgctttttgaggcatgtgctgtcaaatgttagagaccaaacttagtgattagaggttggtcctttgaccttcttctcttaattgcttttcatgtaatcatgataatttactcaggtagcactccagtcacaaacaatgtcacagagatgaaacagattcaaagaaaaaatatttttaagtcttttgaaaagaagtgctattcaaatttaagacatgtttaaattcataggtacattatctcttagtaagaaatacttttttttttctttttttagacagagtcttgctctgttgcccaggctggagtgcagtggcacgattttagctcactgcaacctctgcctccctggttgaagtgattctcctgcctcagcctcccgagtagctgggactacgcccggctaatttttatatttttagtagagaccggggtttaccatgttgcccaggctggtttcaaactcctgacctcaggtgatctgcctgcctctgcctcccagagtgctgggattacaggtgtgagccaccacacctggccgaaagacagtattttgatatagccacatacatgatttaatgagtaatgttaagtacagaaaagctgccatatccacatagttttagggggcatttcttcttcagtctaacaagaatatgatatccaattgtggttttccaatttatttctcttccaatttcttttgtatacctcacaggagaaattgaatcctagaactgggagatgactgccctgcccagggttttgtaatacataattgaaaataaaagtccctgaaactaaatgtttgcagcctgtatgaaatggactgtggaagggggataatttctctcctcacagaaagccactcgtctccttgaatgaggcattgagcagacacacgtttctctgtgtcgtggggcaggaagcaattcccttgcctcttcagcacatctcagttctttcccacatgaccccagaaccacatagaaaacattgaaaataatggattcttcattgtatttgaattttttttttttaacctttagcccaaaagggaagtgtgcctcgtggaaagagcaaatgccgtaaaatagaaaccaggagttttaatcgccatatattttaatgtgcttgcatgatgggaatgtgacttttagcactgcatggtgtttgggggcaagatattaatgtggaaatcttagcttaagttttactgtgctctcatcctgtgtcagctacccctctaaactgaaaaagaggcatggctcatttctctcctgctttatgtttttgaggttgacttgtaagataaaaataaaaataagaaaaaaatatatctaggcaaatgacatgaaaaaaaagttgaaatatactactggtgttcatttttgtcctgcagtgttgctttctcaaagaaataaacatgtggctggaagtgttt

SEQ ID NO: 797 - protein, 437 aa, Homo sapiens
MTSYMAIDGSALVPLRQKPRRKTQGFLTMSRRRISCKDLGHADCQGWLYKKKEKGSFLSNKWKKFWVILKGSSLYWYSNQMAEKADGFVNLPDFTVERASECKKKHAFKISHPQIKTFYFAAENVQEMNVWLNKLGSAVIHQESTTKDEECYSESEQEDPEIAAETPPPPHASQTQSLTAQQASSSSPSLSGTSYSFSSLENTVKTPSSFPSSLSKERQSLPDTVNSLSAAEDEGQPITFAVQVHSPVPSEAGIHKALENSFVTSESGFLNSLSSDDTSSLSSNHDHLTVPDKPAGSKIMDKEETKVSEDDEMEKLYKSLEQASLSPLGDRRPSTKKELRKSFVKRCKNPSINEKLHKIRTLNSTLKCKEHDLAMINQLLDDPKLTARKYREWKVMNTLLIQDIYQQQRASPAPDDTDDTPQELKKSPSSPSVENSI

SEQ ID NO: 798 - DNA, 1702 bp, Homo sapiens
agatctatctggaggagtttctgtggagccagccaccctcaccaggtgccttccattagagtttaatgctttgctgcggtttcctgaaagagccccacagagagtgggtctcgatgggtcctgaaccgcaccacaaccggccagtgagacctcctgctcacatccgtaaagcccactgattcttttactacactttttatgagaacaagacattttctaggaagatggtggcagaaaaagagaccctgagcttaaacaaatgcccagacaagatgccgaagaggaccaagctgctggcacaacagccgctcccggtgcaccagcctcactctctggtttctgagggtttcacagtcaaagccatgatgaaaaactcagtcgtgagaggccctccagctgcaggggcatttaaagaaagaccaaccaagcccacagcatttcgaaaattctatgagcgaggtgacttcccaattgcccttgagcatgattcgaaaggaaacaaaatcgcctggaaggtagaaattgagaagctggattaccatcattatctgcctctgttttttgatgggctttgtgaaatgacatttccctatgagttttttgctcggcaaggaatccacgacatgctggaacacggtgggaacaagatcctacctgtccttccacagctcattatcccgataaaaaatgccttgaacctccgaaaccgacaggtcatctgtgtcactctcaaggtcctccagcatctggttgtgtcagctgagatggtgggcaaggccttggtgccttattaccgtcaaatcctccctgtcctgaacatctttaagaatatgaatgggtcttactctttgcccaggctggagtgcagtggcgcgatcatggctcgttgcaacctcgaccacctgggctcaagtgatcctcccacctcagcctctcaagtagctgagattatagtgaactccggagacggcattgactacagccagcagaagagggagaacattggggacttgatccaggagacactggaggccttcgagcgctacggaggagaaaatgcctttatcaacattaagtacgtggtcccaacctacgagtcttgcttgctaaactaacagtggcagcagctgggacttgaaacctcccgttggtgttgggatcatctgtctctgttgcttttagcatctcattccttgtgacttccacagctttcttttctacagctgctaaaatagtggcttatgggccattggactgttagccctattgagagcaaggctttccaatacataaatagtgtctgtttcttagattacaatagtgtactgtgcttatttgttctaagagaagaattgcttctttatacagctccgacagaagcaggagtccgagttaaaccttcagttgtatagacaataaactataattttcatatgcaattcagcaattgctgttctgtgtgtgcctgccctgggggtgatgtcagaggttgtaagggaagagtttatgctgactgcttactaggtgtttgtcatggaagagaagcatgggttcagcagtgcctctctagcagctgtgcggaataatgtgctttgacattcaataaaactgttgaatctaaaaaaaaaaaaaaaaaaaaaaaaaaaaaaaaaaaaaaaaaaaaaaaaaaaaaaaaaaaaaaaaaaaaaaaaaaaaaaaaaaa

SEQ ID NO: 799 - protein, 296 aa, Homo sapiens
MVAEKETLSLNKCPDKMPKRTKLLAQQPLPVHQPHSLVSEGFTVKAMMKNSVVRGPPAAGAFKERPTKPTAFRKFYERGDFPIALEHDSKGNKIAWKVEIEKLDYHHYLPLFFDGLCEMTFPYEFFARQGIHDMLEHGGNKILPVLPQLIIPIKNALNLRNRQVICVTLKVLQHLVVSAEMVGKALVPYYRQILPVLNIFKNMNGSYSLPRLECSGAIMARCNLDHLGSSDPPTSASQVAEIIVNSGDGIDYSQQKRENIGDLIQETLEAFERYGGENAFINIKYVVPTYESCLLN

SEQ ID NO: 800 - DNA, 4731 bp, Homo sapiens
tgaactgaggcgaactccgccgccaagtgagtgaggaggaggaggaggagaaggaggaggaggaagaggaggagcgcagtcggagcgcggcggcagcggcagaggcgccgcggcggggaccagcccagagagaccccccgagcccgcggcacaggcggcggcggcgctgagcgggctcgaccagccgagcgagcggcggccccggctcctcctcgtccggcgccagcagcccgcgccccgcgcccgcactcggccagccgagacccgcctcccgcccgcccgccggcctcgtgagggacgcgccgagccgggcggccgagagcggcggcggctgggagcgcgtcgggcccgggcggaaagtgcctgcggggggcgggcgagcgcgcggtgccggccgccccggggctcggcgcgggagccagagcgggagccggcgcggagcgggacgccgggtcccgagcggcccgcggccggggctcgcccccgcccctccctcctctccggcggcggcggcggcggcggcgggcggagtgagctgcggagcctggaatatggtcggggaaatggaaacgaaggagaagccgaagcccaccccagattacctgatgcagctgatgaacgacaagaagctcatgagcagcctgcccaacttctgcgggatcttcaaccacctcgagcggctgctggacgaagaaattagcagagtacggaaagacatgtacaatgacacattaaatggcagtacagagaaaaggagtgcagaattgcctgatgctgtgggacctattgttcagttacaagagaaactttatgtgcctgtaaaagaatacccagattttaattttgttgggagaatccttggacctagaggacttacagccaaacaacttgaagcagaaaccggatgtaaaatcatggtccgaggcaaaggctcaatgagggataaaaaaaaggaggagcaaaatagaggcaagcccaattgggagcatctaaatgaagatttacatgtactaatcactgtggaagatgctcagaacagagcagaaatcaaattgaagagagcagttgaagaagtgaagaaattattggtacctgcagcagaaggagaagacagcctgaagaagatgcagctgatggagcttgcgattctgaatggcacctacagagatgccaacattaaatcaccagcccttgccttttctcttgcagcaacagcccaggctgctccaaggatcattactgggcctgcgccggttctcccaccagctgccctgcgtactcctacgccagctggccctaccataatgcctttgatcagacaaatacagaccgctgtcatgccaaacggaactcctcacccaactgctgcaatagttcctccagggcccgaagctggtttaatctatacaccctatgagtacccctacacattggcaccagctacatcaatccttgagtatcctattgaacctagtggtgtattaggtgcggtggctactaaagttcgaaggcacgatatgcgtgtccatccttaccaaaggattgtgaccgcagaccgagccgccaccggcaactaacctatgaccttctgacctctgaactcttcacccaatgatgacctgaccatgcctgcctgctgatcagttaactggtaatcgcctttgcttgcctgtcgtcagtgcagcgagctgaggcacttgtccgttcgtcttaccatctaaccaaacaaaagacaaagaaattgttgtcctccaactcagctttttttttttttttttcctgtttgggtgaaagtggttctagaaactgcactgaatagtagtaaagcaataaggcccaattcatcccacagcactgatcatcttttaatatcccaccctaagcgaacggtaagaaggcctctcttaagaaggggagacagatggtccttaactactcaatgacagaggcagttactgtgagagacttctaggaatctttttcttctcatagcgaagtcaaagctctctctgaatgtactgtgtgatgatgcatcatgcatgaaccttcggtcagggatatcattggtgaagtgatttcaaaaagtattcaaaatttgatatgctgtttagtcactacagtgccctcaaagggcagaagttgcagccttttttatattgcctgccaaaatttgaagtattagaagaaagtgtgccatgagagaaaaacttaaggagttttgaaaagtaatgcaaataacaaaactgcaacactatttttaaaaagataaatatctgagttaaaattactgaatctttattttacacctaaaaaaatatgagaacaaggtacatgcattatgtgtcacattactgggcaaactgttcaagtatttttttttaaacctccctgtatagaaaaaaatcattaaggatgtaaaagccatgcttgcctatttgctgtatacatgtaatgaaattgtagataaagtgtagtgcattgaaacaaatgaacaaaaagtagatacttttactatacaagggtgctggtgcagaaaaaaatatatatatttttggaaatgtagcattttatactttcaagtgttataaaaaaaaagaaaaagaacaaagaaaccctttatttcattaaatgattttttctggtggttgtcaagaaacaaaagaccaaaagagcctttttgtctttcttttttattttttaagtattggaataagtctaaagaaaagaaagtgccttattttccttcatggtcattcagtcaagtgtctcataaagatcagctcctccctcagaatacaagttaatgcatgttactcagtcgcccagtatgtgaaagaagatatgagggagacaaatgagttgatagtttgaattataggatttttgccacgttaccttgatgcaaatttgccaaatctgatactgtgaaaagatttgataacttttctaatgcctgactagtaagttttaaaacatcattctttaaaagaatagtttaatacttttggttattccaatcttcaatgttaacccaaaggattctgagataaaaattatgtgtcatctaaacttcagtttacagacaaaattagagctttgttttatttggagaagggggatgcattcatttgattttgttttttgtttttaattaattgaatataataggatacctagcaaatgttttcacaaaagtgaatctttgtgattttcattctagaaaacaatgttttaaatcacccaaatttaatcacatgtctttatatcataccagataactggtgtagtgtatccttttactgtttcaataacctctgcctcccccaccccttaactttaaaagaatgtgaaaaactagcatcatagtgcatataaatactcaaccacatttcagcttaagcttctaatttctcaagaagttgaaacagttagttatgtagttgaagcaatttgtgtgcaaagcctacatctaaacacttgagtgaataatcattaactgctcagtaccagacgtggcaaatctcaagtgacagtggacccccccccccgcccagcttatcaactcgtcccctcttccacaccttcccagcatcacagtcagaggtcagcaggaagctgagtcattaccttcttggtgacctcccccaccatcttgtctcacttggaaaccgttgtcagtttatttactatgcaatagacattcattgttttgtatccagctagctttggtttaatatgccactgctttgtctttctgttacacatacagttttgatttatttacaatatatgctgtgccattttgatttttatattgtttggttggttgaataaatttgcgacactcaaacacttgaggtgatagttgttaaaaacaataccagtatttgatccagtttcatctcaactatgttatacctggacattttagatgtttatcaaaggtcttttatggggaagaaagtaaatgtatgaaataataaatgtgtgacatttatagggaatgttggctctgaacaaacttttgaaaacttggttgacaaaattttggatcaactgaaaaaagcatgacttttgaaatctctgaatgccttggttctcagtattatcattctttattgaatttatttcttattaaaatatgtagtttttaagactttttttctgacagtattatgtaattttttagcgtgggtagatgggagtgtcgcttgtatgttatcgtacagctgacatgtatttttgtctattctttattatcttagtttcatgctatgtatgtaccataaccaacctattgcctatgagaaacatgtaagataatgtatttacagccattgttacaagtttataatgtatttttctatcttgttttatatgtatgttatataacattcaaaaagaatttttttcttgattgagaaaaggatacaaaatgcaaaatccacaattttgataactgaaaattgccaattgttttgcagtactttattatattgggtgtcttgtcttttttgggcttttagttagctaatgaatgaatacattagacacttttgggttttagttgggattttacatagcttgcattttaattctttggttctttgctgtttctattaacccacagcattattttaataaatgttataataccaacctactaactctggactttgtctgtttattaacctttatatgtttaattaaaataaacaaataaagacaaaa

SEQ ID NO: 801 - protein, 341 aa, Homo sapiens
MVGEMETKEKPKPTPDYLMQLMNDKKLMSSLPNFCGIFNHLERLLDEEISRVRKDMYNDTLNGSTEKRSAELPDAVGPIVQLQEKLYVPVKEYPDFNFVGRILGPRGLTAKQLEAETGCKIMVRGKGSMRDKKKEEQNRGKPNWEHLNEDLHVLITVEDAQNRAEIKLKRAVEEVKKLLVPAAEGEDSLKKMQLMELAILNGTYRDANIKSPALAFSLAATAQAAPRIITGPAPVLPPAALRTPTPAGPTIMPLIRQIQTAVMPNGTPHPTAAIVPPGPEAGLIYTPYEYPYTLAPATSILEYPIEPSGVLGAVATKVRRHDMRVHPYQRIVTADRAATGN

SEQ ID NO: 802 - DNA, 5693 bp, Homo sapiens
tgaactgaggcgaactccgccgccaagtgagtgaggaggaggaggaggagaaggaggaggaggaagaggaggagcgcagtcggagcgcggcggcagcggcagaggcgccgcggcggggaccagcccagagagaccccccgagcccgcggcacaggcggcggcggcgctgagcgggctcgaccagccgagcgagcggcggccccggctcctcctcgtccggcgccagcagcccgcgccccgcgcccgcactcggccagccgagacccgcctcccgcccgcccgccggcctcgtgagggacgcgccgagccgggcggccgagagcggcggcggctgggagcgcgtcgggcccgggcggaaagtgcctgcggggggcgggcgagcgcgcggtgccggccgccccggggctcggcgcgggagccagagcgggagccggcgcggagcgggacgccgggtcccgagcggcccgcggccggggctcgcccccgcccctccctcctctccggcggcggcggcggcggcggcgggcggagtgagctgcggagcctggaatatggtcggggaaatggaaacgaaggagaagccgaagcccaccccagattacctgatgcagctgatgaacgacaagaagctcatgagcagcctgcccaacttctgcgggatcttcaaccacctcgagcggctgctggacgaagaaattagcagagtacggaaagacatgtacaatgacacattaaatggcagtacagagaaaaggagtgcagaattgcctgatgctgtgggacctattgttcagttacaagagaaactttatgtgcctgtaaaagaatacccagattttaattttgttgggagaatccttggacctagaggacttacagccaaacaacttgaagcagaaaccggatgtaaaatcatggtccgaggcaaaggctcaatgagggataaaaaaaaggaggagcaaaatagaggcaagcccaattgggagcatctaaatgaagatttacatgtactaatcactgtggaagatgctcagaacagagcagaaatcaaattgaagagagcagttgaagaagtgaagaaattattggtacctgcagcagaaggagaagacagcctgaagaagatgcagctgatggagcttgcgattctgaatggcacctacagagatgccaacattaaatcaccagcccttgccttttctcttgcagcaacagcccaggctgctccaaggatcattactgggcctgcgccggttctcccaccagctgccctgcgtactcctacgccagctggccctaccataatgcctttgatcagacaaatacagaccgctgtcatgccaaacggaactcctcacccaactgctgcaatagttcctccagggcccgaagctggtttaatctatacaccctatgagtacccctacacattggcaccagctacatcaatccttgagtatcctattgaacctagtggtgtattaggtatggctttcccaacgaaaggctaagaattcaagaacggtcttaactgaaccctcatcagatctgaatttaacaaatgcttagtctcagcagcctccgggggaaaaaagcttagcctagcagtcagtgacttacttgcactttttgcacatagatataaagtaaaattatgttattaatttggtttagtctgtaatattacacagtaatggtaatttataaaggagtgtatagtagtatactgactgctaagtgtactatactgtttgctttactaatcacctaattcattgcagttcatacttattgactcagagtttaaaaccacaatctgtaggctttaagaattgcttttaaacctttttaagtgataaactcttgaagtggtcttaaggttagcaaataattgtctgtattaaacatggcgttatttaagtagtcctgctgcaagaaaggcacttcagtgaatatgtgactagtaaagcttaaatatgtttggatctaatagagctcatgaaatactgtaacttggggattgtaaatgaatggatacaataggttaaggcccaagatgtttgaaatgaatgcaatattaatagatgcatatatacatgacatattgtggttaattttaaaactactgtgccttaacgtgtttcttaaacttttgtagtaaatgaacatttgaaatccattttgataaacctgctgttaatgttttttccccccttgtgaatgttttctaactttgtcttggtaattgcaatttaactaggtgcggtggctactaaagttcgaaggcacgatatgcgtgtccatccttaccaaaggattgtgaccgcagaccgaggttagtttagttctgcagttcttgtctataagaaatgcgttgggtgtccataaaatttgcaacaccacacctgatggaaaaatgtaattgcttacctgcacacagttttttttccttttctaaatttgtttgtgatcattgacagatttaagggttgggttttttgttttggtttggttttttctcccttcatattttaacttattaaatcttctattattatgtactatgatttattcctactaaaacataaattagtcaatttggggagctattaaattttgatgttgcctcagttattttcattaataacttttgctaaaatttaccttttaaaagttctgaaatttggggttggtattgcaaaatgaattgaacggatggtgctttaatgagagaagtaaaggaatatatgcctcctgtgtacttttggagaaaactgaagatttagtttccatttttctttataataaaatatttgagccactgtataaacatgagggtgcacatgtcaagtacttagctaaaatcaacaaagtgaggactgtgaagataactttcatgtagttggatttttttatataaattagagcgtcaattcccttttattcttacattctcttgccaaaatggatcctttgatttttgtcatttgctgctaaaatatattatctgaaggtaaactgtctcttgaagttctgtggtggtatgagatccagctgtgtgaatataatttttgactaacctgtgactggaaaataagtcttcatttttctcctttacaacttttataatttgtgtcctgtatatgcccttggacccttttataaattatttttgcttattgaggaatggtattttcggtttattgacattgaattgttttctaagtttttccatcacaagataggaatatcaagcatggtagtaaaaaaggattttttacaagtttctattatggcacatttgtttcctacaaattaaattgatcaaagtctcaaatattagtggaggaaaaagtgctggatttgtacttcaattgtacatcttctatgaatttatgaaggacctacctgctttatgtgattaccttgagtactgatgataaatactagacacagctgttgtccacatcagaaataacatgcctttcccaaagacattgttaatatttgtttagcataatccataaagaacgttgaagacttttaaactaatgtattcatcactaacagtgattgttcagtgaacaaaatagaccccagctccgtggtcgtctatgaggatggtattccttgtaagtgttctgtatgagcacgtctcatagggatggggaagttttttggaaagtcacttgagttttaaagaaactggacaattccatgaataatttgaggttttattcatattgctaatgtctacaattgttctaaagagtattttaaagtagtttttttcccccagctaatctttccctatgtatgcccccttttaggagatttctcaccattttgctttaacacaataattattggcctacttaatactccagtgccttgagatagttggacatattttaggaagattttattgtatttggaaaattacgacacattccatgcatggatcttttgtagttacgtgttttgattagtcctgtcactgtttttatttaaaatgcagtgtcagcaaaccgaaatgctcatttcttttttagtaacagagtactcgtatacttatcactgtatgcactcattgggtctaagggagatgtctgaagtccttcacttaaattattttatgatactactgttttctctatttttgaggttaaaattattttaaaaaaatattttgaagagaagtttattagtataagcattcatttaatgcaaaaaaactcagcccttggacatataaccatgtaattctatatgaacgtttagagtactacatggttgaccaatatctagttctttactaaaagtaaactcacctctttatatatatttcaaaactgaatttgaagcctattagagaccaactgaccttttagttgtaatgaactgtatggtcttgcatggtgacacacctgtgtaggaggccaagacttggcagaggatgtagtctaggtgtcctggtatatataaatggtcactcacttcgtttatatattccacactcagaaaagaagtcagagttttttctgagtaatacaaaaaccatcacttacataatttgtataagaaactttaaacagttttaatcaaaactatgagtaacatcaaaaatgctttaagattctatattttggaatacctgtgaagtagtatgactacatcatgttaaatatttattttcttctatgattttggagcagcaatttttattttaaataaaattccacttttaagaaattcagggaagatttggtcacattgaagatacagtatttttgtagtatttataaactgttctaaatgatagactatagaaaacatttttgtcatatgaaggtaaatcagtccattattttggatcatttaaactgaacattacaccttctgggctttgatttatgaagtggcacagaatctaactttgcactgaatatcttttcattcacatctcctctgccttagtcacaatggcaacagtacagaaaattctatcaaacctcagaatatagtagaaataattaagctgttgaatgagtcttaaaaattatactactgttaagtggaccaagtttggtgaagcagaatgtgacaaaggttgattaaggaaggaacaactcaaggacattgggaatgataacttttccacttgagaactactttatgttttactgtaatttttaaagtttttttgtcctttttgttattttgcaaaagaaaatagtatttacaggtggcttcttttaaaatataaaaatataaagcaggaatgtatatgaaatgtcagattttattgtatttgcagagtattagctttgaaattgaataaagaaagctgtttgtagttttaaaatgccttattggtatcaattagaaatttcttctattttttgatgtacttagagctttttgagtgtagaattttaaatggcaggattttacagtgtttacatgcaagtgcattttataagtgttctatatgtgtaaaatagtattttcaactggaaagtgttggctagtgcaaaaggcctggccattttctggttcccatgatgttgcctacactgctagactacagtttagtatcgctttgtatcatgaggccaagaaattccatgttgtttgtaaatagaataattgaaaaagcaataaacatttattgaacaaaagaaaaaaaaaaa

SEQ ID NO: 803 - protein, 319 aa, Homo sapiens
MVGEMETKEKPKPTPDYLMQLMNDKKLMSSLPNFCGIFNHLERLLDEEISRVRKDMYNDTLNGSTEKRSAELPDAVGPIVQLQEKLYVPVKEYPDFNFVGRILGPRGLTAKQLEAETGCKIMVRGKGSMRDKKKEEQNRGKPNWEHLNEDLHVLITVEDAQNRAEIKLKRAVEEVKKLLVPAAEGEDSLKKMQLMELAILNGTYRDANIKSPALAFSLAATAQAAPRIITGPAPVLPPAALRTPTPAGPTIMPLIRQIQTAVMPNGTPHPTAAIVPPGPEAGLIYTPYEYPYTLAPATSILEYPIEPSGVLGMAFPTKG

SEQ ID NO: 804 - DNA, 6972 bp, Homo sapiens
tgaactgaggcgaactccgccgccaagtgagtgaggaggaggaggaggagaaggaggaggaggaagaggaggagcgcagtcggagcgcggcggcagcggcagaggcgccgcggcggggaccagcccagagagaccccccgagcccgcggcacaggcggcggcggcgctgagcgggctcgaccagccgagcgagcggcggccccggctcctcctcgtccggcgccagcagcccgcgccccgcgcccgcactcggccagccgagacccgcctcccgcccgcccgccggcctcgtgagggacgcgccgagccgggcggccgagagcggcggcggctgggagcgcgtcgggcccgggcggaaagtgcctgcggggggcgggcgagcgcgcggtgccggccgccccggggctcggcgcgggagccagagcgggagccggcgcggagcgggacgccgggtcccgagcggcccgcggccggggctcgcccccgcccctccctcctctccggcggcggcggcggcggcggcgggcggagtgagctgcggagcctggaatatggtcggggaaatggaaacgaaggagaagccgaagcccaccccagattacctgatgcagctgatgaacgacaagaagctcatgagcagcctgcccaacttctgcgggatcttcaaccacctcgagcggctgctggacgaagaaattagcagagtacggaaagacatgtacaatgacacattaaatggcagtacagagaaaaggagtgcagaattgcctgatgctgtgggacctattgttcagttacaagagaaactttatgtgcctgtaaaagaatacccagattttaattttgttgggagaatccttggacctagaggacttacagccaaacaacttgaagcagaaaccggatgtaaaatcatggtccgaggcaaaggctcaatgagggataaaaaaaaggaggagcaaaatagaggcaagcccaattgggagcatctaaatgaagatttacatgtactaatcactgtggaagatgctcagaacagagcagaaatcaaattgaagagagcagttgaagaagtgaagaaattattggtacctgcagcagaaggagaagacagcctgaagaagatgcagctgatggagcttgcgattctgaatggcacctacagagatgccaacattaaatcaccagcccttgccttttctcttgcagcaacagcccaggctgctccaaggatcattactgggcctgcgccggttctcccaccagctgccctgcgtactcctacgccagctggccctaccataatgcctttgatcagacaaatacagaccgctgtcatgccaaacggaactcctcacccaactgctgcaatagttcctccagggcccgaagctggtttaatctatacaccctatgagtacccctacacattggcaccagctacatcaatccttgagtatcctattgaacctagtggtgtattagagtggattgaaatgccagtcatgcctgatatttcagcccattgacttgctggatgaaggactagaatacagcagctgttataacacgaccagtcaatgtggaacaaactgtttctgtgcaacccctttgttttaccagacaaaatttgaatactttttttcctgaattgtatatgaccttggtgctgcatgcatgctgttgacttttaggactttgatcttttaaggttttttttccccagcattaatattgatttataaagatttgaaaatctttaatgaactggagaacactaagatttaaactcgaaaattcgttgttcaagtaaagaaagccatgatgctctgtatgttatctgtgtgtgtgcatgcactcaggtgccctttgtttcatgaacaaatacatttcattgtacatgttttctgtttaaatcattgtataaagtaattgcaggtcagaattataccacagaactgtttatgagaggcttgtgtctgttgcacatttcttgaagcatttttaaaataacatgtaacctgtaaccttgttgtttaagttttcttttctattaatactctgtcctgtggtcccgtgcatgctccttttcccagaactcctctctgctgcacccacagcatctgttcccgaggagttatgactcttgacttcctgcagggctggggctcttagccaccagctgctgttccagcactttcagcgcaagatctccctgattttgccacgtggaattgtacttgtatatgattaccttatctaaaatgaataagaggtgatggaccagtttactgcttagaaatagcaagaggcactgcagtaaaacttgtttctcattgtaaagcttcatgtcttttgtttgttggaaaatttttacttatagaaacttaattattagactggtaaaataaagaccaaaatatgcagatttctaattggcattcataaggtgaataataataagtgcccaatgaaaaaatctattatggttaatttcatttcttgctttgccacctaagcagtaaaacatgatattgaccacttggagaactcagaaaattattttaaatttctaagttataataaatttgcacacagataacatgcatgctatttatgtcacatctcacattaaattattttaaaataagcagtgcccttcaaaacagatgcagacatgtgtgttggtagtagtgaggagattggtattagcatcaagtcttcattgatgactaatttttaattcccttccttttatctttaggtatggctttcccaacgaaaggctaagaattcaagaacggtcttaactgaaccctcatcagatctgaatttaacaaatgcttagtctcagcagcctccgggggaaaaaagcttagcctagcagtcagtgacttacttgcactttttgcacatagatataaagtaaaattatgttattaatttggtttagtctgtaatattacacagtaatggtaatttataaaggagtgtatagtagtatactgactgctaagtgtactatactgtttgctttactaatcacctaattcattgcagttcatacttattgactcagagtttaaaaccacaatctgtaggctttaagaattgcttttaaacctttttaagtgataaactcttgaagtggtcttaaggttagcaaataattgtctgtattaaacatggcgttatttaagtagtcctgctgcaagaaaggcacttcagtgaatatgtgactagtaaagcttaaatatgtttggatctaatagagctcatgaaatactgtaacttggggattgtaaatgaatggatacaataggttaaggcccaagatgtttgaaatgaatgcaatattaatagatgcatatatacatgacatattgtggttaattttaaaactactgtgccttaacgtgtttcttaaacttttgtagtaaatgaacatttgaaatccattttgataaacctgctgttaatgttttttccccccttgtgaatgttttctaactttgtcttggtaattgcaatttaactaggtgcggtggctactaaagttcgaaggcacgatatgcgtgtccatccttaccaaaggattgtgaccgcagaccgaggttagtttagttctgcagttcttgtctataagaaatgcgttgggtgtccataaaatttgcaacaccacacctgatggaaaaatgtaattgcttacctgcacacagttttttttccttttctaaatttgtttgtgatcattgacagatttaagggttgggttttttgttttggtttggttttttctcccttcatattttaacttattaaatcttctattattatgtactatgatttattcctactaaaacataaattagtcaatttggggagctattaaattttgatgttgcctcagttattttcattaataacttttgctaaaatttaccttttaaaagttctgaaatttggggttggtattgcaaaatgaattgaacggatggtgctttaatgagagaagtaaaggaatatatgcctcctgtgtacttttggagaaaactgaagatttagtttccatttttctttataataaaatatttgagccactgtataaacatgagggtgcacatgtcaagtacttagctaaaatcaacaaagtgaggactgtgaagataactttcatgtagttggatttttttatataaattagagcgtcaattcccttttattcttacattctcttgccaaaatggatcctttgatttttgtcatttgctgctaaaatatattatctgaaggtaaactgtctcttgaagttctgtggtggtatgagatccagctgtgtgaatataatttttgactaacctgtgactggaaaataagtcttcatttttctcctttacaacttttataatttgtgtcctgtatatgcccttggacccttttataaattatttttgcttattgaggaatggtattttcggtttattgacattgaattgttttctaagtttttccatcacaagataggaatatcaagcatggtagtaaaaaaggattttttacaagtttctattatggcacatttgtttcctacaaattaaattgatcaaagtctcaaatattagtggaggaaaaagtgctggatttgtacttcaattgtacatcttctatgaatttatgaaggacctacctgctttatgtgattaccttgagtactgatgataaatactagacacagctgttgtccacatcagaaataacatgcctttcccaaagacattgttaatatttgtttagcataatccataaagaacgttgaagacttttaaactaatgtattcatcactaacagtgattgttcagtgaacaaaatagaccccagctccgtggtcgtctatgaggatggtattccttgtaagtgttctgtatgagcacgtctcatagggatggggaagttttttggaaagtcacttgagttttaaagaaactggacaattccatgaataatttgaggttttattcatattgctaatgtctacaattgttctaaagagtattttaaagtagtttttttcccccagctaatctttccctatgtatgcccccttttaggagatttctcaccattttgctttaacacaataattattggcctacttaatactccagtgccttgagatagttggacatattttaggaagattttattgtatttggaaaattacgacacattccatgcatggatcttttgtagttacgtgttttgattagtcctgtcactgtttttatttaaaatgcagtgtcagcaaaccgaaatgctcatttcttttttagtaacagagtactcgtatacttatcactgtatgcactcattgggtctaagggagatgtctgaagtccttcacttaaattattttatgatactactgttttctctatttttgaggttaaaattattttaaaaaaatattttgaagagaagtttattagtataagcattcatttaatgcaaaaaaactcagcccttggacatataaccatgtaattctatatgaacgtttagagtactacatggttgaccaatatctagttctttactaaaagtaaactcacctctttatatatatttcaaaactgaatttgaagcctattagagaccaactgaccttttagttgtaatgaactgtatggtcttgcatggtgacacacctgtgtaggaggccaagacttggcagaggatgtagtctaggtgtcctggtatatataaatggtcactcacttcgtttatatattccacactcagaaaagaagtcagagttttttctgagtaatacaaaaaccatcacttacataatttgtataagaaactttaaacagttttaatcaaaactatgagtaacatcaaaaatgctttaagattctatattttggaatacctgtgaagtagtatgactacatcatgttaaatatttattttcttctatgattttggagcagcaatttttattttaaataaaattccacttttaagaaattcagggaagatttggtcacattgaagatacagtatttttgtagtatttataaactgttctaaatgatagactatagaaaacatttttgtcatatgaaggtaaatcagtccattattttggatcatttaaactgaacattacaccttctgggctttgatttatgaagtggcacagaatctaactttgcactgaatatcttttcattcacatctcctctgccttagtcacaatggcaacagtacagaaaattctatcaaacctcagaatatagtagaaataattaagctgttgaatgagtcttaaaaattatactactgttaagtggaccaagtttggtgaagcagaatgtgacaaaggttgattaaggaaggaacaactcaaggacattgggaatgataacttttccacttgagaactactttatgttttactgtaatttttaaagtttttttgtcctttttgttattttgcaaaagaaaatagtatttacaggtggcttcttttaaaatataaaaatataaagcaggaatgtatatgaaatgtcagattttattgtatttgcagagtattagctttgaaattgaataaagaaagctgtttgtagttttaaaatgccttattggtatcaattagaaatttcttctattttttgatgtacttagagctttttgagtgtagaattttaaatggcaggattttacagtgtttacatgcaagtgcattttataagtgttctatatgtgtaaaatagtattttcaactggaaagtgttggctagtgcaaaaggcctggccattttctggttcccatgatgttgcctacactgctagactacagtttagtatcgctttgtatcatgaggccaagaaattccatgttgtttgtaaatagaataattgaaaaagcaataaacatttattgaacaaaagaaaaaaaaaaa

SEQ ID NO: 805 - protein, 325 aa, Homo sapiens
MVGEMETKEKPKPTPDYLMQLMNDKKLMSSLPNFCGIFNHLERLLDEEISRVRKDMYNDTLNGSTEKRSAELPDAVGPIVQLQEKLYVPVKEYPDFNFVGRILGPRGLTAKQLEAETGCKIMVRGKGSMRDKKKEEQNRGKPNWEHLNEDLHVLITVEDAQNRAEIKLKRAVEEVKKLLVPAAEGEDSLKKMQLMELAILNGTYRDANIKSPALAFSLAATAQAAPRIITGPAPVLPPAALRTPTPAGPTIMPLIRQIQTAVMPNGTPHPTAAIVPPGPEAGLIYTPYEYPYTLAPATSILEYPIEPSGVLEWIEMPVMPDISAH

SEQ ID NO: 806 - DNA, 7919 bp, Homo sapiens
tgaactgaggcgaactccgccgccaagtgagtgaggaggaggaggaggagaaggaggaggaggaagaggaggagcgcagtcggagcgcggcggcagcggcagaggcgccgcggcggggaccagcccagagagaccccccgagcccgcggcacaggcggcggcggcgctgagcgggctcgaccagccgagcgagcggcggccccggctcctcctcgtccggcgccagcagcccgcgccccgcgcccgcactcggccagccgagacccgcctcccgcccgcccgccggcctcgtgagggacgcgccgagccgggcggccgagagcggcggcggctgggagcgcgtcgggcccgggcggaaagtgcctgcggggggcgggcgagcgcgcggtgccggccgccccggggctcggcgcgggagccagagcgggagccggcgcggagcgggacgccgggtcccgagcggcccgcggccggggctcgcccccgcccctccctcctctccggcggcggcggcggcggcggcgggcggagtgagctgcggagcctggaatatggtcggggaaatggaaacgaaggagaagccgaagcccaccccagattacctgatgcagctgatgaacgacaagaagctcatgagcagcctgcccaacttctgcgggatcttcaaccacctcgagcggctgctggacgaagaaattagcagagtacggaaagacatgtacaatgacacattaaatggcagtacagagaaaaggagtgcagaattgcctgatgctgtgggacctattgttcagttacaagagaaactttatgtgcctgtaaaagaatacccagattttaattttgttgggagaatccttggacctagaggacttacagccaaacaacttgaagcagaaaccggatgtaaaatcatggtccgaggcaaaggctcaatgagggataaaaaaaaggaggagcaaaatagaggcaagcccaattgggagcatctaaatgaagatttacatgtactaatcactgtggaagatgctcagaacagagcagaaatcaaattgaagagagcagttgaagaagtgaagaaattattggtacctgcagcagaaggagaagacagcctgaagaagatgcagctgatggagcttgcgattctgaatggcacctacagagatgccaacattaaatcaccagcccttgccttttctcttgcagcaacagcccaggctgctccaaggatcattactgggcctgcgccggttctcccaccagctgccctgcgtactcctacgccagctggccctaccataatgcctttgatcagacaaatacagaccgctgtcatgccaaacggaactcctcacccaactgctgcaatagttcctccagggcccgaagctggtttaatctatacaccctatgagtacccctacacattggcaccagctacatcaatccttgagtatcctattgaacctagtggtgtattaggtaagttcttctccccatggggttaacaacattctctttataaatatttttgctccctcagattttgaaatgattttatcagttttagagaggcaagacaagtttgcattagggaagaccgaaaactaaattttgttttatttcagcctctcataagggttcccctttgaaataattgcaccttaaatttattcagatccactttggtaactgaggttcagtttggttgggtaaatctgttgtgtacatttcaacaaatacttttacatttgacattactgaggtcattctgagttttaggtcccaccccattggcccgtcacctccatcagctccacttctcaaactttatttgagatttattttatctcacaggtttgtgtaattgttggaaaatttttaaacttctaagtgaaagtagtctgagcgctttataaaattcatattattgtgtgtgttttgtaatatttgcgatcacttaaaatatcagataaatacagtcatgcatcgcttaacaacggggatacagtctaagaattgccttgtctggcagtttcatcatttggtgtacatcatagagtgtacttacacagacatagatgatatcgtttactacacacctaggctgtgtggtatagccattataatcttatgggaccacatagtataagtggtccgttgttgaccaaaatgttgttatgcaggcatgactgtagttgtattcttaagatttttcagttcttgtgttttggagtcctagtcatattaaacatgagagatactcttaatttcagtagtacagtatggaatagttaaataaatagcaaatcactgaattcagaatctcacttaaggcagaaattaaaatcataatataaacgcttggttttacatgaacaaaaagtggtgtgctcgaaaaagacattactgatgccttttttttatagagtggattgaaatgccagtcatgcctgatatttcagcccattgacttgctggatgaaggactagaatacagcagctgttataacacgaccagtcaatgtggaacaaactgtttctgtgcaacccctttgttttaccagacaaaatttgaatactttttttcctgaattgtatatgaccttggtgctgcatgcatgctgttgacttttaggactttgatcttttaaggttttttttccccagcattaatattgatttataaagatttgaaaatctttaatgaactggagaacactaagatttaaactcgaaaattcgttgttcaagtaaagaaagccatgatgctctgtatgttatctgtgtgtgtgcatgcactcaggtgccctttgtttcatgaacaaatacatttcattgtacatgttttctgtttaaatcattgtataaagtaattgcaggtcagaattataccacagaactgtttatgagaggcttgtgtctgttgcacatttcttgaagcatttttaaaataacatgtaacctgtaaccttgttgtttaagttttcttttctattaatactctgtcctgtggtcccgtgcatgctccttttcccagaactcctctctgctgcacccacagcatctgttcccgaggagttatgactcttgacttcctgcagggctggggctcttagccaccagctgctgttccagcactttcagcgcaagatctccctgattttgccacgtggaattgtacttgtatatgattaccttatctaaaatgaataagaggtgatggaccagtttactgcttagaaatagcaagaggcactgcagtaaaacttgtttctcattgtaaagcttcatgtcttttgtttgttggaaaatttttacttatagaaacttaattattagactggtaaaataaagaccaaaatatgcagatttctaattggcattcataaggtgaataataataagtgcccaatgaaaaaatctattatggttaatttcatttcttgctttgccacctaagcagtaaaacatgatattgaccacttggagaactcagaaaattattttaaatttctaagttataataaatttgcacacagataacatgcatgctatttatgtcacatctcacattaaattattttaaaataagcagtgcccttcaaaacagatgcagacatgtgtgttggtagtagtgaggagattggtattagcatcaagtcttcattgatgactaatttttaattcccttccttttatctttaggtatggctttcccaacgaaaggctaagaattcaagaacggtcttaactgaaccctcatcagatctgaatttaacaaatgcttagtctcagcagcctccgggggaaaaaagcttagcctagcagtcagtgacttacttgcactttttgcacatagatataaagtaaaattatgttattaatttggtttagtctgtaatattacacagtaatggtaatttataaaggagtgtatagtagtatactgactgctaagtgtactatactgtttgctttactaatcacctaattcattgcagttcatacttattgactcagagtttaaaaccacaatctgtaggctttaagaattgcttttaaacctttttaagtgataaactcttgaagtggtcttaaggttagcaaataattgtctgtattaaacatggcgttatttaagtagtcctgctgcaagaaaggcacttcagtgaatatgtgactagtaaagcttaaatatgtttggatctaatagagctcatgaaatactgtaacttggggattgtaaatgaatggatacaataggttaaggcccaagatgtttgaaatgaatgcaatattaatagatgcatatatacatgacatattgtggttaattttaaaactactgtgccttaacgtgtttcttaaacttttgtagtaaatgaacatttgaaatccattttgataaacctgctgttaatgttttttccccccttgtgaatgttttctaactttgtcttggtaattgcaatttaactaggtgcggtggctactaaagttcgaaggcacgatatgcgtgtccatccttaccaaaggattgtgaccgcagaccgaggttagtttagttctgcagttcttgtctataagaaatgcgttgggtgtccataaaatttgcaacaccacacctgatggaaaaatgtaattgcttacctgcacacagttttttttccttttctaaatttgtttgtgatcattgacagatttaagggttgggttttttgttttggtttggttttttctcccttcatattttaacttattaaatcttctattattatgtactatgatttattcctactaaaacataaattagtcaatttggggagctattaaattttgatgttgcctcagttattttcattaataacttttgctaaaatttaccttttaaaagttctgaaatttggggttggtattgcaaaatgaattgaacggatggtgctttaatgagagaagtaaaggaatatatgcctcctgtgtacttttggagaaaactgaagatttagtttccatttttctttataataaaatatttgagccactgtataaacatgagggtgcacatgtcaagtacttagctaaaatcaacaaagtgaggactgtgaagataactttcatgtagttggatttttttatataaattagagcgtcaattcccttttattcttacattctcttgccaaaatggatcctttgatttttgtcatttgctgctaaaatatattatctgaaggtaaactgtctcttgaagttctgtggtggtatgagatccagctgtgtgaatataatttttgactaacctgtgactggaaaataagtcttcatttttctcctttacaacttttataatttgtgtcctgtatatgcccttggacccttttataaattatttttgcttattgaggaatggtattttcggtttattgacattgaattgttttctaagtttttccatcacaagataggaatatcaagcatggtagtaaaaaaggattttttacaagtttctattatggcacatttgtttcctacaaattaaattgatcaaagtctcaaatattagtggaggaaaaagtgctggatttgtacttcaattgtacatcttctatgaatttatgaaggacctacctgctttatgtgattaccttgagtactgatgataaatactagacacagctgttgtccacatcagaaataacatgcctttcccaaagacattgttaatatttgtttagcataatccataaagaacgttgaagacttttaaactaatgtattcatcactaacagtgattgttcagtgaacaaaatagaccccagctccgtggtcgtctatgaggatggtattccttgtaagtgttctgtatgagcacgtctcatagggatggggaagttttttggaaagtcacttgagttttaaagaaactggacaattccatgaataatttgaggttttattcatattgctaatgtctacaattgttctaaagagtattttaaagtagtttttttcccccagctaatctttccctatgtatgcccccttttaggagatttctcaccattttgctttaacacaataattattggcctacttaatactccagtgccttgagatagttggacatattttaggaagattttattgtatttggaaaattacgacacattccatgcatggatcttttgtagttacgtgttttgattagtcctgtcactgtttttatttaaaatgcagtgtcagcaaaccgaaatgctcatttcttttttagtaacagagtactcgtatacttatcactgtatgcactcattgggtctaagggagatgtctgaagtccttcacttaaattattttatgatactactgttttctctatttttgaggttaaaattattttaaaaaaatattttgaagagaagtttattagtataagcattcatttaatgcaaaaaaactcagcccttggacatataaccatgtaattctatatgaacgtttagagtactacatggttgaccaatatctagttctttactaaaagtaaactcacctctttatatatatttcaaaactgaatttgaagcctattagagaccaactgaccttttagttgtaatgaactgtatggtcttgcatggtgacacacctgtgtaggaggccaagacttggcagaggatgtagtctaggtgtcctggtatatataaatggtcactcacttcgtttatatattccacactcagaaaagaagtcagagttttttctgagtaatacaaaaaccatcacttacataatttgtataagaaactttaaacagttttaatcaaaactatgagtaacatcaaaaatgctttaagattctatattttggaatacctgtgaagtagtatgactacatcatgttaaatatttattttcttctatgattttggagcagcaatttttattttaaataaaattccacttttaagaaattcagggaagatttggtcacattgaagatacagtatttttgtagtatttataaactgttctaaatgatagactatagaaaacatttttgtcatatgaaggtaaatcagtccattattttggatcatttaaactgaacattacaccttctgggctttgatttatgaagtggcacagaatctaactttgcactgaatatcttttcattcacatctcctctgccttagtcacaatggcaacagtacagaaaattctatcaaacctcagaatatagtagaaataattaagctgttgaatgagtcttaaaaattatactactgttaagtggaccaagtttggtgaagcagaatgtgacaaaggttgattaaggaaggaacaactcaaggacattgggaatgataacttttccacttgagaactactttatgttttactgtaatttttaaagtttttttgtcctttttgttattttgcaaaagaaaatagtatttacaggtggcttcttttaaaatataaaaatataaagcaggaatgtatatgaaatgtcagattttattgtatttgcagagtattagctttgaaattgaataaagaaagctgtttgtagttttaaaatgccttattggtatcaattagaaatttcttctattttttgatgtacttagagctttttgagtgtagaattttaaatggcaggattttacagtgtttacatgcaagtgcattttataagtgttctatatgtgtaaaatagtattttcaactggaaagtgttggctagtgcaaaaggcctggccattttctggttcccatgatgttgcctacactgctagactacagtttagtatcgctttgtatcatgaggccaagaaattccatgttgtttgtaaatagaataattgaaaaagcaataaacatttattgaacaaaagaaaaaaaaaaa

SEQ ID NO: 807 - protein, 319 aa, Homo sapiens
MVGEMETKEKPKPTPDYLMQLMNDKKLMSSLPNFCGIFNHLERLLDEEISRVRKDMYNDTLNGSTEKRSAELPDAVGPIVQLQEKLYVPVKEYPDFNFVGRILGPRGLTAKQLEAETGCKIMVRGKGSMRDKKKEEQNRGKPNWEHLNEDLHVLITVEDAQNRAEIKLKRAVEEVKKLLVPAAEGEDSLKKMQLMELAILNGTYRDANIKSPALAFSLAATAQAAPRIITGPAPVLPPAALRTPTPAGPTIMPLIRQIQTAVMPNGTPHPTAAIVPPGPEAGLIYTPYEYPYTLAPATSILEYPIEPSGVLGKFFSPWG

SEQ ID NO: 808 - DNA, 1136 bp, Homo sapiens
agccgggagagtcgttcctgagagcacaagcacccccaaatgtgaagtgcactcggacacacacacacacacacacgcacgcacacacaagcactcatgttctaaagagagaggtctgagtccgaagttgctgctgctgggagcttgagctgagatggactggtcttcatgggcgcccaaggcgctgggtgcagctttccccgagacccccagatggaaaggagggaaggaggaaccccacacactcgccttttgcgagaagatcggcgcgcaccccagagtgccccaagcctttggaatctgcctgctgagcggagcgcgcgagcgtggtggacaggtcccgaacttggccagcgggctttcttggcaacttgctttgcgcagttctccatggaaccctggacccactgtgctcccggcgccttgcctttttttttctttttctttctctcactgtctctttttaaatttatgaactcgaaatgaagcggaaagcagatatgcgcgtcagcatactttggcgggatgctggcccaccactagtattctctggtgctcgttgtgctttgggagatcttctatgcaacatggaaaccatgaattgtaccacagagggagatcttctgtcccactaggaaactgcgaattgtaccacagagggagatcttctatgcaacatggagaccatgaatggtacacacagagagagatcttctatccacatggacaccatgaattgtaccacagaggcagatgttctatccaacatggaaaccatgaactgtacacacagagggggatattccatccaacataggaaccatgaactgtacacacagagggagatcttctatccaacatggagaccatgaattttaccacaaaggaagatgttctatccaaaatggaaaccatgagttgtatgcctagagggagatcttctatccaatatgtaagccacgagttggacacacagagagagatattttatccaacttggaaaccatgaattgtacacacagagagatcttctatccaacacggaaacaacgagttatacccacagggggagatcttctatccaattcaggtgttccttatgtgatagcatactctgcatctacaactagctaaag

SEQ ID NO: 809 - DNA, 2717 bp, Homo sapiens
agtgtcgcgataaatgggcgccggcggagcggagggagatccgagcggcggcggcaagctggctgcgagcggctgagcagcactccaagctcgccggcctttggtctccaggacttgtcccagcagcccctcgaactgagaattacaccatcggacccctggctctgaggccttcagacttggactgtgtcacactgccaggcttccagggctccaacttgcagacggcctgttgtgggacagtctctgtaatcgcgaaagcaaccatggaagacctgggggaaaacaccatggttttatccaccctgagatctttgaacaacttcatctctcagcgtgtggagggaggctctggactggatatttctacctcggccccaggttctctgcagatgcagtaccagcagagcatgcagctggaggaaagagcagagcagatccgttcgaagtcccacctcatccaggtggagcgggagaaaatgcagatggagctgagtcacaagagggctcgagtggagctggagagagcagccagcaccagtgccaggaactacgagcgtgaggtcgaccgcaaccaggagctcctgacgcgcatccggcagcttcaggagcgggaggccggggcggaggagaagatgcaggagcagctggagcgcaacaggcagtgtcagcagaacttggatgctgccagcaagaggctgcgtgagaaagaggacagtctggcccaggctggcgagaccatcaacgcactgaaggggaggatctcggaactgcagtggagcgtgatggaccaggagatgcgggtgaagcgcctggagtcggagaagcaggagctgcaggagcagctggacctgcaacacaaaaaatgccaggaagccaatcagaaaatccaggaactccaggccagccaagaagcaagagcagaccacgagcagcagattaaggatctggagcagaagctgtccctgcaagagcaggatgcagcgattgtgaagaacatgaagtctgagctggtacggctccctaggctggaacgggagctgaagcagctgcgggaggagagcgcgcacctgcgggagatgagagagaccaacgggctgctccaggaagagctggaagggctgcagaggaagctggggcgccaggagaagatgcaggagacgctggttggcttggagctggagaacgagaggctgctggccaagctgcaaagctgggagagactggaccagaccatgggcctgagcatcaggactccagaagacctttccagattcgtggttgagctgcagcagagggagcttgccttgaaggacaagaacagcgccgtcaccagcagcgcccgggggctggagaaggccaggcagcagctgcaggaggagctccggcaggtcagcggccagctgttggaggagaggaagaagcgcgagacccacgaggcgctggcccggaggctccagaaacgggtcctgctgctcaccaaggagcgggacggtatgcgggccatcctggggtcctacgacagcgagctgaccccggccgagtactcaccccagctgacgcggcgcatgcgggaggctgaggatatggtgcagaaggtgcacagccacagcgccgagatggaggctcagctgtcgcaggccctggaggagctgggaggccagaaacaaagagcagacatgctggagatggagctgaagatgctgaagtctcagtccagctctgccgaacagagcttcctgttctccagggaggaggcggacacgctcaggttgaaggtcgaggagctggaaggcgagcggagtcggctggaggaggaaaagaggatgctggaggcacagctggagcggcgagctctgcagggtgactatgaccagagcaggaccaaagtgctgcacatgagcctgaaccccaccagtgtggccaggcagcgcctgcgcgaggaccacagccagctgcaggcggagtgcgagcgactgcgcgggctcctgcgcgccatggagagaggaggcaccgtcccagccgaccttgaggctgccgccgcgagtctgccatcgtccaaggaggtggcagagctgaagaagcaggtggagagtgccgagctgaagaaccagcggctcaaggaggttttccagaccaagatccaggagttccgcaaggcctgctacacgctcaccggctaccagatcgacatcaccacggagaaccagtaccggctgacctcgctgtacgccgagcacccaggcgactgcctcatcttcaaggccaccagcccctcgggttccaagatgcagctactggagacagagttctcacacaccgtgggcgagctcatcgaggtgcacctgcggcgccaggacagcatccctgccttcctcagctcgctcaccctcgagctcttcagccgccagaccgtggcgtagcctgcaggctcgggggcatagccggagccactctgcttggcctgacctgcaggtcccctgccccgccagccacaggctgggtgcacgtcctgcctctccagccccacagggcagcagcatgactgacagacacgctgggacctacgtcgggcttcctgctggggcggccagcaccctctccacgtgcagaccccatgcgtcccggagcctggtgtgtgggcgtcggccaccagcctgggttcctcaccttgtgaaataaaatcttctcccctagacacaaaaaaaaaaaaaaaa

SEQ ID NO: 810 - protein, 718 aa, Homo sapiens
MEDLGENTMVLSTLRSLNNFISQRVEGGSGLDISTSAPGSLQMQYQQSMQLEERAEQIRSKSHLIQVEREKMQMELSHKRARVELERAASTSARNYEREVDRNQELLTRIRQLQEREAGAEEKMQEQLERNRQCQQNLDAASKRLREKEDSLAQAGETINALKGRISELQWSVMDQEMRVKRLESEKQELQEQLDLQHKKCQEANQKIQELQASQEARADHEQQIKDLEQKLSLQEQDAAIVKNMKSELVRLPRLERELKQLREESAHLREMRETNGLLQEELEGLQRKLGRQEKMQETLVGLELENERLLAKLQSWERLDQTMGLSIRTPEDLSRFVVELQQRELALKDKNSAVTSSARGLEKARQQLQEELRQVSGQLLEERKKRETHEALARRLQKRVLLLTKERDGMRAILGSYDSELTPAEYSPQLTRRMREAEDMVQKVHSHSAEMEAQLSQALEELGGQKQRADMLEMELKMLKSQSSSAEQSFLFSREEADTLRLKVEELEGERSRLEEEKRMLEAQLERRALQGDYDQSRTKVLHMSLNPTSVARQRLREDHSQLQAECERLRGLLRAMERGGTVPADLEAAAASLPSSKEVAELKKQVESAELKNQRLKEVFQTKIQEFRKACYTLTGYQIDITTENQYRLTSLYAEHPGDCLIFKATSPSGSKMQLLETEFSHTVGELIEVHLRRQDSIPAFLSSLTLELFSRQTVA

SEQ ID NO: 811 - DNA, 2714 bp, Homo sapiens
agtgtcgcgataaatgggcgccggcggagcggagggagatccgagcggcggcggcaagctggctgcgagcggctgagcactccaagctcgccggcctttggtctccaggacttgtcccagcagcccctcgaactgagaattacaccatcggacccctggctctgaggccttcagacttggactgtgtcacactgccaggcttccagggctccaacttgcagacggcctgttgtgggacagtctctgtaatcgcgaaagcaaccatggaagacctgggggaaaacaccatggttttatccaccctgagatctttgaacaacttcatctctcagcgtgtggagggaggctctggactggatatttctacctcggccccaggttctctgcagatgcagtaccagcagagcatgcagctggaggaaagagcagagcagatccgttcgaagtcccacctcatccaggtggagcgggagaaaatgcagatggagctgagtcacaagagggctcgagtggagctggagagagcagccagcaccagtgccaggaactacgagcgtgaggtcgaccgcaaccaggagctcctgacgcgcatccggcagcttcaggagcgggaggccggggcggaggagaagatgcaggagcagctggagcgcaacaggcagtgtcagcagaacttggatgctgccagcaagaggctgcgtgagaaagaggacagtctggcccaggctggcgagaccatcaacgcactgaaggggaggatctcggaactgcagtggagcgtgatggaccaggagatgcgggtgaagcgcctggagtcggagaagcaggagctgcaggagcagctggacctgcaacacaaaaaatgccaggaagccaatcagaaaatccaggaactccaggccagccaagaagcaagagcagaccacgagcagcagattaaggatctggagcagaagctgtccctgcaagagcaggatgcagcgattgtgaagaacatgaagtctgagctggtacggctccctaggctggaacgggagctgaagcagctgcgggaggagagcgcgcacctgcgggagatgagagagaccaacgggctgctccaggaagagctggaagggctgcagaggaagctggggcgccaggagaagatgcaggagacgctggttggcttggagctggagaacgagaggctgctggccaagctgcaaagctgggagagactggaccagaccatgggcctgagcatcaggactccagaagacctttccagattcgtggttgagctgcagcagagggagcttgccttgaaggacaagaacagcgccgtcaccagcagcgcccgggggctggagaaggccaggcagcagctgcaggaggagctccggcaggtcagcggccagctgttggaggagaggaagaagcgcgagacccacgaggcgctggcccggaggctccagaaacgggtcctgctgctcaccaaggagcgggacggtatgcgggccatcctggggtcctacgacagcgagctgaccccggccgagtactcaccccagctgacgcggcgcatgcgggaggctgaggatatggtgcagaaggtgcacagccacagcgccgagatggaggctcagctgtcgcaggccctggaggagctgggaggccagaaacaaagagcagacatgctggagatggagctgaagatgctgaagtctcagtccagctctgccgaacagagcttcctgttctccagggaggaggcggacacgctcaggttgaaggtcgaggagctggaaggcgagcggagtcggctggaggaggaaaagaggatgctggaggcacagctggagcggcgagctctgcagggtgactatgaccagagcaggaccaaagtgctgcacatgagcctgaaccccaccagtgtggccaggcagcgcctgcgcgaggaccacagccagctgcaggcggagtgcgagcgactgcgcgggctcctgcgcgccatggagagaggaggcaccgtcccagccgaccttgaggctgccgccgcgagtctgccatcgtccaaggaggtggcagagctgaagaagcaggtggagagtgccgagctgaagaaccagcggctcaaggaggttttccagaccaagatccaggagttccgcaaggcctgctacacgctcaccggctaccagatcgacatcaccacggagaaccagtaccggctgacctcgctgtacgccgagcacccaggcgactgcctcatcttcaaggccaccagcccctcgggttccaagatgcagctactggagacagagttctcacacaccgtgggcgagctcatcgaggtgcacctgcggcgccaggacagcatccctgccttcctcagctcgctcaccctcgagctcttcagccgccagaccgtggcgtagcctgcaggctcgggggcatagccggagccactctgcttggcctgacctgcaggtcccctgccccgccagccacaggctgggtgcacgtcctgcctctccagccccacagggcagcagcatgactgacagacacgctgggacctacgtcgggcttcctgctggggcggccagcaccctctccacgtgcagaccccatgcgtcccggagcctggtgtgtgggcgtcggccaccagcctgggttcctcaccttgtgaaataaaatcttctcccctagacacaaaaaaaaaaaaaaaa

SEQ ID NO: 812 - protein, 718 aa, Homo sapiens; identical to SEQ ID NO: 810

SEQ ID NO: 813 - DNA, 2754 bp, Homo sapiens
agtgtcgcgataaatgggcgccggcggagcggagggagatccgagcggcggcggcaagctggctgcgagcggctgaggagctgggatacactcttcctctcctctcctcaacagcagcactccaagctcgccggcctttggtctccaggacttgtcccagcagcccctcgaactgagaattacaccatcggacccctggctctgaggccttcagacttggactgtgtcacactgccaggcttccagggctccaacttgcagacggcctgttgtgggacagtctctgtaatcgcgaaagcaaccatggaagacctgggggaaaacaccatggttttatccaccctgagatctttgaacaacttcatctctcagcgtgtggagggaggctctggactggatatttctacctcggccccaggttctctgcagatgcagtaccagcagagcatgcagctggaggaaagagcagagcagatccgttcgaagtcccacctcatccaggtggagcgggagaaaatgcagatggagctgagtcacaagagggctcgagtggagctggagagagcagccagcaccagtgccaggaactacgagcgtgaggtcgaccgcaaccaggagctcctgacgcgcatccggcagcttcaggagcgggaggccggggcggaggagaagatgcaggagcagctggagcgcaacaggcagtgtcagcagaacttggatgctgccagcaagaggctgcgtgagaaagaggacagtctggcccaggctggcgagaccatcaacgcactgaaggggaggatctcggaactgcagtggagcgtgatggaccaggagatgcgggtgaagcgcctggagtcggagaagcaggagctgcaggagcagctggacctgcaacacaaaaaatgccaggaagccaatcagaaaatccaggaactccaggccagccaagaagcaagagcagaccacgagcagcagattaaggatctggagcagaagctgtccctgcaagagcaggatgcagcgattgtgaagaacatgaagtctgagctggtacggctccctaggctggaacgggagctgaagcagctgcgggaggagagcgcgcacctgcgggagatgagagagaccaacgggctgctccaggaagagctggaagggctgcagaggaagctggggcgccaggagaagatgcaggagacgctggttggcttggagctggagaacgagaggctgctggccaagctgcaaagctgggagagactggaccagaccatgggcctgagcatcaggactccagaagacctttccagattcgtggttgagctgcagcagagggagcttgccttgaaggacaagaacagcgccgtcaccagcagcgcccgggggctggagaaggccaggcagcagctgcaggaggagctccggcaggtcagcggccagctgttggaggagaggaagaagcgcgagacccacgaggcgctggcccggaggctccagaaacgggtcctgctgctcaccaaggagcgggacggtatgcgggccatcctggggtcctacgacagcgagctgaccccggccgagtactcaccccagctgacgcggcgcatgcgggaggctgaggatatggtgcagaaggtgcacagccacagcgccgagatggaggctcagctgtcgcaggccctggaggagctgggaggccagaaacaaagagcagacatgctggagatggagctgaagatgctgaagtctcagtccagctctgccgaacagagcttcctgttctccagggaggaggcggacacgctcaggttgaaggtcgaggagctggaaggcgagcggagtcggctggaggaggaaaagaggatgctggaggcacagctggagcggcgagctctgcagggtgactatgaccagagcaggaccaaagtgctgcacatgagcctgaaccccaccagtgtggccaggcagcgcctgcgcgaggaccacagccagctgcaggcggagtgcgagcgactgcgcgggctcctgcgcgccatggagagaggaggcaccgtcccagccgaccttgaggctgccgccgcgagtctgccatcgtccaaggaggtggcagagctgaagaagcaggtggagagtgccgagctgaagaaccagcggctcaaggaggttttccagaccaagatccaggagttccgcaaggcctgctacacgctcaccggctaccagatcgacatcaccacggagaaccagtaccggctgacctcgctgtacgccgagcacccaggcgactgcctcatcttcaaggccaccagcccctcgggttccaagatgcagctactggagacagagttctcacacaccgtgggcgagctcatcgaggtgcacctgcggcgccaggacagcatccctgccttcctcagctcgctcaccctcgagctcttcagccgccagaccgtggcgtagcctgcaggctcgggggcatagccggagccactctgcttggcctgacctgcaggtcccctgccccgccagccacaggctgggtgcacgtcctgcctctccagccccacagggcagcagcatgactgacagacacgctgggacctacgtcgggcttcctgctggggcggccagcaccctctccacgtgcagaccccatgcgtcccggagcctggtgtgtgggcgtcggccaccagcctgggttcctcaccttgtgaaataaaatcttctcccctagacacaaaaaaaaaaaaaaaa

SEQ ID NO: 814 - protein, 718 aa, Homo sapiens; identical to SEQ ID NO: 810

SEQ ID NO: 815 - DNA, 10397 bp, Homo sapiens
cctcagcgctgggcggccgctcacctcgggccggggggcgccgcgcctcccgcggagtggccgcgcccgctcggagccgtcccgcctgtcctgcccgcccgtccgtccggcgcggcgctcggggtggcggctgctcggcatggcccggggcgcccggccctcggcggccggtggcggcggcggcggcgcggagccccctgagcgcgcgggccccgggcggccgcggggatccccgcccggccgcgcccgcccctcgctggcgccgcgccccggcccggagccctcgcgaccccgggcggcgcccgagacctccggcggggacacggcgggcgcggggcggtgcggcgggcggcgggcggcaaagttggggccgggccgccgcggctggtgggcgctgctggcgctgcagctgcacttgctccgggcgctggcgcaagatgatgttgctccatattttaaaacggagccaggcctaccacagatccacctggaagggaaccgccttgttctcacctgccttgccgaagggagctggcctttggagttcaagtggatgcgcgatgacagtgagctcaccacctacagcagcgaatataagtacattattccatctttgcagaagctcgatgctgggttttaccgctgcgtggtgcgaaacagaatgggagcactcctgcaaagaaaatcagaagttcaagtcgcatatatgggaagtttcatggatacggaccagaggaaaacagtttctcaaggacgtgcagcgattctaaacctgctgcccatcaccagctaccccagacctcaagtgacttggtttagagaagggcacaagattattccaagcaacagaatagccatcacattggagaatcagctggtgatcctcgccaccacaaccagtgatgccggggcatactacgtgcaggccgtgaatgagaaaaatggagaaaacaagacaagcccattcattcatttgagcatagcaagagatgttggcacacctgaaaccatggccccaaccattgtggttcccccgggcaacagaagtgtggtggctggatccagtgagaccaccttggaatgtatagccagtgccaggcctgtggaggacctgagtgtgacctggaagaggaatggagtgagaatcaccagtggcctccacagctttggaagacgcctcaccatcagcaacccgacgtccgcggacaccgggccatacgtctgcgaggcggcgctgccggggagcgcttttgaaccggccagggcgacggcctttcttttcatcatagagccaccatattttactgctgagcccgagagtcggatttcagctgaagtagaagaaactgtggacatcggatgtcaagccatgggggtcccccttcccaccctccagtggtacaaggatgccatctccatcagcaggctccagaatcctcgatacaaagtgctcgccagcggaggcctgcgcatccagaagctgcgtccagaggactccggaatcttccagtgcttcgccagcaatgaaggaggggagatccagacccacacctacctggatgtaaccaatatcgctccagtgttcacccagcggccagtggacaccacagttactgacgggatgacagccattctaaggtgtgaggtgtccggggctcccaaacccgccatcacctggaaaagagaaaaccacattctggccagtggctctgtccggattcctaggttcatgcttcttgaatcggggggtctacagatcgcgcccgtcttcatccaggatgccggcaactacacctgctatgcggccaacacagagggctccctgaatgcatcggccacgctcactgtgtggaatcggacgtccatcgtccaccctcctgaggaccacgtggtgattaaggggaccacggccacgctgcactgtggtgccacacatgacccccgggtttcactccgctacgtttggaagaaggacaacgtggccctgactccatcgagcacgtctaggatcgtggtggagaaggacgggtcccttctcatcagccagacgtggtcaggcgacatcggtgactacagctgcgagattgtttctgaaggagggaatgactccaggatggcccggctggaagtgattgaactgcctcattcacctcagaacctcctggtcagccctaattcttcccacagccacgccgtggtgctctcttgggtccggccctttgatggaaacagtcctattctttattacatcgtggagctctctgaaaacaactctccatggaaggtgcatctgtcaaacgttggccctgagatgacaggcgtcaccgtgagtggcctgactccggctcgtacctatcaattccgggtgtgcgcggtgaatgaagtgggcaggggccagtacagcgccgagacaagcaggttgatgctacctgaagaaccacccagtgctcccccgaaaaatatagtggccagtgggcggactaatcagtccattatggtccagtggcagccacccccagaaacagagcacaacggggtgttgcgtggatacatcctcaggtaccgcctggctggccttcccggagagtaccagcagcggaacatcaccagcccggaggtgaactactgcctggtgacagacctgatcatctggacacagtatgagatacaggtggcggcgtacaacggggccggtctgggcgtcttcagcagggcagtgaccgagtacaccttgcagggagtgcccaccgcgcccccgcagaacgtgcagacggaagccgtgaactccaccaccattcagttcctgtggaaccctccgcctcagcagtttatcaatggcatcaaccagggatacaagcttctggcatggccggcagatgcccccgaggctgtcactgtggtcactattgccccagatttccacggagtccaccatggacacataacgaacctgaagaagtttaccgcctacttcacttccgttctgtgcttcaccacccctggggacgggcctcccagcacacctcagctggtctggactcaggaagacaaaccaggagctgtgggacatctgagtttcacagagatcttggacacatctctcaaggtcagctggcaggagcccctggagaaaaatggcatcattactggctatcagatctcttgggaagtgtacggcaggaacgactctcgtctcacgcacaccctgaacagcacgacgcacgagtacaagatccaaggcctctcatctctcaccacctacaccatcgacgtggccgctgtgactgccgtgggcactggcctggtgacttcatccaccatttcttctggagtgcccccagaccttcctggtgccccatccaacctggtcatttccaacatcagccctcgctccgccacccttcagttccggccaggctatgacgggaaaacgtccatctccaggtggattgttgaggggcaggtgggagctatcggcgacgaggaggagtgggtcaccctctatgaagaggagaatgagcctgatgcccagatgctggagatcccaaacctcacaccctacactcactacagatttcgaatgaagcaagtgaacattgttgggccgagcccctacagtccgtcttcccgggtcatccagaccctgcaggccccacccgacgtggctccaaccagcgtcacggtccgtactgccagtgagaccagcctgcggcttcgctgggtgcccctgccggattctcagtacaacgggaaccccgagtccgtgggctacaggattaagtactggcgctcagacctccagtcctcagcagtggcccaagtcgtcagtgaccggctggagagagaattcaccatcgaggagctggaggagtggatggaatacgagctgcagatgcaggccttcaacgccgtcggggctgggccgtggagcgaggtggtgcggggccggacgcgggagtcagttccttcagccgcccctgagaacgtgtcagccgaggctgtcagctcgacccagattttactgacatggacatccgtgccggaacaggaccagaatgggctcatactgggctacaagatcctgttccgggccaaagacctggatcccgagcccaggagccacatcgtgcgagggaaccacacgcagtcggccctgctggcaggcctgcgcaagttcgtgctctacgagctccaggtgctggcgttcacccgcatcgggaacggggtccccagcacgcccctcatcctggagcgcaccaaagacgatgccccaggcccaccagtgaggctcgtgttccccgaagtgagactcacctccgtgcggatagtgtggcaacctccggaggagcccaacggcatcatcctggggtaccagattgcctaccgcctggccagcagcagcccccacaccttcaccaccgtggaggtcggcgccacagtgaggcagttcacagccaccgacctggccccggagtccgcatacatcttcaggctgtccgccaagacgaggcagggctggggggagccactggaggccaccgtcatcaccaccgagaagagagagcggccggcaccccccagagagctcctggtgccccaggcagaagtgaccgcacgcagcctccggctccagtgggtcccgggcagcgacggggcctcccccatccggtacttcaccatgcaggtgcgagagctgcctcggggtgagtggcagacctactcctcgtccatcagccatgaggcgacagcatgcgtcgttgacagactgaggcccttcacctcctacaagctgcgcctgaaagccaccaacgacattggggacagtgacttcagttcagagacagaggcggtgaccacgctgcaggatgttccaggagagcccccgggatctgtctcagcgacgccacacaccacgtcctctgtcctgatacagtggcagcctccgagggacgaaagcctgaatggccttcttcagggatacaggatctactacagggagctggagtatgaagccgggtcaggcactgaggccaagacgctcaaaaaccctatagctttacatgctgagctcacagcccaaagcagcttcaagacggtgaacagcagctccacatcgacgatgtgtgaactaacacatttaaagaagtaccggcgctatgaagtaataatgaccgcctataacatcatcggcgagagcccagccagcgcgcccgtggaggtctttgtcggcgaggctgccccggccatggccccgcagaacgtgcaggtgaccccactcacggccagccagctggaggtcacgtgggacccaccacccccggagagccagaatgggaacatccaaggctacaagatttactactgggaggcagacagccagaacgaaacggagaaaatgaaggtcctcttcctccccgagcccgtggtgaggctgaagaacctgaccagccataccaagtacctggtcagcatatcagccttcaacgccgccggagatggacctaagagtgacccccagcaggggcgcacccaccaggccgcccctggggcccccagctttctggcgttctcagaaataacctccaccacgctcaacgtgtcctggggcgagcctgcggcggccaacggcatcctgcagggctatcgggtggtgtacgagcccttggcccctgtacaaggggtgagcaaggtggtgaccgtggaagtgagagggaactggcagcgctggctgaaggtgcgggacctcaccaagggagtgacctatttcttccgtgtccaagcgcggaccatcacctacgggcccgagctccaagccaatatcacagccgggccagccgagggatccccgggctcgcctagagatgtcctggtcaccaagtccgcctctgaactgacgctgcagtggactgagggacactctggcgacacacctaccacgggctatgtgatcgaggcccggccctcagatgaaggcttatgggacatgtttgtgaaggacatcccgcggagcgccacatcctacaccctcagcctggataagctccggcaaggagtgacttacgagttccgggtggtggctgtgaatgaggcgggctacggggagcccagcaacccctccacggctgtgtcagctcaagtggaagccccattctacgaggagtggtggttcctcctggtgatggctctgtccagcctgatcgtcatcctgctggtggtgttcgccctcgtcctgcacgggcagaataagaagtataagaactgcagcacaggaaaggggatctccaccatggaggagtctgtgaccctggacaacggaggatttgctgccctggagctcagcagccgccacctcaatgtcaagagcaccttctccaagaagaacgggaccaggtccccaccccggcctagccccggcggcctgcactactcagacgaggacatctgcaacaagtacaacggcgccgtgctgaccgagagcgtgagcctcaaggagaagtcggcagatgcatcagaatctgaggccacggactctgactacgaggacgcgctgcccaagcactccttcgtgaaccactacatgagcgaccccacctactacaactcatggaagcgcagggcccagggccgcgcacctgcgccgcacaggtacgaggcggtggcgggctccgaggcgggcgcgcagctgcacccggtcatcaccacgcagagcgcgggcggcgtctacacccccgctggccccggcgcgcgaactccgctcaccggcttctcctccttcgtgtgagcaaagcgccgcgcctccctcagggcggaacggaggcaactttccggagtctatttttgttaagacaatcaactccaataactgagctgaagtttttgtttaaaaagaaaaaaatctgataagtgatgattttacctacttgtggacactagatttcaattaggaaggtttttttaaacggctttttgtaacttcgctgcaggaagcaggtttgtttctttttcttttctttttaagagaaggtgtatttcactggtgcaatggcttggcacctccggggcctgggaggacctcagacctccccagccctgggtttctccgtcttcaagaccaactaggaagggtcaagcggggagagggagtggagggtcaggtgagatctcagagctgccccggccggcccccgtctctttctacctcctcttccagagaaccagcggctcacacccttctcaacgcaggacatcctcggcggctcctggggtttgaagagcaaacgtttttccctgggctcagtgcgttttgtcccaacttcatctgtttctgaaatgttctcacttggcagtgtctagtcaaggagtcggctttcaggttcctgacggccaggcagggatgctaaggtgtggctcagccgtcactgtctgtgtcactgcagtggtgcggtcctcaggcttttctgcctgtctttcccccttccttctcacctgacagcgagggagagggaagcctcttagggctggaagccaccacgctggccctctccttccccgaacacagcacacggtcaactccgcgggacacgaggacacgggacggcgtctccagaattgcttgttacgtaggaagcgtgcattgttaaccagagtatttttaaaatctttttatctttttttaaactatgtcacatgaaatgaatgcgtctttgctgtctccaggtgcctttttattaattgttcagctttgtacatgggaaagatgaaaagcaacagtgtctgcaaataaagcaaaacagctctgagaacacacgctcccgactcgcctcgtgcacaccaggccgtcccctccctctgtcctggcttctgctggctgctcgcagcagccaccgcttctccaccactggcgctgctgctgccccctctcccagtccgaggccagcttttagccttaacaggttttttggaaatgtttcttttttttatttaaaattgtcattgtttggtttaaatttttcagctagatgaaaagagtatgaactactttggaaaacttaacagctcagagatggccatgcctccagcccctcacgtcatctttgcaacagacgactgggctgccatggtccacccctcagcccgggtcccgggtctggatggaacgggagcactgctggtgcccactggcgtgtgtgccccgggtccctgtaagtgccccctcaccagcagcagcgtgacacacacaagactcaagaccaccctgtcagtgccccccagtgcacggcaaacgggcaggtgccgttcccccagtgacctgagggtaggggacaactgagcagtatctgaccagtgccacccaggagccagtctcctggccacatgcagaaagtgtggcccctgcttacctagatgttttgtgcacctccatgggcagagggtgtggatattgcctggattctgtgctgtcagcgttgctgagtatggccccaggagaccaaggagagttttgtataggctggaaaaccccttttcagtctttccaaaattagagggtatggcaagtttccttttttctctcctcccttccttcccctccttcctttcctttacccctcctttccttccttcctcccttcctctcttctttcctccctccctccctccttccctcccttccttcctctctttcctccttccttccctcccttctttccctccctcccttcctctctcccctattccttcttccttttctcctcctttttctgagtggagggggaaatattctaaaccaaaaatcctagatgctctgcccaaagccacttctgcatgagaatcgcaacccacagttccccggatgagactcaccacagtggacagtgccacctccttcccctcggccccggagagggcgaagtgggcgggaagccaggatgtgagcactggaatttcttggaagagaagcgataaatggagaccatggccagcgctgctttctgtgcactctgatgactgctctctgcagccatgaggatgtggctttacatgccagggagagtgttgagacgtcttaggttgaggatgagcagattcgagatatgtttgttgctctcgggttttcgatacaacatcatgacacttctgtttcaagctcatgttttccgtctcccctccactcttagtaaaccttgatctgtacggagcggcctgtccgaggctacgccggcctcctggctgctgctggactgtgcttaggacagcgcccatgcctcggagggactctgtcccatgagaaccacctgtgcaaaggaacagagctggatgtttccaggtagattttggcctcccagagcaatgcggcatttgagaagcaacagttcctaactccttatcttcagggaaggaaaagaaaatcacagcctaggaagatggaggttggattttaatctcggttttaaaaagaggacaaacaaaatgtctctaagccaggctagatggaatgtgctcccgctctctcctgccgtgctgaaagtcatgccttgcggatgcctcatgacagcagtggctgagtctccccacccacccccaacgtggctcatttcagattgcttcggccccaccctgcaaggatgtggtcacggagtggccaggaggctccgtctgagccacagggatgggtgtgcagagctccctcctcctggggtgccagggcagagattccaggcaggtgagcccagagagagctgccaggccacaccccctcggcctcctgcacggccaccttctgggtgaatcggtccagcccaagcccctctccccagcctcgccttcagcctctctcccagcctgcttttataaggcgcacttcactcaatgctgtagccaaaaaacgaggggccccagggagaggggacccagatggccacacacggaacgcgcctccacagccccgggaggtggctcactctgtacaggtcttcggaggccgtgtttgtatctaactgtgactgggctgaagcatgatgtttgcctaatggttcgtagcatggtttttatttcttacgcattcttggcacacagtgtagctatcctcctgacgagcaacccgtctgcgtacctaagtgtggctccccgtgggtcagcgtcctggtagcatggatccagtctgaaaggtgaggacaacgtggaaactcatgagctgagcctgcccgctgggacacgtctccttcccgcgtcaccttctggtttagggagccgtcaggtccctaaacgttccctacaactttttctgaaattgtgcagaaaaacagatctcattaaaagaaaaaaagaaacaacttgtaggaagacagagaggtgctatgggtacaatttttaataaaaacattattttgttccttaaa

SEQ ID NO: 816 - protein, 2213 aa, Homo sapiens
MARGARPSAAGGGGGGAEPPERAGPGRPRGSPPGRARPSLAPRPGPEPSRPRAAPETSGGDTAGAGRCGGRRAAKLGPGRRGWWALLALQLHLLRALAQDDVAPYFKTEPGLPQIHLEGNRLVLTCLAEGSWPLEFKWMRDDSELTTYSSEYKYIIPSLQKLDAGFYRCVVRNRMGALLQRKSEVQVAYMGSFMDTDQRKTVSQGRAAILNLLPITSYPRPQVTWFREGHKIIPSNRIAITLENQLVILATTTSDAGAYYVQAVNEKNGENKTSPFIHLSIARDVGTPETMAPTIVVPPGNRSVVAGSSETTLECIASARPVEDLSVTWKRNGVRITSGLHSFGRRLTISNPTSADTGPYVCEAALPGSAFEPARATAFLFIIEPPYFTAEPESRISAEVEETVDIGCQAMGVPLPTLQWYKDAISISRLQNPRYKVLASGGLRIQKLRPEDSGIFQCFASNEGGEIQTHTYLDVTNIAPVFTQRPVDTTVTDGMTAILRCEVSGAPKPAITWKRENHILASGSVRIPRFMLLESGGLQIAPVFIQDAGNYTCYAANTEGSLNASATLTVWNRTSIVHPPEDHVVIKGTTATLHCGATHDPRVSLRYVWKKDNVALTPSSTSRIVVEKDGSLLISQTWSGDIGDYSCEIVSEGGNDSRMARLEVIELPHSPQNLLVSPNSSHSHAVVLSWVRPFDGNSPILYYIVELSENNSPWKVHLSNVGPEMTGVTVSGLTPARTYQFRVCAVNEVGRGQYSAETSRLMLPEEPPSAPPKNIVASGRTNQSIMVQWQPPPETEHNGVLRGYILRYRLAGLPGEYQQRNITSPEVNYCLVTDLIIWTQYEIQVAAYNGAGLGVFSRAVTEYTLQGVPTAPPQNVQTEAVNSTTIQFLWNPPPQQFINGINQGYKLLAWPADAPEAVTVVTIAPDFHGVHHGHITNLKKFTAYFTSVLCFTTPGDGPPSTPQLVWTQEDKPGAVGHLSFTEILDTSLKVSWQEPLEKNGIITGYQISWEVYGRNDSRLTHTLNSTTHEYKIQGLSSLTTYTIDVAAVTAVGTGLVTSSTISSGVPPDLPGAPSNLVISNISPRSATLQFRPGYDGKTSISRWIVEGQVGAIGDEEEWVTLYEEENEPDAQMLEIPNLTPYTHYRFRMKQVNIVGPSPYSPSSRVIQTLQAPPDVAPTSVTVRTASETSLRLRWVPLPDSQYNGNPESVGYRIKYWRSDLQSSAVAQVVSDRLEREFTIEELEEWMEYELQMQAFNAVGAGPWSEVVRGRTRESVPSAAPENVSAEAVSSTQILLTWTSVPEQDQNGLILGYKILFRAKDLDPEPRSHIVRGNHTQSALLAGLRKFVLYELQVLAFTRIGNGVPSTPLILERTKDDAPGPPVRLVFPEVRLTSVRIVWQPPEEPNGIILGYQIAYRLASSSPHTFTTVEVGATVRQFTATDLAPESAYIFRLSAKTRQGWGEPLEATVITTEKRERPAPPRELLVPQAEVTARSLRLQWVPGSDGASPIRYFTMQVRELPRGEWQTYSSSISHEATACVVDRLRPFTSYKLRLKATNDIGDSDFSSETEAVTTLQDVPGEPPGSVSATPHTTSSVLIQWQPPRDESLNGLLQGYRIYYRELEYEAGSGTEAKTLKNPIALHAELTAQSSFKTVNSSSTSTMCELTHLKKYRRYEVIMTAYNIIGESPASAPVEVFVGEAAPAMAPQNVQVTPLTASQLEVTWDPPPPESQNGNIQGYKIYYWEADSQNETEKMKVLFLPEPVVRLKNLTSHTKYLVSISAFNAAGDGPKSDPQQGRTHQAAPGAPSFLAFSEITSTTLNVSWGEPAAANGILQGYRVVYEPLAPVQGVSKVVTVEVRGNWQRWLKVRDLTKGVTYFFRVQARTITYGPELQANITAGPAEGSPGSPRDVLVTKSASELTLQWTEGHSGDTPTTGYVIEARPSDEGLWDMFVKDIPRSATSYTLSLDKLRQGVTYEFRVVAVNEAGYGEPSNPSTAVSAQVEAPFYEEWWFLLVMALSSLIVILLVVFALVLHGQNKKYKNCSTGKGISTMEESVTLDNGGFAALELSSRHLNVKSTFSKKNGTRSPPRPSPGGLHYSDEDICNKYNGAVLTESVSLKEKSADASESEATDSDYEDALPKHSFVNHYMSDPTYYNSWKRRAQGRAPAPHRYEAVAGSEAGAQLHPVITTQSAGGVYTPAGPGARTPLTGFSSFV

SEQ ID NO: 817 - DNA, 461 bp, Homo sapiens
atgaagttcaatccctttgtgacttccgaccgaagcaagaaccgcaaaaggcatttcaaagcaccttcccacattcgcaggaagattatgtcttccccactttctgaagagctgagacagaagtacaacgtgcgatccatggcatccgaaagaatgatgaagttaggcttgtaccaggacactacaaaggtcagcaaattggcaaagcagtcctggtttacaggaaaaaatatgtcacctacattgaatgggtacagcgggaaaaagctaatggctcagctgtccatggaggcattcaccccagcaaggtggttatcactaggctaaaactggacaaagaccgcaaaaagattcttgaatggaaagccaaatctcaccaagtaggaaaggaaacgggcaaatacaaggaagaaacaattaagaagatgcagggacaaagtaatcttatatacaagctttga

SEQ ID NO: 818 - DNA, 3926 bp, Homo sapiens
atgacaaaccaggaaaaatgggcccacctcagcccttcggaattttcccaacttcagaaatatgctgagtattctacaaagaaattaaaggatgttcttgaagaattccatggtaatggtgtgcttgcaaagtataatcctgaagggaaacaagacattcttaaccaaacaatagattttgaaggtttcaaactattcatgaagacattcctggaagccgagcttcctgatgatttcactgcacaccttttcatgtcatttagcaacaagtttcctcattctagtccaatggtaaaaagtaagcctgctctcctatcaggcggtctgagaatgaataaaggtgccatcacccctccccgaactacttctcctgcaaatacgtgttccccagaagtaatccatctgaaggacattgtctgttacctgtctctgcttgaaagaggaagacctgaggataagcttgagtttatgtttcgcctttatgacacggatgggaatggcttcctggacagctcggagctagaaaatatcatcagtcagatgatgcatgttgcagaataccttgagtgggatgtcactgaacttaatccaatcctccatgaaatgatggaagaaattgactatgatcatgatggaaccgtgtctctggaggaatggattcaaggaggaatgacaacgattccacttcttgtgctcctgggcttagaaaataacgtgaaggatgatggacagcacgtgtggcgactgaagcactttaacaaacctgcctattgcaacctttgcctgaacatgctgattggcgtggggaagcagggcctctgctgttccttctgcaagtacacagtccatgagcgctgtgtggctcgagcacctccctcttgcatcaagacctatgtgaagtccaaaaggaacactgatgtcatgcaccattactgggttgaaggtaactgcccaaccaagtgtgataagtgccacaaaactgttaaatgttaccagggcctgacaggactgcattgtgtttggtgtcagatcacactgcataataaatgtgcttctcatctaaaacctgaatgtgactgtggacctttgaaggaccatattttaccacccacaacaatctgtccagtggtactgcagactctgcccacttcaggagtttcagttcctgaggaaagacaatcaacagtgaaaaaggaaaagagtggttcccagcagccaaacaaagtgattgacaagaataaaatgcaaagagccaactctgttactgtagatggacaaggcctgcaggtcactcctgtgcctggtactcacccacttttagtttttgtgaaccccaaaagtggtggaaaacaaggagaacgaatttacagaaaattccagtatctattaaatcctcgtcaggtttacagtctttctggaaatggaccaatgccagggttaaactttttccgtgatgttcctgacttcagagtgttagcctgtggtggagatggaaccgtgggctgggttttggattgcatagaaaaggccaatgtaggcaagcatcctccagttgcgattctgcctcttgggactggcaatgatctagcaagatgcctgcgatggggaggaggttacgaaggtgagaatctgatgaaaattctaaaagacattgaaaacagcacagaaatcatgttggacaggtggaagtttgaagtcatacctaatgacaaagatgagaaaggagacccagtgccttacagtatcatcaataattacttttccattggcgtggatgcctccattgcacacagattccacatcatgagagaaaaacacccagagaaattcaacagtagaatgaagaacaaattttggtattttgagtttggcacatctgaaactttctcagccacctgcaagaagctacatgaatctgtagaaatagaatgtgatggagtacagatagatttaataaacatctctctggaaggaattgctattttgaatataccaagcatgcatggaggatccaatctttggggagagtctaagaaaagacgaagccatcgacgaatagagaaaaaagggtctgacaaaaggaccaccgtcacagatgccaaagagttgaagtttgcaagtcaagatctcagtgaccagctgctggaggtggtcggcttggaaggagccatggagatggggcaaatatacacaggcctgaaaagtgctggccggcggctggctcagtgctcctgcgtggtcatcaggacgagcaagtctctgccaatgcaaattgatggggagccatggatgcagaccccatgcacaataaaaattacacacaagaaccaagccccaatgctgatgggcccgcctccaaaaaccggtttattctgctccctcgtcaaaaggacaagaaaccgaagcaaggaataatcctgtgttgtttcactcttagaaattgaattagcataattgggccatggaacacatatgctggaaatctttgaaccatttcaagtctcctgctcatgcaaaatcatggaagtggtttaacagtttttgttactaagctaatgtaaaattcagctattagaaaatttattgtctcagtttttataggcatctttgcatgaagaaagcagaagtttacctgaagtgatactgcatatttttggtgcatgcattcccatagatttttacatctcccacccaactcttccccaatttccttttactaacctgtgagaaaaacccgtgaaacatgaaaaaggaaataccatgggaaacgtgattctcagtgtgattccaattattacgaagcactaatcagtaacgctacaatgatcataattgcagattgctatacgtttcccttttagaatcagtgtatcagtgacctatgacttgaggagaaacttttaattcgaagattttattaaatagttgactacaataccttgctatatatacatagtttttcttcaacatcttaactcttctgagtggaaataaaaatatcaggcataaggttttctcatgctgaaaaatagaacgcggtttttattttgcttagttttctttttaattccagaaataagtgaaaacatgttacttgacagtcaagtgtggtaatatggcaagccttgttcctttctgcatgagaatctaggagagaattcataaccacaccaataacgaaatagaagttttaaactatgtgcctaatcaatgtgtttcccaccaaagattcagaaaacaatgcttgagagaaatgggttaatgcataattaattaagcattgtggagcaaatttagggttcctgtgattaattttgtgatgactaaaatgctggaaagcaagtgagttgcccattaattatgattaaaattctcacctttcacagacagacaataagccagacaacacaatcaaagctcaatagatgatttcttgcttttttcagtcatttataaatataggtgtaatttttcatggatcagttaagtacacttgaaggaagtaaatgattgtatcagtttatttctagtataaatgggtacctgtaataatactgagctcttggaagcgaatcatgcatgcaattagctccctcctcctcacctactccactcccatctttatgacatttcaaatgtttatttggaaacaacagcctagatcactgttgaaggtgttcatggcatagttggagtctctgactgtttaaagaaatcacagaacagtacttttcttttagtgtttcattaagcctatgatgtaaaatgaaatgcttctgagcagtcttgtaatattgttcattcatattgacctgcatctcatcattgcatgttttatgttttcaaacatgccataaggaaaacgagtgcctgaactgcatgatttattagtttctctccactctgcattaaagtgctaatgattt

SEQ ID NO: 819 - protein, 804 aa, Homo sapiens [sequence omitted]

SEQ ID NO: 820 - DNA, 3172 bp, Homo sapiens
atgacaaaccaggaaaaatgggcccacctcagcccttcggaattttcccaacttcagaaatatgctgagtattctacaaagaaattaaaggatgttcttgaagaattccatggtaatggtgtgcttgcaaagtataatcctgaagggaaacaagacattcttaaccaaacaatagattttgaaggtttcaaactattcatgaagacattcctggaagccgagcttcctgatgatttcactgcacaccttttcatgtcatttagcaacaagtttcctcattctagtccaatggtaaaaagtaagcctgctctcctatcaggcggtctgagaatgaataaaggtgccatcacccctccccgaactacttctcctgcaaatacgtgttccccagaagtaatccatctgaaggacattgtctgttacctgtctctgcttgaaagaggaagacctgaggataagcttgagtttatgtttcgcctttatgacacggatgggaatggcttcctggacagctcggagctagaaaatatcatcagtcagatgatgcatgttgcagaataccttgagtgggatgtcactgaacttaatccaatcctccatgaaatgatggaagaaattgactatgatcatgatggaaccgtgtctctggaggaatggattcaaggaggaatgacaacgattccacttcttgtgctcctgggcttagaaaataacgtgaaggatgatggacagcacgtgtggcgactgaagcactttaacaaacctgcctattgcaacctttgcctgaacatgctgattggcgtggggaagcagggcctctgctgttccttctgcaagtacacagtccatgagcgctgtgtggctcgagcacctccctcttgcatcaagacctatgtgaagtccaaaaggaacactgatgtcatgcaccattactgggttgaaggtaactgcccaaccaagtgtgataagtgccacaaaactgttaaatgttaccagggcctgacaggactgcattgtgtttggtgtcagatcacactgcataataaatgtgcttctcatctaaaacctgaatgtgactgtggacctttgaaggaccatattttaccacccacaacaatctgtccagtggtactgcagactctgcccacttcaggagtttcagttcctgaggaaagacaatcaacagtgaaaaaggaaaagagtggttcccagcagccaaacaaagtgattgacaagaataaaatgcaaagagccaactctgttactgtagatggacaaggcctgcaggtcactcctgtgcctggtactcacccacttttagtttttgtgaaccccaaaagtggtggaaaacaaggagaacgaatttacagaaaattccagtatctattaaatcctcgtcaggtttacagtctttctggaaatggaccaatgccagggttaaactttttccgtgatgttcctgacttcagagtgttagcctgtggtggagatggaaccgtgggctgggttttggattgcatagaaaaggccaatgtaggcaagcatcctccagttgcgattctgcctcttgggactggcaatgatctagcaagatgcctgcgatggggaggaggttacgaaggtgagaatctgatgaaaattctaaaagacattgaaaacagcacagaaatcatgttggacaggtggaagtttgaagtcatacctaatgacaaagatgagaaaggagacccagtgccttacagtatcatcaataattacttttccattggcgtggatgcctccattgcacacagattccacatcatgagagaaaaacacccagagaaattcaacagtagaatgaagaacaaattttggtattttgagtttggcacatctgaaactttctcagccacctgcaagaagctacatgaatctgtagaaatagaatgtgatggagtacagatagatttaataaacatctctctggaaggaattgctattttgaatataccaagcatgcatggaggatccaatctttggggagagtctaagaaaagacgaagccatcgacgaatagagaaaaaagggtctgacaaaaggaccaccgtcacagatgccaaagagttgaagtttgcaagtcaagatctcagtgaccagctgctggaggtggtcggcttggaaggagccatggagatggggcaaatatacacaggcctgaaaagtgctggccggcggctggctcagtgctcctgcgtggtcatcaggacgagcaagtctctgccaatgcaaattgatggggagccatggatgcagaccccatgcacagtgagtacagagtagttgatatgctatgtcaatctcagttttgctttcctctttgactaaataaccacaataactgatttttttctttatttcttttcaacctatcagcaaatagtctttttgttgttgttgttatgtgtgtgtcagagccactacatttaggctgtagacattatatacccttggcaatgatttagctcttgaatgtttgtgctagcctaagtataaatagatcttttaaatagatcaattataaaccatagatcaattataaactatggagctaaacaaaatattaataaaagtttatctgaaacttttttgtttatttcagagcacattattagaatattatttgcgagaaatgcagacctaagcttatatgtgaacttatttctcagcttttctatgcctccatttggggatttgagggctttcttctccataagaaaaaaatttctctccagtttctaccataattaattgtgttttccagaatgaggtattatttaaggcagacactgcccctctcaaaaaaaatcagttttcatttgcatagtgaatattttattgcatttcaaaaacatgctaggaactgcttttggcactgggagtagacacatgaacaagaccaacagtgtaatttccttcaagttacttacattcctataatagaggaccgaataaataaacaactacatgataaatataacttcagactgtgagagttattaaaaaataaggtgaaatgatgataagaagctggattaggtgtggagaataaatactacttgagataagggagacctctttgaaaggacatagccaaaagcttagtataaaattaaaaaaaataaaaaaaaaa

SEQ ID NO: 821 - protein, 773 aa, Homo sapiens
MTNQEKWAHLSPSEFSQLQKYAEYSTKKLKDVLEEFHGNGVLAKYNPEGKQDILNQTIDFEGFKLFMKTFLEAELPDDFTAHLFMSFSNKFPHSSPMVKSKPALLSGGLRMNKGAITPPRTTSPANTCSPEVIHLKDIVCYLSLLERGRPEDKLEFMFRLYDTDGNGFLDSSELENIISQMMHVAEYLEWDVTELNPILHEMMEEIDYDHDGTVSLEEWIQGGMTTIPLLVLLGLENNVKDDGQHVWRLKHFNKPAYCNLCLNMLIGVGKQGLCCSFCKYTVHERCVARAPPSCIKTYVKSKRNTDVMHHYWVEGNCPTKCDKCHKTVKCYQGLTGLHCVWCQITLHNKCASHLKPECDCGPLKDHILPPTTICPVVLQTLPTSGVSVPEERQSTVKKEKSGSQQPNKVIDKNKMQRANSVTVDGQGLQVTPVPGTHPLLVFVNPKSGGKQGERIYRKFQYLLNPRQVYSLSGNGPMPGLNFFRDVPDFRVLACGGDGTVGWVLDCIEKANVGKHPPVAILPLGTGNDLARCLRWGGGYEGENLMKILKDIENSTEIMLDRWKFEVIPNDKDEKGDPVPYSIINNYFSIGVDASIAHRFHIMREKHPEKFNSRMKNKFWYFEFGTSETFSATCKKLHESVEIECDGVQIDLINISLEGIAILNIPSMHGGSNLWGESKKRRSHRRIEKKGSDKRTTVTDAKELKFASQDLSDQLLEVVGLEGAMEMGQIYTGLKSAGRRLAQCSCVVIRTSKSLPMQIDGEPWMQTPCTVSTE

SEQ ID NO: 822 - DNA, 2475 bp, Homo sapiens
ctctctacacagaatcggctgttgagtgtgctctcagtggagctttggttttagctgttctctgacaaagagcttgttctgagctgcacatctcgtcctctttgttcagcctcaggcttcaagcattgaatcctaaatattctccagctgggaatcagacaagggcagaaatgaagaacccagaagcccagcaggatgtttcagtttcccagggatttcgcatgttgttttacacgatgaaacccagtgaaacttcattccaaacattagaagaggtgcctgattatgtaaaaaaggcaactccatttttcatttctttgatgctgcttgaacttgttgtcagctggattctcaaaggaaagccaccaggtcgcctggatgatgctttaacgtcaatctcagctggtgttctgtctcgacttccaagtctatttttcaggagcattgaactgaccagttatatttatatctgggagaactacaggctgttcaatttgccttgggattctccatggacttggtattcagccttcttaggagttgactttggctactactggttccatcgtatggctcatgaagttaatattatgtgggccggacaccaaacacatcatagttctgaagactataacttatccacagcactgagacagtctgtcctccagatatatacttcctggattttctactctcccctggccctcttcatacccccttcagtatatgctgttcatcttcaattcaatcttctttaccaattttggatccatacagaggtcatcaataaccttggtcctttggaactgattcttaatactcctagccatcatagggttcatcatggcagaaatcgttattgcatagacaaaaattatgctggtgttcttattatttgggataaaatttttgggacatttgaagcagaaaatgaaaaagttgtatatggcttaacacatcccattaatacatttgaaccaatcaaagtgcagttccatcacttattttccatatggactacattctgggccacacctggattcttcaataagttttctgtcatatttaagggaccgggatggggtccaggtaaaccaagacttggtctcagtgaagaaattccagaggtcaccggcaaagaagttcccttctcatcatcttcatctcagctattaaagatatatacagttgtacagtttgctctgatgttggcattttatgaagagacctttgcagatacagctgcactgtcgcaagttactctccttctgagggtttgcttcattatcctgaccttgacttccattggatttcttctggatcaaagacccaaggcagctattatggaaactctccgttgcttgatgttcttaatgctgtaccgatttggtcacctgaagcctcttgtcccttcattgtcatctgcttttgagattgttttttccatttgcattgctttctggggagttagaagcatgaaacaactcacctctcacccttggaaataacctgaatttgtacataattctcttcttttaatgagttgtccacacgcatattatgactgcatattaaaatgtaattattttatgtaatgcttatatgaactatttcttcaatgaaaagtaaaattacttatttactattgtttgcctttcacatttgttattttctattaaaaattaaagtcagttttggttacttcccccctttactacaattaaaaaaagatttcaaatataatgatgttatattaactgatagccttatatgacaagtataaaaagaagggatgaaacttaaaaacagtaaaaacaagaaggaatattgcctttacatcaatttgaaaacaatgtttcctttgatgtttgctaaaattatgcatagatacatgtttgtagtcataaaaatgtattacattggttgtcttcctaaggccacagttacctttgcaatccatataacctaagaagctgcattccagaaaaagacatcactgaggccaggcgcggtggctcacccctgtaatcccagcactttgtggggctgaggtgggcggatcatgaggtccagagatagagaccatcctggccaacatggtgaagtcctgtctctactaaaaatataaaaatttagctggacatggtggtgtgcgcctgtagtcccagctactctggaggctgaggcaggagaatcgcttgaacctgggaggcagaagttggagtgagtggagattgcaccactgcactccagcctgggcgacagagcgagactccgtctcaaagaaaaaagacatcactgaaagaaaaatgaacagaatttgtcagaattagttttttcaacaggttactttgtcatacatttctctaatatgcttggtcaatttgttttggcagactgggcagcatgcagcaattctgcattatttaaagttatcagaacaatgttaattctctaaataaaattacccaaggt

SEQ ID NO: 823 - protein, 445 aa, Homo sapiens
MKNPEAQQDVSVSQGFRMLFYTMKPSETSFQTLEEVPDYVKKATPFFISLMLLELVVSWILKGKPPGRLDDALTSISAGVLSRLPSLFFRSIELTSYIYIWENYRLFNLPWDSPWTWYSAFLGVDFGYYWFHRMAHEVNIMWAGHQTHHSSEDYNLSTALRQSVLQIYTSWIFYSPLALFIPPSVYAVHLQFNLLYQFWIHTEVINNLGPLELILNTPSHHRVHHGRNRYCIDKNYAGVLIIWDKIFGTFEAENEKVVYGLTHPINTFEPIKVQFHHLFSIWTTFWATPGFFNKFSVIFKGPGWGPGKPRLGLSEEIPEVTGKEVPFSSSSSQLLKIYTVVQFALMLAFYEETFADTAALSQVTLLLRVCFIILTLTSIGFLLDQRPKAAIMETLRCLMFLMLYRFGHLKPLVPSLSSAFEIVFSICIAFWGVRSMKQLTSHPWK

SEQ ID NO: 824 - DNA, 3892 bp, Homo sapiens
gtgggaaccttgacaagcagcatggctgcaggttgctcagaggcgccgcggccagcggcggcttctgatgggtctctggtagggcaggctggcgtcctgccttgcctagagttgccgacttatgccgctgcttgtgcgctggtgaacagtcgctactcatgcctggtggccgggccgcaccaaaggcacatcgcgctgtcgccccgctaccttaacaggaaacgcaccggcattcgagaacagcttgatgcggagctccttcgctattctgagagccttttaggtgtccctattgcatatgataacatcaaagttgtgggagagcttggagatatttatgatgatcaaggacacattcatcttaacattgaagccgattttgttattttctgccctgaaccagggcagaagcttatgggtatagttaataaagtgtcttctagccacattggctgtttagtacatgggtgtttcaatgcctccattcctaaacctgagcagttgtcagctgagcagtggcaaaccatggagataaacatgggtgatgaactagaatttgaagtatttcgtttagactcagatgctgctggagtattctgcattcggggaaaactaaatatcacaagtttacaattcaagcgctctgaagtttctgaagaagttacagaaaatggcactgaggaagctgctaaaaaacctaaaaagaagaaaaagaagaaagacccagagacatatgaagtggacagtggtaccacaaagctagcagatgatgcagatgacactccaatggaagagtcagccctgcagaatactaataatgcgaatggcatctgggaggaggagccaaagaaaaagaagaagaagaaaaagcaccaggaagttcaggaccaggaccctgttttccaaggcagtgactccagtggttaccaaagtgaccataaaaagaaaaaaaagaaaagaaaacacagtgaagaggccgaatttaccccacctttgaaatgctcaccaaaaagaaaagggaaaagtaattttctttagtgtattttaaacacgattcagtttttaaaagatcgatctacatacaatagatgaataaatgttttcagtgatatgaaaaggttaagtatgccagtagtttacaaaacagaaaatacttaactaggagtaggaggctttatatgctaaaaatgataaaactgactgtaaattaatttggggaaagccagtattgttaaaataccattttatacaaaataaaaagctgctctcactgtcagctctcatattcttccaggttttgcactctacataaaattatttctacaatgtcaagactagccaaaggactttataatacaatattatattactaaagaatgagttaagtttgagattttgatgatttgattttgtgtgtgtttaataggcttcaccttattacatgctattttattttgcttttttaaaaactcaggacattaactaattttaggttttcctttatcatggctttctacagtatttctattgtttaacataaaatagtttgccaaagaagtttctgaagtcttcacagctcttaaaagccaggccagtactgactgtgtggtggtaaatgctattcattattttcttttctttcttccaagtgcatgtgtgtccttgtcttcttaagtctgagaggttgctggaaaggactgttttcttgtacttgttcatttgtgcctcagccattctagttttgttgtgtgttggaggacagtctaatgaagacaggataaatgtgattctgactagtgggaaatttcagattactttttaatgattggaatgggctataagatattgtgctgaagagaaaacagttgttctgttcactgctttcattgagaaaatgtggaatgtctcttgactaattgacaaagtgtaatgaaatgacaagctggttgaagctggtaatcaatgcatggccatatttattcattttccacacacttgaccatctactttgtataacacattctgctaaggcccagggatacaatggcaaacaagatagatgtagttccttcccttgtggcatgtcataagagaaacagatgtgcatatacacacaataaataagaaaattaataattgtattaagtggtatgaaaaaaagggggaggattgttcactcactgttacctgtgttagtatctgcaaatgcatgaatggttgaactcccatgtcagcatttttgttgccatttatttagtaccagacatagtgctggtctcacagcttaatatttggtaatgaataaattctgctagtggtatatgttgatctgaacttacaatgatgggatatagaattggcagagtggcagatgttcacaattgtctacaagtagatgtgctagacaatggaaggatgcaggccaacctctttgattacaattgagattcatgtgactattgagccctggaaatgtagcttgtccaaattgagatgtgctgtcagtataaaatacataccagattttaaagatgtaccaaaaaatgtaaactatctcaatttttatattggtgaaatcaatatgtcttggtatagtggcttaaataaaacaattttagcctttctcagtttatttttctgcaaaaagattaaaaattgtacatgaagctcatgttaactttcttttggtcagtgctattttaaaggaagtatgagttgaaaaaaaattgaaataaactatatcatattactaggacttaatatagtggcatacccaggaaatgcttagtaagtgttcccttcacattttaaaatttgagtatacaatcatgtttgacaatatagaaatttaatttttagtgaaacaattctaaaccccttttccatagacacaagaaagatggcaaatttatgctattcctggaaaaatacattgtggcttagcaaataagcaagttcccacgttacttttgttttgcttcaagtaatacttctgccagttgtgttttatgaattaaacagggaacggcatgctgaacttgaaactagatttgttcctgcttttttcacaatgtgagtagttttgaaaagtcagatctggccatttgtctttcctagaatagcataactttgttcattgttttttttgtttgtctttctgacacagaaagactgatgatggtgtccactatgtattcttcaaaacatttggcacatgctgcactaacctagtctatcttttctatcttggaatttgctcatacaaaccctatagcctagactagatcccttaccctctctccagttcctatcattcacccatttcactgtgcaagacacctcactagtcaccagtgatacagaaatgacttttaagcagtttctgctcttaagggcttaccgttttgtctataagatacacaagtataaatgacaagtacaaataacaatgaatgtttaatgctttacgtttagtgtttaagcttgttgttggaagagcagcattttgacccttggagaagaaaaactagctgtggcattccaggtggagaacctgacagaggactaagaagttatctaatgtaaaagacctcaggcaccaccttcgcataaactttttccagacaaggctaaatgtgcatgcttcataaccataattcttatttttctttaataaatatttttctacttgtaacactgtgcattatttcaaactgtttacctgtttgtaaagcttgtctcttaatcaaatttgtcttgaccaaataagtttcctgagggctggaattatgccttaactatatctatagtatttaacagtgaatcctttgtataatgaaagcatcaacagataattttaaattgataaataaaaagcacagtttcaaatggt

SEQ ID NO: 825 - protein, 338 aa, Homo sapiens
MAAGCSEAPRPAAASDGSLVGQAGVLPCLELPTYAAACALVNSRYSCLVAGPHQRHIALSPRYLNRKRTGIREQLDAELLRYSESLLGVPIAYDNIKVVGELGDIYDDQGHIHLNIEADFVIFCPEPGQKLMGIVNKVSSSHIGCLVHGCFNASIPKPEQLSAEQWQTMEINMGDELEFEVFRLDSDAAGVFCIRGKLNITSLQFKRSEVSEEVTENGTEEAAKKPKKKKKKKDPETYEVDSGTTKLADDADDTPMEESALQNTNNANGIWEEEPKKKKKKKKHQEVQDQDPVFQGSDSSGYQSDHKKKKKKRKHSEEAEFTPPLKCSPKRKGKSNFL

SEQ ID NO: 826 - DNA, 3992 bp, Homo sapiens
gaggaagaggacgacgacgagggagaagaaacccagacggaaagaggccatcagacaaggtcgctttttctggcgacaaagcaactgcaaggagcgtggtgctgaatatcatccgcccgctctgcctggggacccagagacttgcagaagcacttcgcattgccacgaaaacaaaggagaggtgacgaacgggagagggagagagaaactcggagcggttccctttggatctccgggaagcaaagctcctctcctcggcaataaaacagaagggaccctgtgaaagggtctagtaggctgaggagggcgcgggtttccctgcggagatttgggacgcggcagaactctggacagcgcctggggagcaaggctcggagctccctgggctcctccaggttttccgctgcttaaaagccccggtaccggtgtgcaatcttcgcaccaccgaacccaggaagatccttctacgatccctatctgaacgtgccagggggtggagcagctcctttgcctctggcccagccagggaaggtcttcgtttctggaaatccagcccttgtggataatgcctcgctcttgaagaaagaaaagttttgggatctggtagggggtggaaggggtaaggaggatagtggaagaaaaaaaggtagatggttgatttccctctctgatctggaaggaagatgaccgaggaaggatgtgcaccagcggtcagattattgggagcctcttggtgctctccgtgctggagatagggctgggggtgtccagcgtggccgtgggggcggtcagcttcagcctggccctccgagagcacaagccgcagctcggagactcgtccccgtttcttctttgtggcatttgtggaatattgtgtgccaaaaaaaatcaggacttgtcatgatcctcttttcggcctgctgtatctgtggacttattgggggcatcctgaattttcagttcctccgggcagtcacaaagaaaacttcctccctatacccactgcaccttgcctccatgtctctcgcgtgcattgggatcgggggctgcactctctcttcctggctcacttgtcgactagccagttatgaacagaggaggatgttctcagaaagggagcattccctgcatcactctcatgaaatggctgagaaagaaataacagacaacatgagcaatggaggaccacagctgatatttaatggaagagtgtaatcaatgttttaaagaattgaacactttttaggattttcatgaggcaatgagacaccaaaggactagaaaataaaacagtttttgcatttgcatttatctctcctgagcatccactaaaattattcttcctaaaaaaatatattgcctcactggtttctccacccttttttatggggtaaaaaactttccagaaacattctagtacaataatttcaagaggctttccagattgttctaaagaagacttttcaggaaaaagagataataaaacagaaataaaatgcatattctatacaaacactatttgactagcatgattattatatttgtaatgacatatttcatatgagtaattgaaaagtgcaaatatcaagaaataaaaataacttattgacgtctttgttctgaaagacagatggcttcaaggatgctacaattcaaaacctcagtaatgccttgttataaaaacattgtaattattttcaacttgtgaatgaagtatatttcataatttatttgtaaatgacaaaaaacctcaagcataaaaaagagactttttagagagagagagtactaatctatatggtatttttgcatttttgcacaaagagtgaaaagttatatgtgaatatcatttaagaaaataaacatgttttgatcatactgtgcagattgatctgcatgttcatgaatgagcctaagaataaagtatgtgtgtgaatgtgtgtatacatactgtaaatatagaacatgtatacagcatatattatagcatacatgaatgtaaataggtattagaaaagaaattgtgatgctgtgggggtattattaagattctactccaatagaaatgggaaggcaattgctcaaggcccttctatgcccacaaaatcacatgtttaatttctactaaaattgcccatttttcttcttttaattaggttttgtgtaaatatcattgtgggtgatatttatgaagatgagtgatctgaatagtgtagtatacagatagactacttatttgactatttcactatgattatagtatttatgtatagcaattaaaattaatttataaacgaacatgactttaatgacatacttccgtatttataaagatatcatgacttaaaattattgatgatattgatatttcaaacaccttgcagtccagttaaatgatacaaaagggcagatgatgtaaccccccaacaatgaagttataattacctttgctgtaatctaatttaggtgttttgttttacgattctcatgaaataatataggcagtccatatataagaaagcctatatccaaagatcctgaaagaattctttgaggaaaaagtgaaaagataggctaacatttgtatagctagattcaatcctttcctctaataatggaatgttaaaatagcaaacaagaacaacacatataagtgaaaaaacaacatatatctgaatatatttatcagaatataacctctggcaacagacaaagaaatctatcatttttaaatacataactctcactatattgtatacttttctttttcctcaaatctaatcaattttcaagtcattttttatgagttacttgttgaaccataggtaaattaaaatatttactgttcagtatgagaatataatttataaacaaaacatgagttttaattgtgctaacacagtaatgatcattcaagttaatgaaaatttgaaggtctttatagcaacatgatcatcgtttaacctatttaaatcagctcacttaaaatactggctgtcatctattcaacagaaataactggactctgcttgtttggtgcactttttgaagtctcccaattcctttggataacttcattgcctagtagattacagaagttgtccataaatgcaacctcatatagtgaatcaacatcataactattcattcaatgccacaaacaggcatgatctttgccaatgaaaatctaaattacatcatgaagatatttgtgtgtgtatggtcctcctgaattcatgcaaggatgtagttttgtactgaaagaataaacactgactctaattttcagtagcatttctctataaacatgcttgttcaatacaaaattataatacatcagaaaaatgttgtaatgccttttgaactgatctataacataacacattaaaggacaaaaggagacatatcactgctttgatgtatagttaaaaagagatgccatcatcacaattattcaaatagtttacagtgtatgtttaaccaagtatagatatatttttaaatatgattatttctacctagtattttcagaattgagtttagaatgatttacttgggatgtgcggcgattcttttttagataagtgggggatgttaggaagacattgttcaagtgcttgaaactttaatttggacaatacattgaaccacatgctggaatgttttaagtgactaccttatagttttagtatgagcctacccttggaagaaagtaaggtgatactaaattagaaaaactatgtgaaactggagtggtggtatactttggaccatatcaaataggtagagtattataagcataaaagaataaaattgggctcgctttggaaattttaaacatatatgtgtatgtgtgtatatatatgcatatacatacacatatgtgtatatacacacacacaatggtttggaagtggaacaggaaatgataactctactgacatgtctataataaaatgatgtgctttgaaactaaaaaaaaaaaaaaaaaa

SEQ ID NO: 827 - protein, 104 aa, Homo sapiens
MILFSACCICGLIGGILNFQFLRAVTKKTSSLYPLHLASMSLACIGIGGCTLSSWLTCRLASYEQRRMFSEREHSLHHSHEMAEKEITDNMSNGGPQLIFNGRV

SEQ ID NO: 828 - DNA, 3914 bp, Homo sapiens
agtggcgtccgttgtaagtgctatgacaacagggcgaagatggctcagagttaggctggagaggggaggtgtcccttccgctgcggccgtcgggtttctgctacatcccattcaccgcctcctccatcctttcctcctcggtgtgagcagcaggacttgcatttgttctcgcctgcctagtgtcttccaagggatagatgccgtttcctctgctggtctctgggggtgacggggggcgcaggggagcttcttgggggaatcactccaactctgtggagctggtggtgctgcctggtggggctctctctttgcccgggacgtggaacaactttcagctggaggacgagagggaatagtgaagctaaaggttgcttttctctgcaccgtccgttcttgctccctctgctccatcactgggaccttgtcaggcgttcataaagcaaaatttgccgaacgagggttcgcagaaaggtggggcagagctcatctgacgtggcatcagtgtgaaagaaaatgtctttatttaaagcccgtgattggtggtctactattctgggagataaagaagaatttgatcaaggctgtttgtgtctggctaatgttgacaatagtggaaatggacaagataaaataattgtgggtagctttatgggatacctaaggatctttagcccccatcctgcaaaaacaggagatggagctcaagccgaagatttgcttctagaagtggatctacgagatccagtacttcaagtggaagtaggaaagtttgtttcaggtaccgaaatgctacatttggctgtgttacattctagaaaactttgtgtctactctgtctcaggaaccttgggtaatgtggaacatgggaaccaatgtcagatgaaattgatgtatgaacataatcttcagagaacagcctgcaatatgacctatggatcatttggtggtgtaaaaggtcgagatttaatttgcatccagtctatggatgggatgctgatggtatttgagcaggagagctatgcttttggaagatttctccctggctttcttctgcctggtcctcttgcctacagttcccgtacagattccttccttactgtctcttcctgccaacaagtggaaagttataagtaccaggtacttgcttttgcaacagatgcagataaaaggcaggagactgaacagcaaaaacttggttctggaaaaagactagttgtggattggactctaaatattggagagcaagcccttgacatatgtattgtctctttcaatcagtcggcatcctctgtttttgttcttggtgagagaaactttttttgccttaaggataatggacaaattcgattcatgaagaagcttgattggagcccaagttgttttctgccatattgctcagtttctgaaggaacaataaatactttgattggaaatcataataacatgctgcatatttatcaagatgtgacactgaagtgggccacccaacttccccacattcctgtagcagtaagagtgggctgtttgcatgatttaaagggagtgatagtcactctgagtgatgatggtcacttgcagtgttcatacctggggacagatccttctctgttccaagctccaaacgttcaatctcgagaactaaactatgatgaacttgatgtagaaatgaaagaacttcagaaaatcatcaaagatgttaacaaatcacaaggtgtttggcccatgactgagagagaagatgacttgaacgtttctgtcgtggtttctcctaactttgattcagtttctcaagcgaccgatgttgaggtgggaactgaccttgtcccttctgtcacggtgaaggtcacactgcagaacagagtgatattgcaaaaagccaaattatcagtctacgtgcaaccaccattagaattgacttgtgatcagttcacctttgaatttatgaatcgaaatcctgatggcattccgcgagttatccaatgtaaatttagacttcccctaaagttaatttgcctaccaggtcagccttcaaaaactgcaagccacaaaattactattgataccaacaaatctccagtcagtcttcttagtctcttcccaggttttgccagtcagtcagatgatgatcaggtgaatgtaatgggttttcacttcttaggaggtgctcgaattactgttcttgcttccaaaacttctcaacgatatcgcattcagagtgaacaatttgaagatctttggctcataaccaatgagcttattcttcgccttcaagaatattttgaaaaacagggagtcaaagattttgcatgttctttttcgggatctataccccttcaagaatattttgagttgattgatcatcattttgagctacggataaatggtgaaaaattagaagaactcttatctgagagagctgtacaatttcgggccattcaacgccggctactagcaagattcaaagataaaactcctgcccctcttcaacacctggacaccttgttagatggaacctacaagcaggtaattgctctagcagatgcagtggaggaaaaccaaggcaatctgttccagtcattcaccaggctgaagagtgccacccatttggtgattctgctgatcgcgctgtggcagaagcttagtgctgaccaggttgctattctggaagcggcatttctgccgctacaagaagacactcaagaattgggctgggaagaaacggtggatgccgccatttcccacctgttgaagacttgcctgtcgaagagttctaaggagcaggctttgaacctcaacagccagctgaacatacccaaagacacaagccaactgaagaaacatatcaccttgctctgcgatagattatccaaaggtggccgtctctgcctaagtaccgatgcagcagccccacagaccatggtcatgccaggtggttgtactacaatcccagagtcagacctagaagaaagatcagtagaacaagactctacagaactgtttaccaaccacagacatctcactgcagagacacccaggcctgaagtttcacccctccaaggagtctcggaataattcaagtagagttgtttggttgagaggaacatccccatctcaaggccgaacctgtgtgaacctcatgccaagcacagatatagggctggcgcaggtgcttcctaaagctcaccttcctggagatgacatgcatagaaagaggggttgggactttttacttcactaggagaacttgtaacaccatggggaagtcagctgaaacttgtcttgttttgccaggaaaggaagtagttgcctttggtcatccatctgctaatagtcacagaatacagtgaaatgacatagttttgggttagattttataatgcaaagattcagatccaaaataatttcataccccattttttcacagaattcttatatagtaaatgtatcaagtttaataaagcatctcattgtcaaataatatcttggattttatttataattagagggatttatgagtgattgctctacattatttcttcaaaggaaaggaaaggaattgaagactttgctactctctggtaagacttgaatgtgattattttataaataaaagaaccactatgaaactttcatgtgatttgttctattaagctaaacgtggaagaagggaagttttctagtattgtatgaaaatgtttaaatattttcaaggaagctagtacattaacatccccttttcattaccccattgggtggcaccttttaaaaatccaggttattaaaggattcacactttattacagttaaaatttaaggtttttatgtgtaagaagtgaaagaaactttgctaatttcaagttcgaattacagttgtgagattgatttatttaaataaaaatatgcctttgccagtt

SEQ ID NO: 829 - protein, 852 aa, Homo sapiens
MSLFKARDWWSTILGDKEEFDQGCLCLANVDNSGNGQDKIIVGSFMGYLRIFSPHPAKTGDGAQAEDLLLEVDLRDPVLQVEVGKFVSGTEMLHLAVLHSRKLCVYSVSGTLGNVEHGNQCQMKLMYEHNLQRTACNMTYGSFGGVKGRDLICIQSMDGMLMVFEQESYAFGRFLPGFLLPGPLAYSSRTDSFLTVSSCQQVESYKYQVLAFATDADKRQETEQQKLGSGKRLVVDWTLNIGEQALDICIVSFNQSASSVFVLGERNFFCLKDNGQIRFMKKLDWSPSCFLPYCSVSEGTINTLIGNHNNMLHIYQDVTLKWATQLPHIPVAVRVGCLHDLKGVIVTLSDDGHLQCSYLGTDPSLFQAPNVQSRELNYDELDVEMKELQKIIKDVNKSQGVWPMTEREDDLNVSVVVSPNFDSVSQATDVEVGTDLVPSVTVKVTLQNRVILQKAKLSVYVQPPLELTCDQFTFEFMNRNPDGIPRVIQCKFRLPLKLICLPGQPSKTASHKITIDTNKSPVSLLSLFPGFASQSDDDQVNVMGFHFLGGARITVLASKTSQRYRIQSEQFEDLWLITNELILRLQEYFEKQGVKDFACSFSGSIPLQEYFELIDHHFELRINGEKLEELLSERAVQFRAIQRRLLARFKDKTPAPLQHLDTLLDGTYKQVIALADAVEENQGNLFQSFTRLKSATHLVILLIALWQKLSADQVAILEAAFLPLQEDTQELGWEETVDAAISHLLKTCLSKSSKEQALNLNSQLNIPKDTSQLKKHITLLCDRLSKGGRLCLSTDAAAPQTMVMPGGCTTIPESDLEERSVEQDSTELFTNHRHLTAETPRPEVSPLQGVSE

SEQ ID NO: 830 - DNA, 4004 bp, Homo sapiens
agtggcgtccgttgtaagtgctatgacaacagggcgaagatggctcagagttaggctggagaggggaggtgtcccttccgctgcggccgtcgggtttctgctacatcccattcaccgcctcctccatcctttcctcctcggtgtgagcagcaggacttgcatttgttctcgcctgcctagtgtcttccaagggatagatgccgtttcctctgctggtctctgggggtgacggggggcgcaggggagcttcttgggggaatcactccaactctgtggagctggtggtgctgcctggtggggctctctctttgcccgggacgtggaacaactttcagctggaggacgagagggaatagtgaagctaaaggttgcttttctctgcaccgtccgttcttgctccctctgctccatcactgggaccttgtcaggcgttcataaagcaaaatttgccgaacgagggttcgcagaaaggtggggcagagctcatctgacgtggcatcagtgtgaaagaaaatgtctttatttaaagcccgtgattggtggtctactattctgggagataaagaagaatttgatcaaggctgtttgtgtctggctaatgttgacaatagtggaaatggacaagataaaataattgtgggtagctttatgggatacctaaggatctttagcccccatcctgcaaaaacaggagatggagctcaagccgaagatttgcttctagaagtggatctacgagatccagtacttcaagtggaagtaggaaagtttgtttcaggtaccgaaatgctacatttggctgtgttacattctagaaaactttgtgtctactctgtctcaggaaccttgggtaatgtggaacatgggaaccaatgtcagatgaaattgatgtatgaacataatcttcagagaacagcctgcaatatgacctatggatcatttggtggtgtaaaaggtcgagatttaatttgcatccagtctatggatgggatgctgatggtatttgagcaggagagctatgcttttggaagatttctccctggctttcttctgcctggtcctcttgcctacagttcccgtacagattccttccttactgtctcttcctgccaacaagtggaaagttataagtaccaggtacttgcttttgcaacagatgcagataaaaggcaggagactgaacagcaaaaacttggttctggaaaaagactagttgtggattggactctaaatattggagagcaagcccttgacatatgtattgtctctttcaatcagtcggcatcctctgtttttgttcttggtgagagaaactttttttgccttaaggataatggacaaattcgattcatgaagaagcttgattggagcccaagttgttttctgccatattgctcagtttctgaaggaacaataaatactttgattggaaatcataataacatgctgcatatttatcaagatgtgacactgaagtgggccacccaacttccccacattcctgtagcagtaagagtgggctgtttgcatgatttaaagggagtgatagtcactctgagtgatgatggtcacttgcagtgttcatacctggggacagatccttctctgttccaagctccaaacgttcaatctcgagaactaaactatgatgaacttgatgtagaaatgaaagaacttcagaaaatcatcaaagatgttaacaaatcacaaggtgtttggcccatgactgagagagaagatgacttgaacgtttctgtcgtggtttctcctaactttgattcagtttctcaagcgaccgatgttgaggtgggaactgaccttgtcccttctgtcacggtgaaggtcacactgcagaacagagtgatattgcaaaaagccaaattatcagtctacgtgcaaccaccattagaattgacttgtgatcagttcacctttgaatttatgacaccagatttgactagaacagtaagcttttctgtttatctgaaaagaagttatacaccatcagaattggaaggaaatgctgttgtttcttattccagaccaacaggcattccgcgagttatccaatgtaaatttagacttcccctaaagttaatttgcctaccaggtcagccttcaaaaactgcaagccacaaaattactattgataccaacaaatctccagtcagtcttcttagtctcttcccaggttttgccagtcagtcagatgatgatcaggtgaatgtaatgggttttcacttcttaggaggtgctcgaattactgttcttgcttccaaaacttctcaacgatatcgcattcagagtgaacaatttgaagatctttggctcataaccaatgagcttattcttcgccttcaagaatattttgaaaaacagggagtcaaagattttgcatgttctttttcgggatctataccccttcaagaatattttgagttgattgatcatcattttgagctacggataaatggtgaaaaattagaagaactcttatctgagagagctgtacaatttcgggccattcaacgccggctactagcaagattcaaagataaaactcctgcccctcttcaacacctggacaccttgttagatggaacctacaagcaggtaattgctctagcagatgcagtggaggaaaaccaaggcaatctgttccagtcattcaccaggctgaagagtgccacccatttggtgattctgctgatcgcgctgtggcagaagcttagtgctgaccaggttgctattctggaagcggcatttctgccgctacaagaagacactcaagaattgggctgggaagaaacggtggatgccgccatttcccacctgttgaagacttgcctgtcgaagagttctaaggagcaggctttgaacctcaacagccagctgaacatacccaaagacacaagccaactgaagaaacatatcaccttgctctgcgatagattatccaaaggtggccgtctctgcctaagtaccgatgcagcagccccacagaccatggtcatgccaggtggttgtactacaatcccagagtcagacctagaagaaagatcagtagaacaagactctacagaactgtttaccaaccacagacatctcactgcagagacacccaggcctgaagtttcacccctccaaggagtctcggaataattcaagtagagttgtttggttgagaggaacatccccatctcaaggccgaacctgtgtgaacctcatgccaagcacagatatagggctggcgcaggtgcttcctaaagctcaccttcctggagatgacatgcatagaaagaggggttgggactttttacttcactaggagaacttgtaacaccatggggaagtcagctgaaacttgtcttgttttgccaggaaaggaagtagttgcctttggtcatccatctgctaatagtcacagaatacagtgaaatgacatagttttgggttagattttataatgcaaagattcagatccaaaataatttcataccccattttttcacagaattcttatatagtaaatgtatcaagtttaataaagcatctcattgtcaaataatatcttggattttatttataattagagggatttatgagtgattgctctacattatttcttcaaaggaaaggaaaggaattgaagactttgctactctctggtaagacttgaatgtgattattttataaataaaagaaccactatgaaactttcatgtgatttgttctattaagctaaacgtggaagaagggaagttttctagtattgtatgaaaatgtttaaatattttcaaggaagctagtacattaacatccccttttcattaccccattgggtggcaccttttaaaaatccaggttattaaaggattcacactttattacagttaaaatttaaggtttttatgtgtaagaagtgaaagaaactttgctaatttcaagttcgaattacagttgtgagattgatttatttaaataaaaatatgcctttgccagtt

SEQ ID NO: 831 - protein, 882 aa, Homo sapiens
MSLFKARDWWSTILGDKEEFDQGCLCLANVDNSGNGQDKIIVGSFMGYLRIFSPHPAKTGDGAQAEDLLLEVDLRDPVLQVEVGKFVSGTEMLHLAVLHSRKLCVYSVSGTLGNVEHGNQCQMKLMYEHNLQRTACNMTYGSFGGVKGRDLICIQSMDGMLMVFEQESYAFGRFLPGFLLPGPLAYSSRTDSFLTVSSCQQVESYKYQVLAFATDADKRQETEQQKLGSGKRLVVDWTLNIGEQALDICIVSFNQSASSVFVLGERNFFCLKDNGQIRFMKKLDWSPSCFLPYCSVSEGTINTLIGNHNNMLHIYQDVTLKWATQLPHIPVAVRVGCLHDLKGVIVTLSDDGHLQCSYLGTDPSLFQAPNVQSRELNYDELDVEMKELQKIIKDVNKSQGVWPMTEREDDLNVSVVVSPNFDSVSQATDVEVGTDLVPSVTVKVTLQNRVILQKAKLSVYVQPPLELTCDQFTFEFMTPDLTRTVSFSVYLKRSYTPSELEGNAVVSYSRPTGIPRVIQCKFRLPLKLICLPGQPSKTASHKITIDTNKSPVSLLSLFPGFASQSDDDQVNVMGFHFLGGARITVLASKTSQRYRIQSEQFEDLWLITNELILRLQEYFEKQGVKDFACSFSGSIPLQEYFELIDHHFELRINGEKLEELLSERAVQFRAIQRRLLARFKDKTPAPLQHLDTLLDGTYKQVIALADAVEENQGNLFQSFTRLKSATHLVILLIALWQKLSADQVAILEAAFLPLQEDTQELGWEETVDAAISHLLKTCLSKSSKEQALNLNSQLNIPKDTSQLKKHITLLCDRLSKGGRLCLSTDAAAPQTMVMPGGCTTIPESDLEERSVEQDSTELFTNHRHLTAETPRPEVSPLQGVSE

SEQ ID NO: 832 - DNA, 3899 bp, Homo sapiens
agtggcgtccgttgtaagtgctatgacaacagggcgaagatggctcagagttaggctggagaggggaggtgtcccttccgctgcggccgtcgggtttctgctacatcccattcaccgcctcctccatcctttcctcctcggtgtgagcagcaggacttgcatttgttctcgcctgcctagtgtcttccaagggatagatgccgtttcctctgctggtctctgggggtgacggggggcgcaggggagcttcttgggggaatcactccaactctgtggagctggtggtgctgcctggtggggctctctctttgcccgggacgtggaacaactttcagctggaggacgagagggaatagtgaagctaaaggttgcttttctctgcaccgtccgttcttgctccctctgctccatcactgggaccttgtcaggcgttcataaagcaaaatttgccgaacgagggttcgcagaaaggtggggcagagctcatctgacgtggcatcagtgtgaaagaaaatgtctttatttaaagcccgtgattggtggtctactattctgggagataaagaagaatttgatcaaggctgtttgtgtctggctaatgttgacaatagtggaaatggacaagataaaataattgtgggtagctttatgggatacctaaggatctttagcccccatcctgcaaaaacaggagatggagctcaagccgaagatttgcttctagaagtggatctacgagatccagtacttcaagtggaagtaggaaagtttgtttcaggtaccgaaatgctacatttggctgtgttacattctagaaaactttgtgtctactctgtctcaggaaccttgggtaatgtggaacatgggaaccaatgtcagatgaaattgatgtatgaacataatcttcagagaacagcctgcaatatgacctatggatcatttggtggtgtaaaaggtcgagatttaatttgcatccagtctatggatgggatgctgatggtatttgagcaggagagctatgcttttggaagatttctccctggctttcttctgcctggtcctcttgcctacagttcccgtacagattccttccttactgtctcttcctgccaacaagtggaaagttataagtaccaggtacttgcttttgcaacagatgcagataaaaggcaggagactgaacagcaaaaacttggttctggaaaaagactagttgtggattggactctaaatattggagagcaagcccttgacatatgtattgtctctttcaatcagtcggcatcctctgtttttgttcttggtgagagaaactttttttgccttaaggataatggacaaattcgattcatgaagaagcttgattggagcccaagttgttttctgccatattgctcagtttctgaaggaacaataaatactttgattggaaatcataataacatgctgcatatttatcaagatgtgacactgaagtgggccacccaacttccccacattcctgtagcagtaagagtgggctgtttgcatgatttaaagggagtgatagtcactctgagtgatgatggtcacttgcagtgttcatacctggggacagatccttctctgttccaagctccaaacgttcaatctcgagaactaaactatgatgaacttgatgtagaaatgaaagaacttcagaaaatcatcaaagatgttaacaaatcacaaggtgtttggcccatgactgagagagaagatgacttgaacgtttctgtcgtggtttctcctaactttgattcagtttctcaagcgaccgatgttgaggtgggaactgaccttgtcccttctgtcacggtgaaggtcacactgcagaacagagtgatattgcaaaaagccaaattatcagtctacgtgcaaccaccattagaattgacttgtgatcagttcacctttgaatttatgagcattccgcgagttatccaatgtaaatttagacttcccctaaagttaatttgcctaccaggtcagccttcaaaaactgcaagccacaaaattactattgataccaacaaatctccagtcagtcttcttagtctcttcccaggttttgccagtcagtcagatgatgatcaggtgaatgtaatgggttttcacttcttaggaggtgctcgaattactgttcttgcttccaaaacttctcaacgatatcgcattcagagtgaacaatttgaagatctttggctcataaccaatgagcttattcttcgccttcaagaatattttgaaaaacagggagtcaaagattttgcatgttctttttcgggatctataccccttcaagaatattttgagttgattgatcatcattttgagctacggataaatggtgaaaaattagaagaactcttatctgagagagctgtacaatttcgggccattcaacgccggctactagcaagattcaaagataaaactcctgcccctcttcaacacctggacaccttgttagatggaacctacaagcaggtaattgctctagcagatgcagtggaggaaaaccaaggcaatctgttccagtcattcaccaggctgaagagtgccacccatttggtgattctgctgatcgcgctgtggcagaagcttagtgctgaccaggttgctattctggaagcggcatttctgccgctacaagaagacactcaagaattgggctgggaagaaacggtggatgccgccatttcccacctgttgaagacttgcctgtcgaagagttctaaggagcaggctttgaacctcaacagccagctgaacatacccaaagacacaagccaactgaagaaacatatcaccttgctctgcgatagattatccaaaggtggccgtctctgcctaagtaccgatgcagcagccccacagaccatggtcatgccaggtggttgtactacaatcccagagtcagacctagaagaaagatcagtagaacaagactctacagaactgtttaccaaccacagacatctcactgcagagacacccaggcctgaagtttcacccctccaaggagtctcggaataattcaagtagagttgtttggttgagaggaacatccccatctcaaggccgaacctgtgtgaacctcatgccaagcacagatatagggctggcgcaggtgcttcctaaagctcaccttcctggagatgacatgcatagaaagaggggttgggactttttacttcactaggagaacttgtaacaccatggggaagtcagctgaaacttgtcttgttttgccaggaaaggaagtagttgcctttggtcatccatctgctaatagtcacagaatacagtgaaatgacatagttttgggttagattttataatgcaaagattcagatccaaaataatttcataccccattttttcacagaattcttatatagtaaatgtatcaagtttaataaagcatctcattgtcaaataatatcttggattttatttataattagagggatttatgagtgattgctctacattatttcttcaaaggaaaggaaaggaattgaagactttgctactctctggtaagacttgaatgtgattattttataaataaaagaaccactatgaaactttcatgtgatttgttctattaagctaaacgtggaagaagggaagttttctagtattgtatgaaaatgtttaaatattttcaaggaagctagtacattaacatccccttttcattaccccattgggtggcaccttttaaaaatccaggttattaaaggattcacactttattacagttaaaatttaaggtttttatgtgtaagaagtgaaagaaactttgctaatttcaagttcgaattacagttgtgagattgatttatttaaataaaaatatgcctttgccagtt

SEQ ID NO: 833 - protein, 847 aa, Homo sapiens
MSLFKARDWWSTILGDKEEFDQGCLCLANVDNSGNGQDKIIVGSFMGYLRIFSPHPAKTGDGAQAEDLLLEVDLRDPVLQVEVGKFVSGTEMLHLAVLHSRKLCVYSVSGTLGNVEHGNQCQMKLMYEHNLQRTACNMTYGSFGGVKGRDLICIQSMDGMLMVFEQESYAFGRFLPGFLLPGPLAYSSRTDSFLTVSSCQQVESYKYQVLAFATDADKRQETEQQKLGSGKRLVVDWTLNIGEQALDICIVSFNQSASSVFVLGERNFFCLKDNGQIRFMKKLDWSPSCFLPYCSVSEGTINTLIGNHNNMLHIYQDVTLKWATQLPHIPVAVRVGCLHDLKGVIVTLSDDGHLQCSYLGTDPSLFQAPNVQSRELNYDELDVEMKELQKIIKDVNKSQGVWPMTEREDDLNVSVVVSPNFDSVSQATDVEVGTDLVPSVTVKVTLQNRVILQKAKLSVYVQPPLELTCDQFTFEFMSIPRVIQCKFRLPLKLICLPGQPSKTASHKITIDTNKSPVSLLSLFPGFASQSDDDQVNVMGFHFLGGARITVLASKTSQRYRIQSEQFEDLWLITNELILRLQEYFEKQGVKDFACSFSGSIPLQEYFELIDHHFELRINGEKLEELLSERAVQFRAIQRRLLARFKDKTPAPLQHLDTLLDGTYKQVIALADAVEENQGNLFQSFTRLKSATHLVILLIALWQKLSADQVAILEAAFLPLQEDTQELGWEETVDAAISHLLKTCLSKSSKEQALNLNSQLNIPKDTSQLKKHITLLCDRLSKGGRLCLSTDAAAPQTMVMPGGCTTIPESDLEERSVEQDSTELFTNHRHLTAETPRPEVSPLQGVSE

SEQ ID NO: 834 - DNA, 4019 bp, Homo sapiens
agtggcgtccgttgtaagtgctatgacaacagggcgaagatggctcagagttaggctggagaggggaggtgtcccttccgctgcggccgtcgggtttctgctacatcccattcaccgcctcctccatcctttcctcctcggtgtgagcagcaggacttgcatttgttctcgcctgcctagtgtcttccaagggatagatgccgtttcctctgctggtctctgggggtgacggggggcgcaggggagcttcttgggggaatcactccaactctgtggagctggtggtgctgcctggtggggctctctctttgcccgggacgtggaacaactttcagctggaggacgagagggaatagtgaagctaaaggttgcttttctctgcaccgtccgttcttgctccctctgctccatcactgggaccttgtcaggcgttcataaagcaaaatttgccgaacgagggttcgcagaaaggtggggcagagctcatctgacgtggcatcagtgtgaaagaaaatgtctttatttaaagcccgtgattggtggtctactattctgggagataaagaagaatttgatcaaggctgtttgtgtctggctaatgttgacaatagtggaaatggacaagataaaataattgtgggtagctttatgggatacctaaggatctttagcccccatcctgcaaaaacaggagatggagctcaagccgaagatttgcttctagaagtggatctacgagatccagtacttcaagtggaagtaggaaagtttgtttcaggtaccgaaatgctacatttggctgtgttacattctagaaaactttgtgtctactctgtctcaggaaccttgggtaatgtggaacatgggaaccaatgtcagatgaaattgatgtatgaacataatcttcagagaacagcctgcaatatgacctatggatcatttggtggtgtaaaaggtcgagatttaatttgcatccagtctatggatgggatgctgatggtatttgagcaggagagctatgcttttggaagatttctccctggctttcttctgcctggtcctcttgcctacagttcccgtacagattccttccttactgtctcttcctgccaacaagtggaaagttataagtaccaggtacttgcttttgcaacagatgcagataaaaggcaggagactgaacagcaaaaacttggttctggaaaaagactagttgtggattggactctaaatattggagagcaagcccttgacatatgtattgtctctttcaatcagtcggcatcctctgtttttgttcttggtgagagaaactttttttgccttaaggataatggacaaattcgattcatgaagaagcttgattggagcccaagttgttttctgccatattgctcagtttctgaaggaacaataaatactttgattggaaatcataataacatgctgcatatttatcaagatgtgacactgaagtgggccacccaacttccccacattcctgtagcagtaagagtgggctgtttgcatgatttaaagggagtgatagtcactctgagtgatgatggtcacttgcagtgttcatacctggggacagatccttctctgttccaagctccaaacgttcaatctcgagaactaaactatgatgaacttgatgtagaaatgaaagaacttcagaaaatcatcaaagatgttaacaaatcacaaggtgtttggcccatgactgagagagaagatgacttgaacgtttctgtcgtggtttctcctaactttgattcagtttctcaagcgaccgatgttgaggtgggaactgaccttgtcccttctgtcacggtgaaggtcacactgcagaacagagtgatattgcaaaaagccaaattatcagtctacgtgcaaccaccattagaattgacttgtgatcagttcacctttgaatttatgacaccagatttgactagaacagtaagcttttctgtttatctgaaaagaagttatacaccatcagaattggaaggaaatgctgttgtttcttattccagaccaacagatcgaaatcctgatggcattccgcgagttatccaatgtaaatttagacttcccctaaagttaatttgcctaccaggtcagccttcaaaaactgcaagccacaaaattactattgataccaacaaatctccagtcagtcttcttagtctcttcccaggttttgccagtcagtcagatgatgatcaggtgaatgtaatgggttttcacttcttaggaggtgctcgaattactgttcttgcttccaaaacttctcaacgatatcgcattcagagtgaacaatttgaagatctttggctcataaccaatgagcttattcttcgccttcaagaatattttgaaaaacagggagtcaaagattttgcatgttctttttcgggatctataccccttcaagaatattttgagttgattgatcatcattttgagctacggataaatggtgaaaaattagaagaactcttatctgagagagctgtacaatttcgggccattcaacgccggctactagcaagattcaaagataaaactcctgcccctcttcaacacctggacaccttgttagatggaacctacaagcaggtaattgctctagcagatgcagtggaggaaaaccaaggcaatctgttccagtcattcaccaggctgaagagtgccacccatttggtgattctgctgatcgcgctgtggcagaagcttagtgctgaccaggttgctattctggaagcggcatttctgccgctacaagaagacactcaagaattgggctgggaagaaacggtggatgccgccatttcccacctgttgaagacttgcctgtcgaagagttctaaggagcaggctttgaacctcaacagccagctgaacatacccaaagacacaagccaactgaagaaacatatcaccttgctctgcgatagattatccaaaggtggccgtctctgcctaagtaccgatgcagcagccccacagaccatggtcatgccaggtggttgtactacaatcccagagtcagacctagaagaaagatcagtagaacaagactctacagaactgtttaccaaccacagacatctcactgcagagacacccaggcctgaagtttcacccctccaaggagtctcggaataattcaagtagagttgtttggttgagaggaacatccccatctcaaggccgaacctgtgtgaacctcatgccaagcacagatatagggctggcgcaggtgcttcctaaagctcaccttcctggagatgacatgcatagaaagaggggttgggactttttacttcactaggagaacttgtaacaccatggggaagtcagctgaaacttgtcttgttttgccaggaaaggaagtagttgcctttggtcatccatctgctaatagtcacagaatacagtgaaatgacatagttttgggttagattttataatgcaaagattcagatccaaaataatttcataccccattttttcacagaattcttatatagtaaatgtatcaagtttaataaagcatctcattgtcaaataatatcttggattttatttataattagagggatttatgagtgattgctctacattatttcttcaaaggaaaggaaaggaattgaagactttgctactctctggtaagacttgaatgtgattattttataaataaaagaaccactatgaaactttcatgtgatttgttctattaagctaaacgtggaagaagggaagttttctagtattgtatgaaaatgtttaaatattttcaaggaagctagtacattaacatccccttttcattaccccattgggtggcaccttttaaaaatccaggttattaaaggattcacactttattacagttaaaatttaaggtttttatgtgtaagaagtgaaagaaactttgctaatttcaagttcgaattacagttgtgagattgatttatttaaataaaaatatgcctttgccagtt

SEQ ID NO: 835 - protein, 887 aa, Homo sapiens
MSLFKARDWWSTILGDKEEFDQGCLCLANVDNSGNGQDKIIVGSFMGYLRIFSPHPAKTGDGAQAEDLLLEVDLRDPVLQVEVGKFVSGTEMLHLAVLHSRKLCVYSVSGTLGNVEHGNQCQMKLMYEHNLQRTACNMTYGSFGGVKGRDLICIQSMDGMLMVFEQESYAFGRFLPGFLLPGPLAYSSRTDSFLTVSSCQQVESYKYQVLAFATDADKRQETEQQKLGSGKRLVVDWTLNIGEQALDICIVSFNQSASSVFVLGERNFFCLKDNGQIRFMKKLDWSPSCFLPYCSVSEGTINTLIGNHNNMLHIYQDVTLKWATQLPHIPVAVRVGCLHDLKGVIVTLSDDGHLQCSYLGTDPSLFQAPNVQSRELNYDELDVEMKELQKIIKDVNKSQGVWPMTEREDDLNVSVVVSPNFDSVSQATDVEVGTDLVPSVTVKVTLQNRVILQKAKLSVYVQPPLELTCDQFTFEFMTPDLTRTVSFSVYLKRSYTPSELEGNAVVSYSRPTDRNPDGIPRVIQCKFRLPLKLICLPGQPSKTASHKITIDTNKSPVSLLSLFPGFASQSDDDQVNVMGFHFLGGARITVLASKTSQRYRIQSEQFEDLWLITNELILRLQEYFEKQGVKDFACSFSGSIPLQEYFELIDHHFELRINGEKLEELLSERAVQFRAIQRRLLARFKDKTPAPLQHLDTLLDGTYKQVIALADAVEENQGNLFQSFTRLKSATHLVILLIALWQKLSADQVAILEAAFLPLQEDTQELGWEETVDAAISHLLKTCLSKSSKEQALNLNSQLNIPKDTSQLKKHITLLCDRLSKGGRLCLSTDAAAPQTMVMPGGCTTIPESDLEERSVEQDSTELFTNHRHLTAETPRPEVSPLQGVSE

SEQ ID NO: 836 - DNA, 837 bp, Homo sapiens
atgaaaagttgcgggggccctactgccccgggtgtgtcgctccttcccaaaggtggggcacccgggagcgagcagggtggtggggcgcccctgcgtcccgtttgctgctccctcgctggattggggcacccgggcctgagcgctagtgctgcggcatccccggggctcccccaagaaagggaggaggagccgcgctcgcccggacagtggagacgcgccttctcggctctggtccgcgccctggggccctggcctccctggaggggctggggaactggaagctgggccgagagagttcccgctgcagctatcgcgcagtccctcctgcgcccgggcgcccccagcgggttccgggaggcgcccggtgagcccacgtctgttgcggcggagcgagcgcgctccgggagggccgagagccggcggggctggcaggaggtgaggagtgcgggagtggaggacgctgcggcagcgacagcgacagcccccgaaacagtagcggcagcccgggcggcggctgagcggcagtgcgcagtcggcagcgccgcagctcctctcagtctatctccggctgccgcaacaccccttcctcctggccccctctccggcgctgaggggctgactgctaagccactgcaagcaactccctcaggaaaaaaaaaaaaaaagccgcatcggaggagcctggccgcaggacccctcctccccgggcgcccccacaccttggtctctccccccgccctccctcacacccccccgccccccagctctcgggcgcccgcctccctccttcgcggacggtctcccgacacgccggctgagagcccttttcgactgtga

SEQ ID NO: 837 - protein, 278 aa, Homo sapiens
MKSCGGPTAPGVSLLPKGGAPGSEQGGGAPLRPVCCSLAGLGHPGLSASAAASPGLPQEREEEPRSPGQWRRAFSALVRALGPWPPWRGWGTGSWAERVPAAAIAQSLLRPGAPSGFREAPGEPTSVAAERARSGRAESRRGWQEVRSAGVEDAAAATATAPETVAAARAAAERQCAVGSAAAPLSLSPAAATPLPPGPLSGAEGLTAKPLQATPSGKKKKKPHRRSLAAGPLLPGRPHTLVSPPALPHTPPPPSSRAPASLLRGRSPDTPAESPFRL

SEQ ID NO: 838 - DNA, 5032 bp, Homo sapiens
ggacagtggagacgcgccttctcggctctggtccgcgccctggggccctggctccctggaggggctggggaactggaagctgggccgagagagttcccgctgcagctatcgcgcagtccctcctgcgcccgggcgcccccagcgggttccgggaggcgcccggtgagcccacgtctgttgcggcggagcgagcgcgctccgggagggccgagagccggcggggctggcaggagctctcgggcgcccgcctccctccttcgcggacggtctcccgacacgccggctgagagcccttttcgactgtgagctgcggcagctgagcagaggcggcggcgcgggacctgcagtcgccagggattccctccaggtgacgatgctctggttctccggcgtcggggctctggctgagcgttactgccgccgctcgcctgggattacgtgctgcgtcttgctgctactcaattgctcgggggtccccatgtctctggcttcctccttcttgacaggttctgttgcaaaatgtgaaaatgaaggtgaagtcctccagattccatttatcacagacaacccttgcataatgtgtgtctgcttgaacaaggaagtgacatgtaagagagagaagtgccccgtgctgtcccgagactgtgccctggccatcaagcagaggggagcctgttgtgaacagtgcaaaggttgcacctatgaaggaaatacctataacagctccttcaaatggcagagcccggctgagccttgtgttctacgccagtgccaggagggcgttgtcacagagtctggggtgcgctgtgttgttcattgtaaaaaccctttggagcatctgggaatgtgctgccccacatgtccaggctgtgtgtttgagggtgtgcagtatcaagaaggggaggaatttcagccagaaggaagcaaatgtaccaagtgttcctgcactggaggcaggacacaatgtgtgagagaagtctgtcccattctctcctgtccccagcaccttagtcacatacccccaggacagtgctgccccaaatgtttgggtcagaggaaagtgtttgacctcccttttgggagctgcctctttcgaagtgatgtttatgacaatggatcctcatttctgtacgataactgcacagcttgtacctgcagggactctactgtggtttgcaagaggaagtgctcccaccctggtggctgtgaccaaggccaggagggctgttgtgaagagtgcctcctacgagtgcccccagaagacatcaaagtatgcaaatttggcaacaagattttccaggatggagagatgtggtcctctatcaattgtaccatctgtgcttgtgtgaaaggcaggacggagtgtcgcaataagcagtgcattcccatcagtagctgcccacagggcaaaattctcaacagaaaaggatgctgtcctatttgcactgaaaagcccggcgtttgcacggtgtttggagatccccactacaacacttttgacggtcggacatttaactttcaggggacgtgtcagtacgttttgacaaaagactgctcctcccctgcctcgcccttccaggtgctggtgaagaacgacgcccgccggacacgctccttctcgtggaccaagtcggtggagctggtgctgggcgagagcagggtcagcctgcagcagcacctcaccgtgcgctggaacggctcgcgcatcgcgctcccctgccgcgcgccacacttccacatcgacctggatggctacctcttgaaagtgaccaccaaagcaggtttggaaatatcttgggatggagacagttttgtagaagtcatggctgcgccgcatctcaagggcaagctctgtggtctttgtggcaactacaatggacataaacgtgatgacttaattggtggagatggaaacttcaagtttgatgtggatgactttgctgaatcttggagggtggagtccaatgagttctgcaacagacctcagagaaagccagtgcctgaactgtgtcaagggacagtcaaggtaaagctccgggcccatcgagaatgccaaaagctcaaatcctgggagtttcagacctgccactcgactgtggactacgccactttctaccggtcctgtgtgacagacatgtgtgaatgtccagtccataaaaactgttattgcgagtcatttttggcatatacccgggcctgccagagagagggcatcaaagtccactgggagcctcagcagaattgtgcagccacccagtgtaagcatggtgctgtgtacgatacctgtggtccgggatgtatcaagacctgtgacaactggaatgaaattggtccatgcaacaagccgtgcgttgctgggtgccactgtccagcaaacttggtccttcacaagggaaggtgcatcaagccagtcctttgtccccagcggtgacctttgtttcgatccttaagactctgaaatctggtgactttgacactgaagcggaagagccaatgaaggactgcagtatttgtgtgcccgattctgtaaacacacacacacagagtatatatgtgtatatatatatatagatatattcaaaaacattgcatcatttatatgaactatagggggattattatatgtatattttttgctataagacatgtattgtttctaggatcctaacctgtaagccattgaacatgttgtataaatacaccaggtgtttttaatttaataaggtggcatgcagatacattggatagtgttaacatcacatacatttgtcatttttaaggaagttttctaagagccctcaattgcctgcctgtattaattttagttttgagtcaggatttgtaatggagtgggaaatgtgtttctctggagaagggcacatttatctaggggcatttcaggtttccaaagaaaggaatgtatgcctgggaaagacagcaggagattggtgaccggccctaatggtgcatgaaaagcgagtgataggctgttagaatgtattaggtcatgggctaacattatttccaaaattgattggctggttgccaagaaatatatatttgtcactagggcataaccgaagaatcaagtgatttcttgccatccttgcgtagtcctcaagtcttctaatcatctatgtgtgtatgatggatgtgaccatttatatgtcatgtgttgaaattaaagggtgtctggatgccatgttaattttattgagcatgagaaagtatttgaagaaactgttgcacaacatatgatgaaattttgatttctctgaatctcagagtaatttaagatgggcaaatccaatgagttgatgtaaccaatctacattttgtggctatttcatgtataaaatgaaaggctttagttatttctagaggagtcccatccaacactatttggcgactgttaatatgttataattattagacagtggaaaagcctttattgactaattgatttaacctcagtccaaagaacagtctctatacttgccctcatttactgataggctgctactagttaccatttgattgtcttgactttcgtcttcagttgaattggtgaaaacatcaacaaaaacaaaacccactgtgtcttaaaataaaatgttctgcattgtagtcaataaagggcttaagatgtaaaacaatgcattttctctctcaagatgtcctgtgttatactttacaattagttgtatcaacttcagattcattaaattttaacagctgtatttagttataatttttgtatcttacaacagtatatataaagactattattaatagacaaaagcaaacccacgtttttgacaagccagcatattgccaatgctcgtcaaagacatttatgtttcttttacattcatgacagctaaagtattaacttggaatttttttttttttttttgactggaaaatccctagttgtttgaattaactgaataaagtgcagggcgtaatagtgactggctgggggcactgggcctttgtgttttttttcattcctgtgtttggatactaatcaccctcgtatctgcagcctgaggtagtcaggtcattgtttcaatgctgcccttggaaagaagactttgacttaggtgctttgggatctaagtgtggtttgtgactatccccattatttaagcatttgggggtctcacttttgcttatctgtaacacaaagaggccatgtagtatagtgagcagggttgagaatcgggaaaactagacccctgccactaacaggctaggagactttgggcagtaatgggaggcactgagggtttgcaaatactttcctacttgtaatctcattgattccctgctctgccctgacaggaggggtagggaaaatcagttgacgttgcctggtggttcctaccttctgtaaaacgaacagattccttaagattagctttaaatcccttttcagttcactgttggttctcatctttgaaagagggcagcataagggaaatgatggagaagggagaattgtggatggttatttatagctcatgattcatccaaggactgagttattctccccatgaggctaaccggcctctttcccaacacttaatcatggcagccaggatgggtgaatgatgaaagctcttctgcatgagccggtttcatcatcttgggtgggttgattacaagtttgtgtggcattcctttagctggggattagcttaatctctgtacatttttctcatttctaattgaagaagaaagggagggcagagaggacagaaaattacttgggtttactaattcaaagagccatctctgatgggagagggtgaggaaatcagctgaatggttggcctgcatattcttttttaggccacaggctacagctgagcaatggcttagtctaatgattgggcacaatgaggatttaccaagtgcttcaatgagagcagtcctgtttcattcacatgggatgttttcaattggttcttcaactaagctcttgcagagtgagatgacttgaaataaaaatgttctatgaatattg

SEQ ID NO: 839 - protein, 685 aa, Homo sapiens
MLWFSGVGALAERYCRRSPGITCCVLLLLNCSGVPMSLASSFLTGSVAKCENEGEVLQIPFITDNPCIMCVCLNKEVTCKREKCPVLSRDCALAIKQRGACCEQCKGCTYEGNTYNSSFKWQSPAEPCVLRQCQEGVVTESGVRCVVHCKNPLEHLGMCCPTCPGCVFEGVQYQEGEEFQPEGSKCTKCSCTGGRTQCVREVCPILSCPQHLSHIPPGQCCPKCLGQRKVFDLPFGSCLFRSDVYDNGSSFLYDNCTACTCRDSTVVCKRKCSHPGGCDQGQEGCCEECLLRVPPEDIKVCKFGNKIFQDGEMWSSINCTICACVKGRTECRNKQCIPISSCPQGKILNRKGCCPICTEKPGVCTVFGDPHYNTFDGRTFNFQGTCQYVLTKDCSSPASPFQVLVKNDARRTRSFSWTKSVELVLGESRVSLQQHLTVRWNGSRIALPCRAPHFHIDLDGYLLKVTTKAGLEISWDGDSFVEVMAAPHLKGKLCGLCGNYNGHKRDDLIGGDGNFKFDVDDFAESWRVESNEFCNRPQRKPVPELCQGTVKVKLRAHRECQKLKSWEFQTCHSTVDYATFYRSCVTDMCECPVHKNCYCESFLAYTRACQREGIKVHWEPQQNCAATQCKHGAVYDTCGPGCIKTCDNWNEIGPCNKPCVAGCHCPANLVLHKGRCIKPVLCPQR

SEQ ID NO: 840 - DNA, 6839 bp, Homo sapiens
ggggatgcaagcgggaggataaagcgatgaagtgtgctgcgttaccgcgcatcaggcgctgttgttggagccggaacaccgtgcgactctgaccgaaccggccccctcctcgcgcacacactcgccgagccgcgcgcgcccctccgccgtgacagtggccgtggcctccgctctctcggggcacccggcagccagagcgcagcgagagcgggcggtcgccagggtcccctccccagccagtcccaggcgcccggtgcactatgcggggcacgtgcgccccccagctctaatctgcgcgctgacaggagcatgatctgtgcccaggccagggctgccaagatatcaatgctatgttcagcagaaacggatacagcaagagcagcatagttcaaaaattgagggaggcatcttctctcttttcctgggatttaaacgcgatttaggagggcagatgccctacccgaaaaggccaaccgttaaagaccccggcagtgttgtggtccaaggcgtctcaaagcaggtggccagatctgcgtttctcatcagcagactcactccggctgtggctattacggaattgatgcgcgtacacgtggtgggtcattatgctgctgcacctgtgtagtgtgaagaatctgtaccagaacaggtttttaggcctggccgccatggcgtctccttctagaaactcccagagccgacgccggtgcaaggagccgctccgatacagctacaaccccgaccagttccacaacatggacctcaggggcggcccccacgatggcgtcaccattccccgctccaccagcgacactgacctggtcacctcggacagccgctccacgctcatggtcagcagctcctactattccatcgggcactctcaggacctggtcatccactgggacataaaggaggaagtggacgctggggactggattggcatgtacctcattgatgaggtcttgtccgaaaactttctggactataaaaaccgtggagtcaatggttctcatcggggccagatcatctggaagatcgatgccagctcgtactttgtggaacctgaaactaagatctgcttcaaatactaccatggagtgagtggggccctgcgagcaaccacccccagtgtcacggtcaaaaactcggcagctcctatttttaaaagcattggtgctgatgagaccgtccaaggacaaggaagtcggaggctgatcagcttctctctctcagatttccaagccatggggttgaagaaagggatgtttttcaacccagacccttatctgaagatttccattcagcctgggaaacacagcatcttccccgccctccctcaccatggacaggagaggagatccaagatcataggcaacaccgtgaaccccatctggcaggccgagcaattcagttttgtgtccttgcccactgacgtgctggaaattgaggtgaaggacaagtttgccaagagccgccccatcatcaagcgcttcttgggaaagctgtcgatgcccgttcaaagactcctggagagacacgccataggggatagggtggtcagctacacacttggccgcaggcttccaacagatcatgtgagtggacagctgcaattccgatttgagatcacttcctccatccacccagatgatgaggagatttccctgagtaccgagcctgagtcagcccaaattcaggacagccccatgaacaacctgatggaaagcggcagtggggaacctcggtctgaggcaccagagtcctctgagagctggaagccagagcagctgggtgagggcagtgtccccgatggtccagggaaccaaagcatagagctttccagaccagctgaggaagcagcagtcatcacggaggcaggagaccagggcatggtctctgtgggacctgaaggggctggggagctcctggcccaggtgcaaaaggacatccagcctgcccccagtgcagaagagctggccgagcagctggacctgggtgaggaggcatcagcactgctgctggaagacggtgaagccccagccagcaccaaggaggagcccttggaggaggaagcaacgacccagagccgggctggaagggaagaagaggagaaggagcaggaggaggagggagatgtgtctaccctggagcagggagagggcaggctgcagctgcgggcctcggtgaagagaaaaagcaggccctgctccttgcctgtgtccgagctggagacggtgatcgcgtcagcctgcggggaccccgagaccccgcggacacactacatccgcatccacaccctgctgcacagcatgccctccgcccagggcggcagcgcggcagaggaggaggacggcgcggaggaggagtccaccctcaaggactcctcggagaaggatgggctcagcgaggtggacacggtggccgctgacccgtctgccctggaagaggacagagaagagcccgagggggctactccaggcacggcgcaccctggccactccgggggccacttccccagcctggccaatggcgcggcccaggatggcgacacgcaccccagcaccgggagcgagagcgactccagccccaggcaaggcggggaccacagttgcgagggctgtgacgcgtcctgctgcagcccctcgtgctacagctcctcgtgctacagcacgtcctgctacagcagctcgtgctacagcgcctcgtgctacagcccctcctgctacaacggcaacaggttcgccagccacacgcgcttctcctccgtggacagcgccaagatctccgagagcacggtcttctcctcgcaagacgacgaggaggaggagaacagcgcgttcgagtcggtacccgactccatgcagagccctgagctggacccggagtccacgaacggcgctgggccgtggcaagacgagctggccgcccctagcgggcacgtggaaagaagcccggaaggtctggaatcccccgtggcaggtccaagcaatcggagagaaggtgaatgtcctatactccataattcccagccagtaagccagcttccttccctgaggcctgaacatcatcactacccaacaatcgatgagcctcttccaccaaactgggaagctcgaattgacagccacgggcgggtcttttatgtggaccacgtgaaccgcacaaccacctggcagcgtccgacggcagcagccaccccggatggcatgcggagatcggggtccatccagcagatggagcaactcaacaggcggtatcaaaacattcagcgaaccattgcaacagagaggtccgaagaagattctggcagccaaagctgcgagcaagccccagcaggaggaggcggaggtggagggagtgactcagaagccgaatcttcccagtccagcttagatctaaggagagaggggtcactttctccagtgaactcacaaaaaatcaccttgctgctgcagtccccagcggtcaagttcatcaccaaccccgagttcttcactgtgctacatgccaattatagtgcctaccgagtcttcaccagtagcacctgcttaaagcacatgattctgaaagtccgacgggatgctcgcaattttgaacgctaccagcacaaccgggacttggtgaatttcatcaacatgttcgcagacactcggctggaactgccccggggctgggagatcaaaacggaccagcagggaaagtcttttttcgtggaccacaacagtcgagctaccactttcattgacccccgaatccctcttcagaacggtcgtcttcccaatcatctaactcaccgacagcacctccagaggctccgaagttacagcgctggagaggcctcagaagtttctagaaacagaggagcctctttactggccaggccaggacacagcttagtagctgctattcgaagccaacatcaacatgagtcattgccactggcatataatgacaagattgtggcatttcttcgccagccaaacatttttgaaatgctgcaagagcgtcagccaagcttagcaagaaaccacacactcagggagaaaatccattacattcggactgagggtaatcacgggcttgagaagttgtcctgtgatgcggatctggtcattttgctgagtctctttgaagaagagattatgtcctacgtccccctgcaggctgccttccaccctgggtatagcttctctccccgatgttcaccctgttcttcacctcagaactccccaggtttacagagagccagtgcaagagccccttccccctaccgaagagactttgaggccaagctccgcaatttctacagaaaactggaagccaaaggatttggtcagggtccggggaaaattaagctcattattcgccgggatcatttgttggagggaaccttcaatcaggtgatggcctattcgcggaaagagctccagcgaaacaagctctacgtcacctttgttggagaggagggcctggactacagtggcccctcgcgggagttcttcttccttctgtctcaggagctcttcaacccttactatggactctttgagtactcggcaaatgatacttacacggtgcagatcagccccatgtccgcatttgtagaaaaccatcttgagtggttcaggtttagcggtcgcatcctgggtctggctctgatccatcagtaccttcttgacgctttcttcacgaggcccttctacaaggcactcctgagactgccctgtgatttgagtgacctggaatatttggatgaggaattccaccagagtttgcagtggatgaaggacaacaacatcacagacatcttagacctcactttcactgttaatgaagaggtttttggacaggtcacggaaagggagttgaagtctggaggagccaacacacaggtgacggagaaaaacaagaaggagtacatcgagcgcatggtgaagtggcgggtggagcgcggcgtggtacagcagaccgaggcgctggtgcgcggcttctacgaggttgtagactcgaggctggtgtccgtgtttgatgccagggagctggagctggtgatagctggcaccgcggaaatcgacctaaatgactggcggaataacactgagtaccggggaggttaccacgatgggcatcttgtgatccgctggttctgggctgcggtggagcgcttcaataatgagcagaggctgagattactgcagtttgtcacgggaacatccagcgtgccctacgaaggcttcgcagccctccgtgggagcaatgggcttcggcgcttctgcatagagaaatgggggaaaattacttctctccccagggcacacacatgcttcaaccgactggatcttccaccgtatccctcgtactccatgttgtatgaaaagctgttaacagcagtagaggaaaccagcacctttggacttgagtgaggacatggaacctcgcctgacattttcctggccagtgacatcacccttcctgggatgatccccttttccctttcccttaatcaactctcctttgattttggtattccatgatttttattttcaaaccaaatcaggattgacaaaagctgtgcatgaagaactgccttcttctaagatctaaccttcaggcttctctcctctgttttcaatgaactgctagcctgtatgcaatattaaaaaacagctgtctcaaggtctgtgtatatctccacatacctccattactaacaatgaaatatgaatgcaagttaagctacacttgaccaaatggtaataaatgtttacttccatttctatcattgaagggaaaatgtgagcattaagcactccaggctttcatatgcccatgtcttctgagcagagccaccattttttataatttctaataaccaactccagaactaggagctgatcaactctttgttttcctctccatctacttttccctgtgcataatatccatccaaaggacaacagtggcaaagctgaaatttttatacattcaactcatgattcacatgtggcatcagtcccatcagccggaactagcctagacatacggtgcaaatatgacacttctaacgattaacaacagcaagaaaacacctgctgctgatgcaatgcaatgcatcccaatggttgtggggattgtgggctcaactcaagagaagtttaggagggggagcatccctagtgaatactcacaccacaagaaggacaaacttgtgcacatgtccaagaaagaaagcttcttgattgaggtagcatgaaggatgaggcttcagcccccattgtcttatgtagaatgtggcaatgccaactggagaaagggaagaaggacatattaccttggtttgaatccctgagttctgtactgttctgttttgtttagtctagccacagttcttcacaaaggaaaaaaaaatgtgtagatgataccatgacttttgttaaagccatgacttttgtttgcttggcagacaaaccctttttttaaaactttgatatttttttttcacatttttttttccttttcctttcttaatcatggagttcaagttcctttgcattcgattgtccatcgggaccacactaggaagctgcagagagtgatggtgcttgttagggatcaagggcaacatagtacttctccttcacccatagtaatcctcctggggcagaaacataacaccccaaaggcacgttgatttgtatcaaaataaatatccagtttcttttagcattcagtgaaaacatatctcagaaaacttcatgttgtcagaaaaacagctgcaggctccaaagacagcctaacctctcaactacatttgaaataaacccaaccataatggt

SEQ ID NO: 841 - protein, 1606 aa, Homo sapiens
MLLHLCSVKNLYQNRFLGLAAMASPSRNSQSRRRCKEPLRYSYNPDQFHNMDLRGGPHDGVTIPRSTSDTDLVTSDSRSTLMVSSSYYSIGHSQDLVIHWDIKEEVDAGDWIGMYLIDEVLSENFLDYKNRGVNGSHRGQIIWKIDASSYFVEPETKICFKYYHGVSGALRATTPSVTVKNSAAPIFKSIGADETVQGQGSRRLISFSLSDFQAMGLKKGMFFNPDPYLKISIQPGKHSIFPALPHHGQERRSKIIGNTVNPIWQAEQFSFVSLPTDVLEIEVKDKFAKSRPIIKRFLGKLSMPVQRLLERHAIGDRVVSYTLGRRLPTDHVSGQLQFRFEITSSIHPDDEEISLSTEPESAQIQDSPMNNLMESGSGEPRSEAPESSESWKPEQLGEGSVPDGPGNQSIELSRPAEEAAVITEAGDQGMVSVGPEGAGELLAQVQKDIQPAPSAEELAEQLDLGEEASALLLEDGEAPASTKEEPLEEEATTQSRAGREEEEKEQEEEGDVSTLEQGEGRLQLRASVKRKSRPCSLPVSELETVIASACGDPETPRTHYIRIHTLLHSMPSAQGGSAAEEEDGAEEESTLKDSSEKDGLSEVDTVAADPSALEEDREEPEGATPGTAHPGHSGGHFPSLANGAAQDGDTHPSTGSESDSSPRQGGDHSCEGCDASCCSPSCYSSSCYSTSCYSSSCYSASCYSPSCYNGNRFASHTRFSSVDSAKISESTVFSSQDDEEEENSAFESVPDSMQSPELDPESTNGAGPWQDELAAPSGHVERSPEGLESPVAGPSNRREGECPILHNSQPVSQLPSLRPEHHHYPTIDEPLPPNWEARIDSHGRVFYVDHVNRTTTWQRPTAAATPDGMRRSGSIQQMEQLNRRYQNIQRTIATERSEEDSGSQSCEQAPAGGGGGGGSDSEAESSQSSLDLRREGSLSPVNSQKITLLLQSPAVKFITNPEFFTVLHANYSAYRVFTSSTCLKHMILKVRRDARNFERYQHNRDLVNFINMFADTRLELPRGWEIKTDQQGKSFFVDHNSRATTFIDPRIPLQNGRLPNHLTHRQHLQRLRSYSAGEASEVSRNRGASLLARPGHSLVAAIRSQHQHESLPLAYNDKIVAFLRQPNIFEMLQERQPSLARNHTLREKIHYIRTEGNHGLEKLSCDADLVILLSLFEEEIMSYVPLQAAFHPGYSFSPRCSPCSSPQNSPGLQRASARAPSPYRRDFEAKLRNFYRKLEAKGFGQGPGKIKLIIRRDHLLEGTFNQVMAYSRKELQRNKLYVTFVGEEGLDYSGPSREFFFLLSQELFNPYYGLFEYSANDTYTVQISPMSAFVENHLEWFRFSGRILGLALIHQYLLDAFFTRPFYKALLRLPCDLSDLEYLDEEFHQSLQWMKDNNITDILDLTFTVNEEVFGQVTERELKSGGANTQVTEKNKKEYIERMVKWRVERGVVQQTEALVRGFYEVVDSRLVSVFDARELELVIAGTAEIDLNDWRNNTEYRGGYHDGHLVIRWFWAAVERFNNEQRLRLLQFVTGTSSVPYEGFAALRGSNGLRRFCIEKWGKITSLPRAHTCFNRLDLPPYPSYSMLYEKLLTAVEETSTFGLE

SEQ ID NO: 842 - DNA, 1286 bp, Homo sapiens
cgccgcgagcccggcgaagtcctcagcccgccccgcttgcccactccccacttcccgagccggctccgtgtttagggagggcagtgatcacgcaagccggagcggcgggctgacgttggacgagctgccaggtagctgaaagcaggcagccaggcagccgagacacttcccagcgattccagcctgggctccgcaggaagcctcgctgaatcccagccagctggttctaaccttccagaatcgcaatcccttctccccacagccagccctcgccaagcaagcagcaggatgtttgcagtgtcgcgcccagggctctgagactgagcctgccatccactcgcacgcctttctttcagggcttttcggctgttggctacactgatgtgacccccctccctttttggaatgatggggatctttttggtgtatgttggatttgttttcttttccgttttatatgtacaacaagggctttcttctcaagcaaaatttaccgagtttccgcggaacgtgacggcgaccgaggggcagaatgtggagatgtcctgcgccttccagagcggctccgcctcggtgtatctggagatccaatggtggttcctgcgggggccggaggacctggatcccggggccgagggggccggcgcgcaggtggagctcttgcccgacagagacccggacagcgacgggaccaagatcagcacagtgaaagtccaaggcaatgacatctcccacaagcttcagatttccaaagtgaggaaaaaggatgaaggcttatatgagtgcagggtgactgatgccaactacggggagcttcaggaacacaaggcccaggcctatctgaaagtcaatgccaacagccatgcccgcagaatgcaggccttcgaagcctcgcccatgtggctgcaggatatgaagccccgcaagaacgtctccgcagccatccccagcagcatccatggctctgccaaccaacgaacgcactccacctccagccctcaagtggtagccaaaatccccaaacaaagtccacaatcaggtgcgaggatagctacaagccatggactttctgtcctgcttcttgtttgtggctttgtgaagggtgctttgctttaatctaaagtgctgacttttttccaatatcactttctcttcttaaagcaaagagcaaatcgcctgtaaaatctacggagcggacagcaaagttgaccctaaactccaagcaccaccctgcacccactgtactctaattcactacacaaggagcgcctgcttccggaagcata

SEQ ID NO: 843 - protein, 236 aa, Homo sapiens
MMGIFLVYVGFVFFSVLYVQQGLSSQAKFTEFPRNVTATEGQNVEMSCAFQSGSASVYLEIQWWFLRGPEDLDPGAEGAGAQVELLPDRDPDSDGTKISTVKVQGNDISHKLQISKVRKKDEGLYECRVTDANYGELQEHKAQAYLKVNANSHARRMQAFEASPMWLQDMKPRKNVSAAIPSSIHGSANQRTHSTSSPQVVAKIPKQSPQSGARIATSHGLSVLLLVCGFVKGALL

SEQ ID NO: 844 - DNA, 5616 bp, Homo sapiens
ccccggcgcagcgcggccgcagcagcctccgccccccgcacggtgtgagcgcccgacgcggccgaggcggccggagtcccgagctagccccggcggccgccgccgcccagaccggacgacaggccacctcgtcggcgtccgcccgagtccccgcctcgccgccaacgccacaaccaccgcgcacggccccctgactccgtccagtattgatcgggagagccggagcgagctcttcggggagcagcgatgcgaccctccgggacggccggggcagcgctcctggcgctgctggctgcgctctgcccggcgagtcgggctctggaggaaaagaaagtttgccaaggcacgagtaacaagctcacgcagttgggcacttttgaagatcattttctcagcctccagaggatgttcaataactgtgaggtggtccttgggaatttggaaattacctatgtgcagaggaattatgatctttccttcttaaagaccatccaggaggtggctggttatgtcctcattgccctcaacacagtggagcgaattcctttggaaaacctgcagatcatcagaggaaatatgtactacgaaaattcctatgccttagcagtcttatctaactatgatgcaaataaaaccggactgaaggagctgcccatgagaaatttacaggaaatcctgcatggcgccgtgcggttcagcaacaaccctgccctgtgcaacgtggagagcatccagtggcgggacatagtcagcagtgactttctcagcaacatgtcgatggacttccagaaccacctgggcagctgccaaaagtgtgatccaagctgtcccaatgggagctgctggggtgcaggagaggagaactgccagaaactgaccaaaatcatctgtgcccagcagtgctccgggcgctgccgtggcaagtcccccagtgactgctgccacaaccagtgtgctgcaggctgcacaggcccccgggagagcgactgcctggtctgccgcaaattccgagacgaagccacgtgcaaggacacctgccccccactcatgctctacaaccccaccacgtaccagatggatgtgaaccccgagggcaaatacagctttggtgccacctgcgtgaagaagtgtccccgtaattatgtggtgacagatcacggctcgtgcgtccgagcctgtggggccgacagctatgagatggaggaagacggcgtccgcaagtgtaagaagtgcgaagggccttgccgcaaagtgtgtaacggaataggtattggtgaatttaaagactcactctccataaatgctacgaatattaaacacttcaaaaactgcacctccatcagtggcgatctccacatcctgccggtggcatttaggggtgactccttcacacatactcctcctctggatccacaggaactggatattctgaaaaccgtaaaggaaatcacagggtttttgctgattcaggcttggcctgaaaacaggacggacctccatgcctttgagaacctagaaatcatacgcggcaggaccaagcaacatggtcagttttctcttgcagtcgtcagcctgaacataacatccttgggattacgctccctcaaggagataagtgatggagatgtgataatttcaggaaacaaaaatttgtgctatgcaaatacaataaactggaaaaaactgtttgggacctccggtcagaaaaccaaaattataagcaacagaggtgaaaacagctgcaaggccacaggccaggtctgccatgccttgtgctcccccgagggctgctggggcccggagcccagggactgcgtctcttgccggaatgtcagccgaggcagggaatgcgtggacaagtgcaaccttctggagggtgagccaagggagtttgtggagaactctgagtgcatacagtgccacccagagtgcctgcctcaggccatgaacatcacctgcacaggacggggaccagacaactgtatccagtgtgcccactacattgacggcccccactgcgtcaagacctgcccggcaggagtcatgggagaaaacaacaccctggtctggaagtacgcagacgccggccatgtgtgccacctgtgccatccaaactgcacctacggatgcactgggccaggtcttgaaggctgtccaacgaatgggcctaagatcccgtccatcgccactgggatggtgggggccctcctcttgctgctggtggtggccctggggatcggcctcttcatgcgaaggcgccacatcgttcggaagcgcacgctgcggaggctgctgcaggagagggagcttgtggagcctcttacacccagtggagaagctcccaaccaagctctcttgaggatcttgaaggaaactgaattcaaaaagatcaaagtgctgggctccggtgcgttcggcacggtgtataagggactctggatcccagaaggtgagaaagttaaaattcccgtcgctatcaaggaattaagagaagcaacatctccgaaagccaacaaggaaatcctcgatgaagcctacgtgatggccagcgtggacaacccccacgtgtgccgcctgctgggcatctgcctcacctccaccgtgcagctcatcacgcagctcatgcccttcggctgcctcctggactatgtccgggaacacaaagacaatattggctcccagtacctgctcaactggtgtgtgcagatcgcaaagggcatgaactacttggaggaccgtcgcttggtgcaccgcgacctggcagccaggaacgtactggtgaaaacaccgcagcatgtcaagatcacagattttgggctggccaaactgctgggtgcggaagagaaagaataccatgcagaaggaggcaaagtgcctatcaagtggatggcattggaatcaattttacacagaatctatacccaccagagtgatgtctggagctacggggtgaccgtttgggagttgatgacctttggatccaagccatatgacggaatccctgccagcgagatctcctccatcctggagaaaggagaacgcctccctcagccacccatatgtaccatcgatgtctacatgatcatggtcaagtgctggatgatagacgcagatagtcgcccaaagttccgtgagttgatcatcgaattctccaaaatggcccgagacccccagcgctaccttgtcattcagggggatgaaagaatgcatttgccaagtcctacagactccaacttctaccgtgccctgatggatgaagaagacatggacgacgtggtggatgccgacgagtacctcatcccacagcagggcttcttcagcagcccctccacgtcacggactcccctcctgagctctctgagtgcaaccagcaacaattccaccgtggcttgcattgatagaaatgggctgcaaagctgtcccatcaaggaagacagcttcttgcagcgatacagctcagaccccacaggcgccttgactgaggacagcatagacgacaccttcctcccagtgcctgaatacataaaccagtccgttcccaaaaggcccgctggctctgtgcagaatcctgtctatcacaatcagcctctgaaccccgcgcccagcagagacccacactaccaggacccccacagcactgcagtgggcaaccccgagtatctcaacactgtccagcccacctgtgtcaacagcacattcgacagccctgcccactgggcccagaaaggcagccaccaaattagcctggacaaccctgactaccagcaggacttctttcccaaggaagccaagccaaatggcatctttaagggctccacagctgaaaatgcagaatacctaagggtcgcgccacaaagcagtgaatttattggagcatgaccacggaggatagtatgagccctaaaaatccagactctttcgatacccaggaccaagccacagcaggtcctccatcccaacagccatgcccgcattagctcttagacccacagactggttttgcaacgtttacaccgactagccaggaagtacttccacctcgggcacattttgggaagttgcattcctttgtcttcaaactgtgaagcatttacagaaacgcatccagcaagaatattgtccctttgagcagaaatttatctttcaaagaggtatatttgaaaaaaaaaaaaagtatatgtgaggatttttattgattggggatcttggagtttttcattgtcgctattgatttttacttcaatgggctcttccaacaaggaagaagcttgctggtagcacttgctaccctgagttcatccaggcccaactgtgagcaaggagcacaagccacaagtcttccagaggatgcttgattccagtggttctgcttcaaggcttccactgcaaaacactaaagatccaagaaggccttcatggccccagcaggccggatcggtactgtatcaagtcatggcaggtacagtaggataagccactctgtcccttcctgggcaaagaagaaacggaggggatggaattcttccttagacttacttttgtaaaaatgtccccacggtacttactccccactgatggaccagtggtttccagtcatgagcgttagactgacttgtttgtcttccattccattgttttgaaactcagtatgctgcccctgtcttgctgtcatgaaatcagcaagagaggatgacacatcaaataataactcggattccagcccacattggattcatcagcatttggaccaatagcccacagctgagaatgtggaatacctaaggatagcaccgcttttgttctcgcaaaaacgtatctcctaatttgaggctcagatgaaatgcatcaggtcctttggggcatagatcagaagactacaaaaatgaagctgctctgaaatctcctttagccatcaccccaaccccccaaaattagtttgtgttacttatggaagatagttttctccttttacttcacttcaaaagctttttactcaaagagtatatgttccctccaggtcagctgcccccaaaccccctccttacgctttgtcacacaaaaagtgtctctgccttgagtcatctattcaagcacttacagctctggccacaacagggcattttacaggtgcgaatgacagtagcattatgagtagtgtggaattcaggtagtaaatatgaaactagggtttgaaattgataatgctttcacaacatttgcagatgttttagaaggaaaaaagttccttcctaaaataatttctctacaattggaagattggaagattcagctagttaggagcccaccttttttcctaatctgtgtgtgccctgtaacctgactggttaacagcagtcctttgtaaacagtgttttaaactctcctagtcaatatccaccccatccaatttatcaaggaagaaatggttcagaaaatattttcagcctacagttatgttcagtcacacacacatacaaaatgttccttttgcttttaaagtaatttttgactcccagatcagtcagagcccctacagcattgttaagaaagtatttgatttttgtctcaatgaaaataaaactatattcatttccactctaaaaaaaaaaaaaaaaa

SEQ ID NO: 845 - protein, 1210 aa, Homo sapiens [sequence omitted]

SEQ ID NO: 846 - DNA, 2239 bp, Homo sapiens
ccccggcgcagcgcggccgcagcagcctccgccccccgcacggtgtgagcgcccgacgcggccgaggcggccggagtcccgagctagccccggcggccgccgccgcccagaccggacgacaggccacctcgtcggcgtccgcccgagtccccgcctcgccgccaacgccacaaccaccgcgcacggccccctgactccgtccagtattgatcgggagagccggagcgagctcttcggggagcagcgatgcgaccctccgggacggccggggcagcgctcctggcgctgctggctgcgctctgcccggcgagtcgggctctggaggaaaagaaagtttgccaaggcacgagtaacaagctcacgcagttgggcacttttgaagatcattttctcagcctccagaggatgttcaataactgtgaggtggtccttgggaatttggaaattacctatgtgcagaggaattatgatctttccttcttaaagaccatccaggaggtggctggttatgtcctcattgccctcaacacagtggagcgaattcctttggaaaacctgcagatcatcagaggaaatatgtactacgaaaattcctatgccttagcagtcttatctaactatgatgcaaataaaaccggactgaaggagctgcccatgagaaatttacaggaaatcctgcatggcgccgtgcggttcagcaacaaccctgccctgtgcaacgtggagagcatccagtggcgggacatagtcagcagtgactttctcagcaacatgtcgatggacttccagaaccacctgggcagctgccaaaagtgtgatccaagctgtcccaatgggagctgctggggtgcaggagaggagaactgccagaaactgaccaaaatcatctgtgcccagcagtgctccgggcgctgccgtggcaagtcccccagtgactgctgccacaaccagtgtgctgcaggctgcacaggcccccgggagagcgactgcctggtctgccgcaaattccgagacgaagccacgtgcaaggacacctgccccccactcatgctctacaaccccaccacgtaccagatggatgtgaaccccgagggcaaatacagctttggtgccacctgcgtgaagaagtgtccccgtaattatgtggtgacagatcacggctcgtgcgtccgagcctgtggggccgacagctatgagatggaggaagacggcgtccgcaagtgtaagaagtgcgaagggccttgccgcaaagtgtgtaacggaataggtattggtgaatttaaagactcactctccataaatgctacgaatattaaacacttcaaaaactgcacctccatcagtggcgatctccacatcctgccggtggcatttaggggtgactccttcacacatactcctcctctggatccacaggaactggatattctgaaaaccgtaaaggaaatcacagggtttttgctgattcaggcttggcctgaaaacaggacggacctccatgcctttgagaacctagaaatcatacgcggcaggaccaagcaacatggtcagttttctcttgcagtcgtcagcctgaacataacatccttgggattacgctccctcaaggagataagtgatggagatgtgataatttcaggaaacaaaaatttgtgctatgcaaatacaataaactggaaaaaactgtttgggacctccggtcagaaaaccaaaattataagcaacagaggtgaaaacagctgcaaggccacaggccaggtctgccatgccttgtgctcccccgagggctgctggggcccggagcccagggactgcgtctcttgccggaatgtcagccgaggcagggaatgcgtggacaagtgcaaccttctggagggtgagccaagggagtttgtggagaactctgagtgcatacagtgccacccagagtgcctgcctcaggccatgaacatcacctgcacaggacggggaccagacaactgtatccagtgtgcccactacattgacggcccccactgcgtcaagacctgcccggcaggagtcatgggagaaaacaacaccctggtctggaagtacgcagacgccggccatgtgtgccacctgtgccatccaaactgcacctacgggtcctaataaatcttcactgtctgactttagtctcccactaaaactgcatttcctttctacaatttcaatttctccctttgcttcaaataaagtcctgacactattcatttga

SEQ ID NO: 847 - protein, 628 aa, Homo sapiens
MRPSGTAGAALLALLAALCPASRALEEKKVCQGTSNKLTQLGTFEDHFLSLQRMFNNCEVVLGNLEITYVQRNYDLSFLKTIQEVAGYVLIALNTVERIPLENLQIIRGNMYYENSYALAVLSNYDANKTGLKELPMRNLQEILHGAVRFSNNPALCNVESIQWRDIVSSDFLSNMSMDFQNHLGSCQKCDPSCPNGSCWGAGEENCQKLTKIICAQQCSGRCRGKSPSDCCHNQCAAGCTGPRESDCLVCRKFRDEATCKDTCPPLMLYNPTTYQMDVNPEGKYSFGATCVKKCPRNYVVTDHGSCVRACGADSYEMEEDGVRKCKKCEGPCRKVCNGIGIGEFKDSLSINATNIKHFKNCTSISGDLHILPVAFRGDSFTHTPPLDPQELDILKTVKEITGFLLIQAWPENRTDLHAFENLEIIRGRTKQHGQFSLAVVSLNITSLGLRSLKEISDGDVIISGNKNLCYANTINWKKLFGTSGQKTKIISNRGENSCKATGQVCHALCSPEGCWGPEPRDCVSCRNVSRGRECVDKCNLLEGEPREFVENSECIQCHPECLPQAMNITCTGRGPDNCIQCAHYIDGPHCVKTCPAGVMGENNTLVWKYADAGHVCHLCHPNCTYGS

SEQ ID NO: 848 - DNA, 1595 bp, Homo sapiens
ccccggcgcagcgcggccgcagcagcctccgccccccgcacggtgtgagcgcccgacgcggccgaggcggccggagtcccgagctagccccggcggccgccgccgcccagaccggacgacaggccacctcgtcggcgtccgcccgagtccccgcctcgccgccaacgccacaaccaccgcgcacggccccctgactccgtccagtattgatcgggagagccggagcgagctcttcggggagcagcgatgcgaccctccgggacggccggggcagcgctcctggcgctgctggctgcgctctgcccggcgagtcgggctctggaggaaaagaaagtttgccaaggcacgagtaacaagctcacgcagttgggcacttttgaagatcattttctcagcctccagaggatgttcaataactgtgaggtggtccttgggaatttggaaattacctatgtgcagaggaattatgatctttccttcttaaagaccatccaggaggtggctggttatgtcctcattgccctcaacacagtggagcgaattcctttggaaaacctgcagatcatcagaggaaatatgtactacgaaaattcctatgccttagcagtcttatctaactatgatgcaaataaaaccggactgaaggagctgcccatgagaaatttacaggaaatcctgcatggcgccgtgcggttcagcaacaaccctgccctgtgcaacgtggagagcatccagtggcgggacatagtcagcagtgactttctcagcaacatgtcgatggacttccagaaccacctgggcagctgccaaaagtgtgatccaagctgtcccaatgggagctgctggggtgcaggagaggagaactgccagaaactgaccaaaatcatctgtgcccagcagtgctccgggcgctgccgtggcaagtcccccagtgactgctgccacaaccagtgtgctgcaggctgcacaggcccccgggagagcgactgcctggtctgccgcaaattccgagacgaagccacgtgcaaggacacctgccccccactcatgctctacaaccccaccacgtaccagatggatgtgaaccccgagggcaaatacagctttggtgccacctgcgtgaagaagtgtccccgtaattatgtggtgacagatcacggctcgtgcgtccgagcctgtggggccgacagctatgagatggaggaagacggcgtccgcaagtgtaagaagtgcgaagggccttgccgcaaagtgtgtaacggaataggtattggtgaatttaaagactcactctccataaatgctacgaatattaaacacttcaaaaactgcacctccatcagtggcgatctccacatcctgccggtggcatttaggggtgactccttcacacatactcctcctctggatccacaggaactggatattctgaaaaccgtaaaggaaatcacaggtttgagctgaattatcacatgaatataaatgggaaatcagtgttttagagagagaacttttcgacatatttcctgttcccttggaataaaaacatttcttctgaaattttaccgttaaaaaaaaaaaaaaaaaaaaaaaaa

SEQ ID NO: 849 - protein, 405 aa, Homo sapiens
MRPSGTAGAALLALLAALCPASRALEEKKVCQGTSNKLTQLGTFEDHFLSLQRMFNNCEVVLGNLEITYVQRNYDLSFLKTIQEVAGYVLIALNTVERIPLENLQIIRGNMYYENSYALAVLSNYDANKTGLKELPMRNLQEILHGAVRFSNNPALCNVESIQWRDIVSSDFLSNMSMDFQNHLGSCQKCDPSCPNGSCWGAGEENCQKLTKIICAQQCSGRCRGKSPSDCCHNQCAAGCTGPRESDCLVCRKFRDEATCKDTCPPLMLYNPTTYQMDVNPEGKYSFGATCVKKCPRNYVVTDHGSCVRACGADSYEMEEDGVRKCKKCEGPCRKVCNGIGIGEFKDSLSINATNIKHFKNCTSISGDLHILPVAFRGDSFTHTPPLDPQELDILKTVKEITGLS

SEQ ID NO: 850 - DNA, 2865 bp, Homo sapiens
ccccggcgcagcgcggccgcagcagcctccgccccccgcacggtgtgagcgcccgacgcggccgaggcggccggagtcccgagctagccccggcggccgccgccgcccagaccggacgacaggccacctcgtcggcgtccgcccgagtccccgcctcgccgccaacgccacaaccaccgcgcacggccccctgactccgtccagtattgatcgggagagccggagcgagctcttcggggagcagcgatgcgaccctccgggacggccggggcagcgctcctggcgctgctggctgcgctctgcccggcgagtcgggctctggaggaaaagaaagtttgccaaggcacgagtaacaagctcacgcagttgggcacttttgaagatcattttctcagcctccagaggatgttcaataactgtgaggtggtccttgggaatttggaaattacctatgtgcagaggaattatgatctttccttcttaaagaccatccaggaggtggctggttatgtcctcattgccctcaacacagtggagcgaattcctttggaaaacctgcagatcatcagaggaaatatgtactacgaaaattcctatgccttagcagtcttatctaactatgatgcaaataaaaccggactgaaggagctgcccatgagaaatttacaggaaatcctgcatggcgccgtgcggttcagcaacaaccctgccctgtgcaacgtggagagcatccagtggcgggacatagtcagcagtgactttctcagcaacatgtcgatggacttccagaaccacctgggcagctgccaaaagtgtgatccaagctgtcccaatgggagctgctggggtgcaggagaggagaactgccagaaactgaccaaaatcatctgtgcccagcagtgctccgggcgctgccgtggcaagtcccccagtgactgctgccacaaccagtgtgctgcaggctgcacaggcccccgggagagcgactgcctggtctgccgcaaattccgagacgaagccacgtgcaaggacacctgccccccactcatgctctacaaccccaccacgtaccagatggatgtgaaccccgagggcaaatacagctttggtgccacctgcgtgaagaagtgtccccgtaattatgtggtgacagatcacggctcgtgcgtccgagcctgtggggccgacagctatgagatggaggaagacggcgtccgcaagtgtaagaagtgcgaagggccttgccgcaaagtgtgtaacggaataggtattggtgaatttaaagactcactctccataaatgctacgaatattaaacacttcaaaaactgcacctccatcagtggcgatctccacatcctgccggtggcatttaggggtgactccttcacacatactcctcctctggatccacaggaactggatattctgaaaaccgtaaaggaaatcacagggtttttgctgattcaggcttggcctgaaaacaggacggacctccatgcctttgagaacctagaaatcatacgcggcaggaccaagcaacatggtcagttttctcttgcagtcgtcagcctgaacataacatccttgggattacgctccctcaaggagataagtgatggagatgtgataatttcaggaaacaaaaatttgtgctatgcaaatacaataaactggaaaaaactgtttgggacctccggtcagaaaaccaaaattataagcaacagaggtgaaaacagctgcaaggccacaggccaggtctgccatgccttgtgctcccccgagggctgctggggcccggagcccagggactgcgtctcttgccggaatgtcagccgaggcagggaatgcgtggacaagtgcaaccttctggagggtgagccaagggagtttgtggagaactctgagtgcatacagtgccacccagagtgcctgcctcaggccatgaacatcacctgcacaggacggggaccagacaactgtatccagtgtgcccactacattgacggcccccactgcgtcaagacctgcccggcaggagtcatgggagaaaacaacaccctggtctggaagtacgcagacgccggccatgtgtgccacctgtgccatccaaactgcacctacgggccaggaaatgagagtctcaaagccatgttattctgcctttttaaactatcatcctgtaatcaaagtaatgatggcagcgtgtcccaccagagcgggagcccagctgctcaggagtcatgcttaggatggatcccttctcttctgccgtcagagtttcagctgggttggggtggatgcagccacctccatgcctggccttctgcatctgtgatcatcacggcctcctcctgccactgagcctcatgccttcacgtgtctgttccccccgcttttcctttctgccacccctgcacgtgggccgccaggttcccaagagtatcctacccatttccttccttccactccctttgccagtgcctctcaccccaactagtagctaaccatcacccccaggactgacctcttcctcctcgctgccagatgattgttcaaagcacagaatttgtcagaaacctgcagggactccatgctgccagccttctccgtaattagcatggccccagtccatgcttctagccttggttccttctgcccctctgtttgaaattctagagccagctgtgggacaattatctgtgtcaaaagccagatgtgaaaacatctcaataacaaactggctgctttgttcaatgctagaacaacgcctgtcacagagtagaaactcaaaaatatttgctgagtgaatgaacaaatgaataaatgcataataaataattaaccaccaatccaacatccaga

SEQ ID NO: 851 - protein, 705 aa, Homo sapiens
MRPSGTAGAALLALLAALCPASRALEEKKVCQGTSNKLTQLGTFEDHFLSLQRMFNNCEVVLGNLEITYVQRNYDLSFLKTIQEVAGYVLIALNTVERIPLENLQIIRGNMYYENSYALAVLSNYDANKTGLKELPMRNLQEILHGAVRFSNNPALCNVESIQWRDIVSSDFLSNMSMDFQNHLGSCQKCDPSCPNGSCWGAGEENCQKLTKIICAQQCSGRCRGKSPSDCCHNQCAAGCTGPRESDCLVCRKFRDEATCKDTCPPLMLYNPTTYQMDVNPEGKYSFGATCVKKCPRNYVVTDHGSCVRACGADSYEMEEDGVRKCKKCEGPCRKVCNGIGIGEFKDSLSINATNIKHFKNCTSISGDLHILPVAFRGDSFTHTPPLDPQELDILKTVKEITGFLLIQAWPENRTDLHAFENLEIIRGRTKQHGQFSLAVVSLNITSLGLRSLKEISDGDVIISGNKNLCYANTINWKKLFGTSGQKTKIISNRGENSCKATGQVCHALCSPEGCWGPEPRDCVSCRNVSRGRECVDKCNLLEGEPREFVENSECIQCHPECLPQAMNITCTGRGPDNCIQCAHYIDGPHCVKTCPAGVMGENNTLVWKYADAGHVCHLCHPNCTYGPGNESLKAMLFCLFKLSSCNQSNDGSVSHQSGSPAAQESCLGWIPSLLPSEFQLGWGGCSHLHAWPSASVIITASSCH

SEQ ID NO: 852 - DNA, 5239 bp, Homo sapiens
gcctttgtctctggctgcagccggagctcctgctctcctcctcactgctcagtgtcctctgctcctagaggcccagcctctgtgtccctgtgacctgcagatattgggagatccacagctaagacgccgggactccctggaaacctagaaatgactgtgccataacacacatttgatgctgaaatccgggataggggaactcctttgggagtcgtgtcccttaaccccttcccccgacttcttgaagagacccacccgcgacctcggtacctcggaccagctctgtaaaagccccgcctctgccttcggataggaaccactgacatttaaagatgtcgccatagaattctctctggaggagtggcaatgcctggatactgcacagcgggatttatataggaatgtgttgttagagaactacagaaacctggtctttttgggtattgctgtctctaagccatatctgatcacctgtctggagcaaaaaaaagagccctggaatataaaaagacatgagatggtagccaaacccccagtaatgtcttttcattttgcccaagacctttggccagagcagaacataaaagattctttccagaaagtgacactgagaagatacggaaaatgtgaatatgagaatttacagttaagaaaaggctgtaaacatgtggatgagtgtacggggcacaaaggaggtcataatacagttaaccaatgtttgacagctaccccaagcaaaatattccagtgtaataaatatgtgaaagtctttgataaattttcaaattcaaatagatataagagaagacatacaggaaacaaacacttcaaatgtaaagaatgtagcaaatcattttgcgtgctttcacaactaactcagcatagaagaattcatactagagtgaattcctacaaatgtgaagaatgtggaaaagcctttaactggttctcaactcttactaaacataagagaattcatactggagaaaagccctacaaatgtgaagaatgtggcaaagcctttaaccagtcctcacaacttactaggcataagataattcatactgaagagaaacccaacaaatgtgaagaatgtggcaaggcctttaaacaggcctcacaccttactatacataaaataattcatactggagaaaaaccttacaaatatgaagaatgtggcaaagtctttagccagtcctcacaccttactacacaaaagatacttcacactggagagaacctctacaagtgtaaagaatgtggaaaagcttttaacctattctcaaatcttactaaccataagagaattcatgctggggagaaaccctacaaatgtaaagaatgtggcagagcttttaacatatcctcaaaccttaataaacaggagaaaattcatactggagggaaactcaacaaatgtgaagaatgtgacaaagcttttaaccgatccttaaaacttactgcacataagaaaattctaatggaagagaaaccctacaaatgtgaagaatgtggcaaagtctttaaccagttctcaactcttactagacataagataattcatactggagagaaaccctacaaatgtaaagaatgtggcaaagcttttaaccaatcttcaaaccttactgaacataagaaaattcatactgcagagaaatcctataaatgtgaagaatgtggcaaagcttttaaccaacactcaaacctaattaaccataggaaaatttattctggagagaaaccatacaaatgtgaagaatgtggaaaagcttttaatcgatcctcaacccttactagacataagaaaattcatactggagagaaaccctacaaatgtgaagaatgtgacagagcttttagccagtcttcaaaccttactgaacataagaaaattcatactggagagaaaccctataaatgtgaggaatgtggcaaagcttttaaccgattctcaacccttactaaacataagagaattcatactggagaaaaaccctataaatgtgaagaatgtggaaaagcctttaatcaatcctatcaacttactagacataagatagttcatactaaagagaaactcaacaaatgtgaagaatttggcaaggcctttaaacagtcctcacaccgtactatacataaaattattcatactggagagaaaccctacaaatgtgaagaacatggcaaagtttttaaccagtcctcaaaccttactacacaaaagataattcatactggagagaacctctacaaatttgaagaacatggaaaagcttttaacctattctcaaacattactaaccataagataatttatactggagagaaaccccacaaatgtgaagaatgtggaaaagcttataaccgattctcaaacctaactatacataagagaattcatacgggagagaaaccttaccaatgtgcagaatgtggcaaagcctttaactgctcctcaacccttaatagacataagataattcatactggagagaaaccttacaaatgtaaagaatgtggcaaagcttttaacctatcctcaacccttactgcacataagaaaattcatactggagagaaaccctataaatgtgaagaatgtggcaaagcttttaaccaatcctcaaaccttactacacataagaaaattcatacttcagagaaaccctacaaatgtgaagaatgtggcaaatcctttaaccagttctcatctcttaatatacataagataattcatactggagagaaaccctacaaatgtggagattatggcagagctttcaacctatcctcaaatcttactacacataagaaaattcatactggagagaaaccctacaaatgtgaatatggcaaaacttaattgatcctacaagcttactacacataagaaaattcatactggagagaaactacaaatgtgaagaatgtgttaaagcctttaacaagtcttcaactttttctgcacacacgaggtattttatactggtgagaaaccttacaatgtaaagaatgtggcacagcttttaactaatcttcaaaccttactgaaagttgagaaaattcgtactggagagaatcctacaaatgtgaaaaatgtggcaaatcctttaactgatcctcaacttttactaaacataaggtaattcatactggagaaaagccatacaaatgagaagaatgtggcaatgcctttaatcagtcctcacacctttctacacataagataatttatactggagaggaactctatagttgtgaagaatgtggcaaagcttttaaccaatcctcataccttactatacagaaattcatactggagagaaagcctacaattgtgaagaatgtggcaaagcttttaaccttccttaacccttaactgtagataagaaaattcatactggaaagaaaccctacaaatgtgaagtctgtggcaaagcttttaactgattctcaactcttactacatgtaagagtatttatactggaaagaaaccctacaaatgtaaaaaacgtggcaatgcctttaactggtcctcacaccttgctacatataagacagtttatactttgagagaaaccctgcaaatgtgaataatgtggcaatactttaaaccaatcctcaaacctcactaaacataagataatactgaaaactttacaaacctgaatgatgtgacaataattttgacaacacctcgaactttctaacataaatcatactggtgaaaaatcctagaaatgtgaaaaatatcacaaagcctttaaatggttgtcacacttgattgtaggtaagaatccatactgaagaaaactcctggaagtgtaaaaaatgtggcaacacttttaataaatgctcaccccttattgcacaggaaagcatttatacttcagaaagattgtacaaatacaaggaatgtggaaaagccattattatctgctcagattttactcaacattagagagttagtacgtaataaaagcattataaatgcaatttttgtcaagagatctttcagaaaatataagcctttaaagtgaagaagaggagccagttgtgctggctcacatctgtaatgccagcactttgggaggccaaggtgggtggatcacctgagggcaggagtctgagaccagcctggccaacatagcaaaaccccatctctattaaaaattttacaaaaattagctgcgtgtggtggcaggcccctgtaatcccagctaattgggaggctgaagcaggagaattgctcaaacctgggaggcgaagattgcagtgagctgaaatcacaccactacactccagccaaagcaacaagagcaaaaacttcgtctcaaaaacaaaacaaaaaaagagtattcattgtgaggacaaacaatacaaatacgaagagggttgtagtacctttacttgtatcacagatacttttgtacccattttgcactagaggaaaaccatgaagcagttgctcaaatgttgttcaacaccagaaaatttatattggagaaaagcactgtaaatgtaatgcatttgtgaaaacattttttaaaaaactacagcttagaaaataccagaggcctcatactaaaatatatttttgcaagtgaagtaaatataaaaataatttaatccaaaattaagtctatataaatatcagagaattcacagtagaaatatctaaggtactgacacttcagacattgctgagtatagaatcagaatgctgagtatagaaaataatttaaaactaaagttggtaggtaaataatgtgtatataactttaaaagaagtagaatttttttgtagatgtataattacattcaaattatattttttcttgaaaaattagtttttgaaaagcaaatgatgtaattcaactcaaattcatgctcttcattcctattgtattcacatgtgaaagcatgtgattaatttttcatgcatcaaagatatgagaaatcatttctgttaggtcggtattatttatgacactttctatgaaagaataaggacattaaaatgtaagatgcatgatgaaaacctgagtgaagaggctgtttgtgtttaacttataatattgagtgatccatgaagtaggttttcagagcaatattcttctgcattatagtaagagaaaaccatttttaatcttagttaaaattaaagtgaattagtagtatatcattttactatttgtacttttatgtaataaaatgcaatgtgtttaaaaa

SEQ ID NO: 853 - protein, 783 aa, Homo sapiens
MVAKPPVMSFHFAQDLWPEQNIKDSFQKVTLRRYGKCEYENLQLRKGCKHVDECTGHKGGHNTVNQCLTATPSKIFQCNKYVKVFDKFSNSNRYKRRHTGNKHFKCKECSKSFCVLSQLTQHRRIHTRVNSYKCEECGKAFNWFSTLTKHKRIHTGEKPYKCEECGKAFNQSSQLTRHKIIHTEEKPNKCEECGKAFKQASHLTIHKIIHTGEKPYKYEECGKVFSQSSHLTTQKILHTGENLYKCKECGKAFNLFSNLTNHKRIHAGEKPYKCKECGRAFNISSNLNKQEKIHTGGKLNKCEECDKAFNRSLKLTAHKKILMEEKPYKCEECGKVFNQFSTLTRHKIIHTGEKPYKCKECGKAFNQSSNLTEHKKIHTAEKSYKCEECGKAFNQHSNLINHRKIYSGEKPYKCEECGKAFNRSSTLTRHKKIHTGEKPYKCEECDRAFSQSSNLTEHKKIHTGEKPYKCEECGKAFNRFSTLTKHKRIHTGEKPYKCEECGKAFNQSYQLTRHKIVHTKEKLNKCEEFGKAFKQSSHRTIHKIIHTGEKPYKCEEHGKVFNQSSNLTTQKIIHTGENLYKFEEHGKAFNLFSNITNHKIIYTGEKPHKCEECGKAYNRFSNLTIHKRIHTGEKPYQCAECGKAFNCSSTLNRHKIIHTGEKPYKCKECGKAFNLSSTLTAHKKIHTGEKPYKCEECGKAFNQSSNLTTHKKIHTSEKPYKCEECGKSFNQFSSLNIHKIIHTGEKPYKCGDYGRAFNLSSNLTTHKKIHTGEKPYKCEYGKT

SEQ ID NO: 854 - DNA, 5508 bp, Homo sapiens
gcctttgtctctggctgcagccggagctcctgctctcctcctcactgctcagtgtcctctgctcctagaggcccagcctctgtgtccctgtgacctgcagatattgggagatccacagctaagacgccgggactccctggaaacctagaaatgatggagtctcgctctgttgctcaggctgaagggcagtggtgcgatctcggctcactgaaacctccgccttccgggctcaagcaattctcctgcctcaacctcgcaagtagctgggattacaggcatgcaccaccatgcccagactgtgccataacacacatttgatgctgaaatccgggataggggaactcctttgggagtcgtgtcccttaaccccttcccccgacttcttgaagagacccacccgcgacctcggtacctcggaccagctctgtaaaagccccgcctctgccttcggataggtctggccccaccctggagtcttgcctcacagaactgattagaagagatcagagttttggctggtgcctttccggagtggttgctaacaattcccgaattccacaaggagataaatgggaaaaaaaggaaccactgacatttaaagatgtcgccatagaattctctctggaggagtggcaatgcctggatactgcacagcgggatttatataggaatgtgttgttagagaactacagaaacctggtctttttgggtattgctgtctctaagccatatctgatcacctgtctggagcaaaaaaaagagccctggaatataaaaagacatgagatggtagccaaacccccagtaatgtcttttcattttgcccaagacctttggccagagcagaacataaaagattctttccagaaagtgacactgagaagatacggaaaatgtgaatatgagaatttacagttaagaaaaggctgtaaacatgtggatgagtgtacggggcacaaaggaggtcataatacagttaaccaatgtttgacagctaccccaagcaaaatattccagtgtaataaatatgtgaaagtctttgataaattttcaaattcaaatagatataagagaagacatacaggaaacaaacacttcaaatgtaaagaatgtagcaaatcattttgcgtgctttcacaactaactcagcatagaagaattcatactagagtgaattcctacaaatgtgaagaatgtggaaaagcctttaactggttctcaactcttactaaacataagagaattcatactggagaaaagccctacaaatgtgaagaatgtggcaaagcctttaaccagtcctcacaacttactaggcataagataattcatactgaagagaaacccaacaaatgtgaagaatgtggcaaggcctttaaacaggcctcacaccttactatacataaaataattcatactggagaaaaaccttacaaatatgaagaatgtggcaaagtctttagccagtcctcacaccttactacacaaaagatacttcacactggagagaacctctacaagtgtaaagaatgtggaaaagcttttaacctattctcaaatcttactaaccataagagaattcatgctggggagaaaccctacaaatgtaaagaatgtggcagagcttttaacatatcctcaaaccttaataaacaggagaaaattcatactggagggaaactcaacaaatgtgaagaatgtgacaaagcttttaaccgatccttaaaacttactgcacataagaaaattctaatggaagagaaaccctacaaatgtgaagaatgtggcaaagtctttaaccagttctcaactcttactagacataagataattcatactggagagaaaccctacaaatgtaaagaatgtggcaaagcttttaaccaatcttcaaaccttactgaacataagaaaattcatactgcagagaaatcctataaatgtgaagaatgtggcaaagcttttaaccaacactcaaacctaattaaccataggaaaatttattctggagagaaaccatacaaatgtgaagaatgtggaaaagcttttaatcgatcctcaacccttactagacataagaaaattcatactggagagaaaccctacaaatgtgaagaatgtgacagagcttttagccagtcttcaaaccttactgaacataagaaaattcatactggagagaaaccctataaatgtgaggaatgtggcaaagcttttaaccgattctcaacccttactaaacataagagaattcatactggagaaaaaccctataaatgtgaagaatgtggaaaagcctttaatcaatcctatcaacttactagacataagatagttcatactaaagagaaactcaacaaatgtgaagaatttggcaaggcctttaaacagtcctcacaccgtactatacataaaattattcatactggagagaaaccctacaaatgtgaagaacatggcaaagtttttaaccagtcctcaaaccttactacacaaaagataattcatactggagagaacctctacaaatttgaagaacatggaaaagcttttaacctattctcaaacattactaaccataagataatttatactggagagaaaccccacaaatgtgaagaatgtggaaaagcttataaccgattctcaaacctaactatacataagagaattcatacgggagagaaaccttaccaatgtgcagaatgtggcaaagcctttaactgctcctcaacccttaatagacataagataattcatactggagagaaaccttacaaatgtaaagaatgtggcaaagcttttaacctatcctcaacccttactgcacataagaaaattcatactggagagaaaccctataaatgtgaagaatgtggcaaagcttttaaccaatcctcaaaccttactacacataagaaaattcatacttcagagaaaccctacaaatgtgaagaatgtggcaaatcctttaaccagttctcatctcttaatatacataagataattcatactggagagaaaccctacaaatgtggagattatggcagagctttcaacctatcctcaaatcttactacacataagaaaattcatactggagagaaaccctacaaatgtgaatatggcaaaacttaattgatcctacaagcttactacacataagaaaattcatactggagagaaactacaaatgtgaagaatgtgttaaagcctttaacaagtcttcaactttttctgcacacacgaggtattttatactggtgagaaaccttacaatgtaaagaatgtggcacagcttttaactaatcttcaaaccttactgaaagttgagaaaattcgtactggagagaatcctacaaatgtgaaaaatgtggcaaatcctttaactgatcctcaacttttactaaacataaggtaattcatactggagaaaagccatacaaatgagaagaatgtggcaatgcctttaatcagtcctcacacctttctacacataagataatttatactggagaggaactctatagttgtgaagaatgtggcaaagcttttaaccaatcctcataccttactatacagaaattcatactggagagaaagcctacaattgtgaagaatgtggcaaagcttttaaccttccttaacccttaactgtagataagaaaattcatactggaaagaaaccctacaaatgtgaagtctgtggcaaagcttttaactgattctcaactcttactacatgtaagagtatttatactggaaagaaaccctacaaatgtaaaaaacgtggcaatgcctttaactggtcctcacaccttgctacatataagacagtttatactttgagagaaaccctgcaaatgtgaataatgtggcaatactttaaaccaatcctcaaacctcactaaacataagataatactgaaaactttacaaacctgaatgatgtgacaataattttgacaacacctcgaactttctaacataaatcatactggtgaaaaatcctagaaatgtgaaaaatatcacaaagcctttaaatggttgtcacacttgattgtaggtaagaatccatactgaagaaaactcctggaagtgtaaaaaatgtggcaacacttttaataaatgctcaccccttattgcacaggaaagcatttatacttcagaaagattgtacaaatacaaggaatgtggaaaagccattattatctgctcagattttactcaacattagagagttagtacgtaataaaagcattataaatgcaatttttgtcaagagatctttcagaaaatataagcctttaaagtgaagaagaggagccagttgtgctggctcacatctgtaatgccagcactttgggaggccaaggtgggtggatcacctgagggcaggagtctgagaccagcctggccaacatagcaaaaccccatctctattaaaaattttacaaaaattagctgcgtgtggtggcaggcccctgtaatcccagctaattgggaggctgaagcaggagaattgctcaaacctgggaggcgaagattgcagtgagctgaaatcacaccactacactccagccaaagcaacaagagcaaaaacttcgtctcaaaaacaaaacaaaaaaagagtattcattgtgaggacaaacaatacaaatacgaagagggttgtagtacctttacttgtatcacagatacttttgtacccattttgcactagaggaaaaccatgaagcagttgctcaaatgttgttcaacaccagaaaatttatattggagaaaagcactgtaaatgtaatgcatttgtgaaaacattttttaaaaaactacagcttagaaaataccagaggcctcatactaaaatatatttttgcaagtgaagtaaatataaaaataatttaatccaaaattaagtctatataaatatcagagaattcacagtagaaatatctaaggtactgacacttcagacattgctgagtatagaatcagaatgctgagtatagaaaataatttaaaactaaagttggtaggtaaataatgtgtatataactttaaaagaagtagaatttttttgtagatgtataattacattcaaattatattttttcttgaaaaattagtttttgaaaagcaaatgatgtaattcaactcaaattcatgctcttcattcctattgtattcacatgtgaaagcatgtgattaatttttcatgcatcaaagatatgagaaatcatttctgttaggtcggtattatttatgacactttctatgaaagaataaggacattaaaatgtaagatgcatgatgaaaacctgagtgaagaggctgtttgtgtttaacttataatattgagtgatccatgaagtaggttttcagagcaatattcttctgcattatagtaagagaaaaccatttttaatcttagttaaaattaaagtgaattagtagtatatcattttactatttgtacttttatgtaataaaatgcaatgtgtttaaaaa

SEQ ID NO: 855 - protein, 783 aa, Homo sapiens; identical to SEQ ID NO: 853

SEQ ID NO: 856 - DNA, 811 bp, Homo sapiens
atggcagcgcccgctggagccggggcagtgattgcagccccagacaggaggcgctggctgtggtcggtgctggcggtggcgctggggctcttgacagctggagtatcagtcttggaagtatatttaccaaaagaaatcttcgtggcaaatggtacacaagggaagctgacctgcaagttcaagtctactaatacgactggcgggttgacctcagtctcctggaggttccagccagagggggccgacaccaccgtgtcattttgccactactcccaagggcaagtgtactttgggaattatccaccatttaaagacagaatcagctgggctggagaccttgacgagaaagatgcatcaatcaacatagaaaatatgcagtttatacacaatggcacctatatctgtgatgccaaaaaccctcctgacattgttgtccagcctggacacattagactctatgtcgtagaaaaagagagtttgcctgtgtttccagtttgggtagtggtgggcatagttacgcgctgtggtcctaggtctcactctgctcatcagcctgattctggctgtcttctatagaaggtaaaactctaaacgggattacactggctgcagtacatcagagagtttgtcaccagttaagcaggctcgttggaagtccccttctgacattgaaggtcttgtaaagagtctgccttctggatctcaccagggcccagtcatatatgcacagttagaccactctggcggacatcagagtgacaagattaacaagtcagagtctgtggtgtatgtggatatccagaaaaattaa

SEQ ID NO: 857 - DNA, 2230 bp, Homo sapiens
gtctcgctgcagcgggtgctgcaggtctggccttcacttttctgcgtcctcttactcctagaggcccagcctctgtggcgctgtgatctggttattgggagattcacagctaagacgccaggatcccccggaagcctagaaatgggaccactgacatttatggatgtggccatagagttctctttggaggagtggcagtgcctggacactgcacagcggaatgtatataggcatgtgatgttagagaactacagaaacctggttttcttggccagacctgattacctgtctggaacaaggaaaagagccctggaatatgaagagacatgagatggtggtagccaaacattcagctctgtgttctcgttttgcccaagacctttggctagagcagaacataaaagattctttccaaaaagtgacactgagcagatatggaaaatatggacataagaatttacagttaagaaaaggctgtaaaagtgtggatgagtgtaaggaacaccaaggaggttataatggacttaaccaatgtttgaaaattaccacaagcaaaatatttcaatgtaataaatatgtaaaagtcatgcataaattttcaaattcaaatagacacaagataagacatactgaaaataaacatttcagatgtaaagaatgtgacaaatcactttgcatgctttcacgcctaactcaacataaaaaaattcatactagagagaatttctacaaatgtgaagagtgtggaaaaacctttaactggtccacaaacctttctaaacctaagaaaattcatactggagaaaaaccctacaaatgtgaagtatgtggaaaagcctttcaccaatcctcaatccttactaaacataagataattcgtactggagaaaaaccctataaatgtgcacactgtggcaaagcctttaaacagtcctcacaccttactagacataagataattcatactgaagagaaaccctacaaatgtgaacaatgtggcaaggtctttaagcagtccccaacccttactaaacatcagataatttatactggagaggaaccatacaaatgtgaggaatgtggcaaagcttttaacctatcttaacaacttactgaacataagaaaatttacactagagagaaagcctacaaatgtgaagaatgtggcaaagcctttaaccagttttcaacccttattacacataagataattcatagcagagagaaaccccacaaatgtgaagaatgtggcagagcttttaaccagtccgcaaagctcactgaacataagttaattcatactggagaaaaaccctacaaatgtaaagaatgtggaaaagcttttcaccgatactcaatccttagtacacataagaaaattcatactggggagaaaccccacaaatgtggagaatgcggaaaagcctttaactggtcctcaactcttattacacataagataattcacagtggagaaaaaccctacaaatatgaagaatgtggcaaagcttttaaccagtcctcacaccttatgagacataagaaaattcatagtaaagagaaaccttacaaatgtgaacagtgtggcaaggtctttaagaagtcctcaactcttactgcacataagatcattcatactggagagaaaccttacaaatgtgaggaatgtggcaaaggtttcagccaactctcaaaccttactaaacacaagaagattcatactagagagaaaccctacaaacgtgaagaatgtggcatatcttttaaccagttctcacaacttgctatacataagatgattcacacttgaatgaaaccctacaaatgtgaacgatgtggcagttgttttaactagttctcgaactttactatgcataagaaaattcaaactggagagaaactctacaaatgtgaagaatgtggcaaagcttttaaccaagtctcaacacttactatacataagataatttatactggagcaaaaccttggaaattcaaagaatgtggtaaaacttataatcctcaaaacttcttacacctaaaattcatgcaggagagaaaccccacaaatgtgaaaaatttggtaaattctttaacaaatcttcaaccctttctgcacataatataattcatactggagagaaaccccacaaatatgaagaatgtggtaatgcttttaaccaattctcaaatcttactaaacaaaattaatactgaaaatgttacaaac

SEQ ID NO: 858 - protein, 262 aa, Homo sapiens
MKRHEMVVAKHSALCSRFAQDLWLEQNIKDSFQKVTLSRYGKYGHKNLQLRKGCKSVDECKEHQGGYNGLNQCLKITTSKIFQCNKYVKVMHKFSNSNRHKIRHTENKHFRCKECDKSLCMLSRLTQHKKIHTRENFYKCEECGKTFNWSTNLSKPKKIHTGEKPYKCEVCGKAFHQSSILTKHKIIRTGEKPYKCAHCGKAFKQSSHLTRHKIIHTEEKPYKCEQCGKVFKQSPTLTKHQIIYTGEEPYKCEECGKAFNLS

SEQ ID NO: 859 - DNA, 4125 bp, Homo sapiens
tttttttttttttttttttattcagttactgtgagaattaaatttattaacacattaaagtattatggttaatgctcagtacaaattaacgattaatatgatatgtatatgctgaattacactagtatgtgctttaagacgggaatgcccttttataacacatgagtttttcaatcaatatatttaattttttaaaataaatgttgtatagatacacaatggaatactattcagccttcaaaggtggtaagtttcatcatttgaatcaatatagataaatttagaagacagcatactagatggaataatcctgacatagaaagacaaatactacatgatctcatatatatagaaaaaagtttaactcggggcgcaaagcgagccggtggatccataaagaacccagccaacccgcagagggaagggaggggctgagctgtgaggagagtggggcccaacaaccatatctacatgggagtcctttaacccggaaagttacgaattggacaaaagcttccggctaaccagattcactgaactgaagggcacaggctacaaagtgccccaagatgtcctgcaaaaattgctggaatctttacagaaccacttccaagaagatgagcagtttctgggagcctttatgccaaggcttggcattggaatggatacttgtcattcctttgagacacggtgggctttccttggttcaaactacagattacatttacccaattgtagacgactcttacgtgacaggcaggatagcatgtgccaatgtcctcagtgacctctacgcaatgggggtcacagaatgtgacaatatgctgatgctccttggagtcagtaataaaatgaccaacagggaaatggataaagtgatgcctctgattatccaaggttttaaagacgcagctgaggaggcagaaacgtctgtaatgggcggccaaacagtactaaacccctggattgtcctgggaagagtcactaccactgtctgtcagcccagtgaatttatcatgccagacaatgcagtaccaggggatgtgctggtgttgacaaaacccctggggacacagggggcagtggctgtgcatcagtggctggatattcctaagaaatggaataatattaaactagtggtcacccaagaagatgtagagctggcctacgaggaggtgatgatgaacatggcgaggctcaacaggacaggcgggcttctgatctgtttaccatgtgagcaaacagctcggttctgtgcagagataaagtcccccaaatatggtgaagaccaccaagcatggattattgggattgtagagaagggcaaccacacagccagaatcatagacaaacccctgatcatcgagattgcaccacaagtggccactcaaaatgtgaatcccacacccggggccacctcttaatctaagcagaaatagctgtttggttttgtttttaaatagatctatttcctttatcatcgcttcagttaaagactataagcaacaaaaatctcactgtatctacatatcaggtgaccttaggtcagtttgtaagtggatacaattaataaaataaaatccatgcctttttttcctgtcacattaactgaagatgcacctaatcttgaggcagcttctgagttgagaattatattgttatccaatactgttgatacattttgaatctttagacacttaccttttgccgaataggctctttttaaaggtgcttccacatagcacagacattatcgtagtcatgtcaaagagcagttggtgtcttcattttatgtatatttattataagtctgattttttaagagtcttgaatggttttctggagagatagcattggtcagtggcacatgacggcatcccagtcataagagggttgcatgattcctttgagtgtttgatttgaaaagcctagtcttctctcaagagcatcttggacccagaacattctccagtagtgcattcagttcaacacggcaagtgcttcactgcttggaaaacactttgaagacaaaaaagaaatcttatttctttttttggaggcttcctgacatttacagtaataccattaactgttttctttatcgatagcaaaaaaaggatactttttgcaatgtaattaggtattttatagtgctacaaggaattgccttccaaatggaggttcatgtataatactcatttacaattcaatatataattacgcaaataatttttaaatataatcaataataaagactgttctgtggatggtagtgtttaatacattttatattttgtatagtgatttcaggccttttgttttcttaaaatcagcagctatttagcgtaattcttagcattattttgtcctttgcgctcgtacatttttgtgcacgctttttgtgatctgtgttaaaaacctgcattgccaacattgcagcccaaacttaaacttgttattcaaataaatacttaattttttaaattgctgttgtataaaaaaaagaataaagtttaactcaaaaaagtacaaagtggaataatctttaccagaggctgggtgtggtgggaaggaaacagagaggggttgatcaaaaaatacaaagtttcaaatagacaggataaataggttttgagttttattgcacagcagggtgactatagtaaacaataatgtattgtatatttcagaataactaagagtaaatttcaagtgtctcaccacaaaaaaatgataggtaagcaagttgttatttaactcgacaaaatcatttcatactatatacatatattcaaatatctcattgtaccccataatgtacagaactctggtgaatgaaaaatactattaatatatatttttttaaaaggatagtatttaaaacattcaactactattatacccccagactgactagaagaaacatgggttacaaaccactgatgtggccaccttgtttttaggtttaacattaatcatgatctaaaagaatcaataaataagagtgaataaatttcctgtacacttgctatgtgctggggacttattgggcacatttatttgtattaactgctttaattttaccaaaaccctatgatttaggcagtaaagagctgaagagtcaagcacagagagatcaagaaactgtattcatgtcatatagtccataaatggcaaaactggaatgaaacaaggaaccacctgatacggcgtttcaatcttaaccattatgcccaacaccctctcatccaatgctactttttatttttgacccaacatttttggctttgaattttctaaattagtagaaataaagagaaatttaaaaaccccttttctgggggaaaaaatagcgaacaggaggcaagggctagattgcagctcccactcagagcagtatgtggagactcgcatcattaacttttctccagaagtactgcaggaataaaccaggagagctgagagaatccaaagaccctctgacggaagcaaactgctccaacaggacctggcagacagccaaaatattgatagtgttcaagatgtgaaagtgggaaaaagggatagtctgcccttgaacacataccctcactggggaacctgaaagtctagaacatggaataagaaatctgactttacctggagctgagtcaatttagagagctgagctaaatacagaggtagaagaagtgggaaaagcccggtgggctctgagtcttctgggaagccattttagacttgcgtcaaaggggcccttggggagggctgccaggggaacttggaaaggaccacagggagaaggaaacctccagctgaactttctaacaattctaaccaaacgtgaagtctcctgaccagaaattcggaaagggtgtgaattgggtgagcagactccacaggcagcaaggcacaaaagccctgcttgcttttgcagctgggaggctggtagccaggggcaagttcttagctctgttccctcactgcctggcagaacactcggtgctcttgggggtggggagcatggtgggaatgagtcttgcttttggggttgcatgagagatgggtgagtcatgtaactgctggctttccctctttcccccacacccctgacaacctgcatgacac

SEQ ID NO: 860 - DNA, 880 bp, Homo sapiens
atggtgatcaaagccaaaaacttgaatttagatcaaaaagtggctacaaacttcctagtacatgagaagatctggttcaacaagttaaaatgtgacaatgcagaaaggagattcttcaagcagatgaacaaggctgtggccagcacctcccgccaggagaacggcgccagcatgatcctccatgacattgcgagagccagagagcatttccagaaatccctggccagaagctcaggccccggggcctccagcagccccagcggagacaaggctgagctcatctttcagatcaccagtctggaagtggagaaccagagcctgcgcagggttgtgcaggagctgcagcaggccatctccaagctggaggccccactgaacgtgctggagaagagcttgcctggccaccacagccctgcagacccagcacgagtctcctatgtgccaagtggagcccctggccaagaagccagccaaaccagcagaggatgacaaggacgatgacattgacctgtttggcagtgacaatgaggaggaggacaggaggcagtactgctgcgggaggagcggctgcggcagtacacagagaaaaaggccaagaagcccatgctggtggccgagtcgtccatcctgctggacattaagccttgggatgatgagactaacatggcccagctggaggcctgtatgtgctccatccagctggacaggctggtctgggggggcctctaagctggtgcccgtgggctatagtatccagaagctgctggttcagtgtgtagtggaggatgacaaggtggggacagacttgctggaggaggagatcatcaagtttgaagaacacgtgcagaatgttgacattgcagctttcaacaagatctga

SEQ ID NO: 861 - DNA, 1267 bp, Homo sapiens
cctcacagccctgagtgagggtgtgcagcctccttgggcaagaggatgcgggctctgggaggctgcgtcgcacatctccagtccccactgcagggcctctcaccggctggggcagtgacccctggtcggaagcacctcagtgctgctcatgattgcagaggtggcctcaccagatagagggtcctggagggcgtgggggcttggtctctgactgccagcaaaagaagccgacatagaggcagcaggcgacaaacactgaggcaactgacttgcccgaatttaaccctcaggttttttaaataaaatgcaagtgcaggggcttgggctcgggactcctggagccccgtggggctgagcgtggatggtgctcggtgtccagctacactcccaaaccgcatcccgagcgtttgcggggcggaggggccccagggcgacggttccagaacagacccaggcggctccggtcagcagcagccccgctgctttccaacagcgcggggacccccatccccgccagccccatctcactgtccctctcaggtcagaggagaccgtagaggaccgcgtggcaccaggagctgccaggaaccagggcgacctagaagaaaccgggaacctggcgtcccgcggggacgcagccccaggaaaggggctgccgccgccagcaagtgagctcagctcagcccgggcgtcccctccgcaacgaggcccggatccctgcttggctcccggagcccggactgtgccttccgcaaaacggctgcgctctagaaagtggcctccacagtgcacttcccggcagcatggagtcggcagtggcagcgtttctatccggctctgcggggctgggtgtgaacgggactctcccatcccgctgtcctccaggagccggacctctcaccccgaagactttgccgaagacgcggccccctggtcaggggcagaaaacagatccaggccgccccgctcctgctgggtggtggagaaggtggagggcgggcaggtgctaagtgctactgtgaaaataaaaatcatcataataaagaacgaatgggtttcgaatttgagctcagaggtgttgagcagcctgtgcgaggccacggagctcacaggaggaaggacccccatagagacagggacatctgacgagggagcgccctcctctggctggagggtggggcagcagcagcagcagccaggcttcagggaatggggtgaaatgagggccccgggggctccccaggtggaagaagcacaggtctggtag

SEQ ID NO: 862 - protein, 301 aa, Homo sapiens
MVLGVQLHSQTASRAFAGRRGPRATVPEQTQAAPVSSSPAAFQQRGDPHPRQPHLTVPLRSEETVEDRVAPGAARNQGDLEETGNLASRGDAAPGKGLPPPASELSSARASPPQRGPDPCLAPGARTVPSAKRLRSRKWPPQCTSRQHGVGSGSVSIRLCGAGCERDSPIPLSSRSRTSHPEDFAEDAAPWSGAENRSRPPRSCWVVEKVEGGQVLSATVKIKIIIIKNEWVSNLSSEVLSSLCEATELTGGRTPIETGTSDEGAPSSGWRVGQQQQQPGFREWGEMRAPGAPQVEEAQVW

SEQ ID NO: 863 - DNA, 4325 bp, Homo sapiens
aggacggcttccgggatttggcggggcctttgtctctcgctgcagtcgcagctccaggtctcgtcttcactgctctatgtcctctgctcctagaggtccaccttctgtggccccgttacctgcaggtattgggagatccacagctaagacgccaggactccctggaagcctagaaatgggaccactgacatttagggatgtggccatagaattctctctggaggagtggcaatgcctggacacttcacagcagaatttgtataggaatgtgatgttagataactacagaaacctggtcttcctgggtattgctgtctctaagccagacctgatcacttgtctggagcaaggaaaagagccctgcaatatgaagagacatgcgatggtagccaaacccccagttgtgtgttctcattttgcccaagacctttggccaaagcagggcttaaaagattcttttcaaaaagtgatactgagaagatatggaaaatatggacatgagaatttacaattaagaaaaggctgtaaaagtgcggatgagcataaggtgcacaaaagaggttataatggacttaaccaatgtttgacaactacccagagcaaaatatttcaatgtgataaatatgttaaagtccttcataaattctcaaattcaaatatacataagaaaagacaaactggaaagaaacctttcaaatgtaaagaatgtggcaaatcatgttgcatactttcacaactaactcagcataagaaaactgctactagagtgaatttctacaaatgtaagacatgtggaaaagcctttaaccagttctcaaatcttactaaacataagataattcatcctgaagtgaatccctacaaatgtgaagaatgtggcaaagcctttaaccagtccttaactcttactaaacataaaaaaattcatactgaagagaaaccttacaaatgtgaagattgtggcaaagtctttagtgtattttcagtccttactaaacataagataattcatacaggaacaaaaccctacaattgtgaagaatgtggcaaaggctttagtatattctcaacccttactaaacataagataattcatactggagagaaaccctacaaatgcaatgaatgtggtaaagcctttaactggtcctcaactcttactaaacataagagaattcatactggagagaaaccctacaaatgtgaagaatgtggcaaagcttttaaccagtcctcaacccttactagacataagatagttcatactggagagaaaccctacaaatgtgaagaatgtggtaaagcctttaaacggtccacaactcttactaaacataagagaatttatactaaagagaaaccatacaaatgtgaagaatgtggaaaagcctttagtgtattctcaacccttactaaacataagataattcatactggagcaaaaccttacaaatgtgaagaatgtggcagtgcctttagggcattctcaacccttactgaacataagagagttcatactggagagaaaccttacaaatgcaatgaatgtggtaaagcctttaactggtcctcaactcttactaaacataagagaattcatactggagagaagccctacaaatgtgaagaatgtggcaaagcttttaaccggtcctcaaaccttactcgacataagaaaattcatactggagagaaaccatacaaacctaaaagatgtgacagtgcttttgacaacaccccaaacttttctagacataaaagaaatcatatgggtgagaaatcctagaaatgtgaagaatgtgacaaagcctttaagcggttgtcacacttgattgtatataagataattcatactggagaaaactcccagaagtggagttttccttattgcacaggaaagcatttatacttgagaaaaattgtataaagaatggaaaagtcattaatatctgctcatatcttaacatcagcgagttggtatttaataaaagcattatcaatgaaattactgtcaaaagatctttcagacaatataagcctgcaaagtgcagcagagtatttattttgaagagaaacattaaaagtacaaagaggtttgtagtacctttgtttgtatcatagatcttattgtacacattttgtaccagagaaaaaccctgaagcagttgttcaaactttgttcaataccaggaaatttatattggagaaaaaccctatgagtgtaatgaatttggaaaaatatttttttcaacaacagcttagaaaacatgggaggaattacactaaaatatatttttgcaaatgcagcagtaaatatgaaagaaatgatccaaagttaggtttatataaatatcagagaattcacaatacagatatctaagatactgacacttcagacattacacaaaatcagagtgctgagtacagaaagttatccaaaacaaaagttggtagataactaatagtgaacaagtttttggcagaggtatatttacattcagagtacacttttctttggaaaaaattacaggttttttgaaaagtgaataatgtaattcaactctcaaattcatggtttttttttttttggttttggttttgggttttttgtttgtttgtttgtttgtttttgagacggagtttcactcttgttgcccaggctggagtgcaatggcgtgatctcagctcaccgcaacctctgcctcccagattcaagcaattctcctgcctcagcctccctagtagctgggattacaggcatgtgccacacctggctaatttttgtggttttagtagagacagggtttctccatgttggtcagtctggtctcaaactcccaacctcaggtgatatgcccgcctcggcctcccaaaatgttgggattacaggcatgagccactgcacccggcgcatgttttttcttcattcctattgtattcacatgtgaaagcatgtgatcaacttgctgcatcaaagatatgagatttttttttttattaggtgggcattatttatgaccttttctgtggaagagtaagaacattaaaatgaaagatgcatgatgaaaatctaagtagagaggctcttgtggttaactgataatattgagtgatgcatgaggtaggtgttcagagtaatattctgcattatagtgaaaaatttttaatattaaaattcaattatatcattttatgaattgtgcttttcataatgcagtacatttcaaaatttttagattatgtatgaacttagatttttaaacatgttttaacatgttaagacttgtgcattcagtgaagcgttattatgccacaaactaacctacctcaccttactcaatggtgtaggtaaaagatgatagcaatatattatttggttacatagtggactaacatttttagtaatctcttttgccagtggctttaaactgcagataagttaaatattcccataggttttacatttatattttttcttatttaaatttattgttcttatttttcatgggtacatagtatgtttttatgctgtatatggcatgttttgatacaggtatataatatgtaataatcacatcagggtaaatgaggtatcccttactagcatttatcctttgtattttattttaaaatgtacaactaaattgttatggactacagggttatttttatggtcataataaaaattacaaaagtatgaataaaatacatacatttctgagtcctgaatatttttaaaaatttgttatatatttttcttctaacatgtggcctctttgcctgcaaacatataaagactcagttttgatttacatagagttaaatatacatatattttactttaaagataaatcttaagtgtaagaaaattgtagagtaagtgtgcttgtgtgagtatgtttgtacctgttttcaaaagaaaacagcaatattggaacaaaacaaatcattttaataaggtgactaatttattagaaaactaacaacctcaaaaatgctgaaagcaaatctatactctctctgctttgtactgaattcattactgtaaaatattatggcttatggttcagaatctccccatgcagatgttctgtttttacttgcctggtactcatggtagagccatacatttcttttttcttacaatttcttttacagtttatgaagtattatatgagctggtcagggattacaacaattattttttttataaaatttagtagtgcacaaaaagtaatttttagatgtaattttactattagtctattaagttatattttatttatttagttaaaacattgccctttgttcttttaattggagaa

SEQ ID NO: 864 - protein, 569 aa, Homo sapiens
MSSAPRGPPSVAPLPAGIGRSTAKTPGLPGSLEMGPLTFRDVAIEFSLEEWQCLDTSQQNLYRNVMLDNYRNLVFLGIAVSKPDLITCLEQGKEPCNMKRHAMVAKPPVVCSHFAQDLWPKQGLKDSFQKVILRRYGKYGHENLQLRKGCKSADEHKVHKRGYNGLNQCLTTTQSKIFQCDKYVKVLHKFSNSNIHKKRQTGKKPFKCKECGKSCCILSQLTQHKKTATRVNFYKCKTCGKAFNQFSNLTKHKIIHPEVNPYKCEECGKAFNQSLTLTKHKKIHTEEKPYKCEDCGKVFSVFSVLTKHKIIHTGTKPYNCEECGKGFSIFSTLTKHKIIHTGEKPYKCNECGKAFNWSSTLTKHKRIHTGEKPYKCEECGKAFNQSSTLTRHKIVHTGEKPYKCEECGKAFKRSTTLTKHKRIYTKEKPYKCEECGKAFSVFSTLTKHKIIHTGAKPYKCEECGSAFRAFSTLTEHKRVHTGEKPYKCNECGKAFNWSSTLTKHKRIHTGEKPYKCEECGKAFNRSSNLTRHKKIHTGEKPYKPKRCDSAFDNTPNFSRHKRNHMGEKS

SEQ ID NO: 865 - DNA, 285 bp, Homo sapiens
atggtccccgaaaaccaggctctgctgacaaatctcagacgccagaaacagaagaacccagagaaactgcccgagaaacttgtgccaaacggatggactgttggaggagctgagggtgaagctgcggtaactcctcaaactggaacagcaaagtcagcaccagaaatagacaagaaaaataaaatttcaaagaaaattagaagaaatcaaaggcagatgctaaagcagcaaaaaaccctccacagtacaacagaaatggagttgatgaaggagtctgagaaatga

SEQ ID NO: 866 - protein, 94 aa, Homo sapiens [sequence omitted]

SEQ ID NO: 867 - DNA, 456 bp, Homo sapiens
atggtgtttggtgtccggcttcactcccaaaccgcacccggagggtttgcggggcggaggggcctcagggcgacggttccagaacagacccaggctgctccggtcagcagcagccccgccgctctcccacctagcggggacccccagccccgccagccgcatcgctctgtccctctcatgtcaggcaagccagttccggaccgcgtggcaccaggagccgccaggagccggggcgacccagaggtctccagcgacctggcgtccggcgaggacacagcccccaggaggggttacccaccgccgcaggtgagctccgcccgggcgccccctcccccaccacgcctggatccctgccgggctccccgagccgagactgtgccttctgcaacagggctgtgctccaggtgggagaaacatcctttgctccctgctttggggtccctgggctccttgtag

SEQ ID NO: 868 - protein, 151 aa, Homo sapiens [sequence omitted]

SEQ ID NO: 869 - DNA, 6404 bp, Homo sapiens
gactaatggccctaactaagtattaacccctgccaagaaaagagctacttcctcttgaagtaaatgaagatagtgatgctttctcttaaactttacttataaaaagcatcaaaggggggaatgaagcaggaaatataaaaggaaaaacaagtaaagggaaaacaagtcctttcctgaccagtctgactcactccaaagtcctgctggagctatgataattatctgcaaggccaggcaggggctccgaaggagtgggctccaggagcagggatgagaaaaacaagttctccttatcagtttccctgtttgaaattctctccccataacattattctttgttctgctctcacaactatttttgtaactatttctgcaagtctgtaaagattttgtaagttcttgtttttctttctgtagcatggcaaggtcacaagacatgtttaagtaaggtaggctcatgttgcaaatcctgttgtaaaacctgtcacggtatgattaactgcctttgttctgcttctgtaagactgctttctcacctcgcaggttttgcgccaaaaacccgacttgcccctgcctgatgcatgtataaaagtcaagccctgtctttgttcagggctcagcctttggatgttaatccgctgggccagtggccacctaaataaaaccttcctgttgcacccagtgatctctccggcctcctgattcccacaacatataagcattcctttttctctgcaacctagcccgcatctgtcattgactttttaacaataggcattctgactggatgagatggtatctcactgtggtttttctctgcatttttctaataattaacaacgtgaattttgttttcatatgcttgtcagccacatgtatgtcttcttttgaaaagtatctgttcatgtttttgcttactttttaattaggtttttggttttctttttgttgttgttgttgttttctgagatggagtcttgctgtgtcaccaggatggagtgcagtggcatgatctcgactcactgcaacctccacctcccaggttcagatgattcttctgcttcagtctcctgagtagctgggatcacagggaccattgacatttatggatgtggccatagaattctctttggaggagtggcaatgcctggacactgcacagcagaatttatataggcatgtgatgtgagagaactacagaaacctggttttcttgggtgaaggtattgctgtctctaagccagacctgattacctgtctggagcaaggaaaagagccctggaatatgaagagacatgagatggtagctaaacatttagttatgttttattattttgcccaacacctttggccagagcagaacataagagattctttccagaaagtgaccctaagaagatatagaaaatgtggatatgagaatttacagttaagaaaaggctgtaaaagtgtggttgagtgtaaacagcacaaaggagattatagtggacttaaccaatgtttgaaaactaccttgagcaaaatatttcaatgtaataaatatgtagaagttttccataaaatttcaaattcaaatagacacaagatgagacatactgaaaataaacattttaaatgtaaagaatgtcgcaaaacattttgcatgctttcacacctaactcaacataaaagaatccaaactagagtgaatttctacaaatgtgaagcatatggaagagcctttaactggtcctcaacccttaataaacataagagaattcatactggagaaaaaccttacaaatgtaaagaatgtggcaaagcctttaaccagacctcacaccttattagacataagagaattcatactgaagagaaaccctacaaatgtgaagaatgtggcaaagcctttaaccagtcatcgacccttactacacataatataattcatactggggaaattccctacaaatgtgagaaatgtgttagagcttttaaccaagcctcaaagcttactgaacataagttaattcataccggagagaaacgttatgaatgtgaagaatgcggcaaagcttttaaccgatcctcaaaacttactgaacataagtacattcatactggagagaagctgtacaaatgtgaagaatgtggtaaagcctttaaccagtcctcaacccttactacacataagagaattcatagtggagagaagccctacaaatgtgaagaatgtggcaaagcttttaaacaattttcaaatcttactgaccataaaaaaattcatactggagagaaaccctacaaatgtgaggaatgtggcaaagcttttaaccaactctcaaaccttactagacataaggtaattcatactggagagaaaccctacaaatgtggagaatgtggcaaagcctttaaccagtcctcagcccttaatacacataagataatccatactggagagaatccccacaaatgtagagaatctggcaaagttttccacctatcctcaaaacttagtacatgtaagaaaattcatactggagagaaactctacaaatgtgaagaatgtggcaaagcctttaaccgatcttcaacccttattggacataagagaattcatactggagagaaaccctacaaatgtgaagaatgtggcaaagcttttaaccaatcttcaacacttactacacataagataattcatactgaagagaaacagtacaaatgtgatgaatgtggcaaagcttctacctgatcctcaaaactcattgaacacaagaaaattcatactggagagaaaccttacaagtgtgaagaatgtggcaaaacttctaaccatttctcaacccttactaaacataagatgattcatactggagagaagttacacaaatgtgatgaatgtgacaaagcttttaaccaatcttcaaccctttctacacataaaagaattcatactggagagaaaccctacaaatgtgaagaatgtggcagagcttttaattgatcatcaaaccttattaaacataagaaaattcatattggagagaaaccctacaaatgtgaagaatgtggaaaagcttttaaccagttctcaactcttactacacataaaataattcatactggagagaaaccatataaatgtgaagaatgtggcaaagctttcaacctatacgtaaaccttactacacataagaaaattcatactggagagaaaccctacaagtgtgaagaatgtggcaaagcttttagccaagtgtcaactcttactatacataaaagaattcatactggagagaaaccctacaagtgtgaagaatgtggcaaagcttttaaccaagtgtcaactcttactatacataaaagaattcatactggagagaaaccttacaaatgtgaggaatgtggcaaaactttcagtcgatgctcaaaacttactacacataagaaaattcatacaggagagaaaccttacaaatgtgaaaaatgtgctaaagcttttagccagtcttcaaccctttctacatataagataattcacactggagagaaatgctacaaatgtgaagaatgtggcaaagtttttaaccgatcttcaaaccttacagaccataaaaaaattcatacaggagagaaatcctacaaatgtgaagaatgtgacaaggcctttaacctgtcctcaacgcttactaaacataaggtaattcatactggagagaaactgtacaaatgtaaagaatgtggtaaagcttttaaacagttctcacaccttgctatacataatataattcatactggagagaaactctacaaatgtgaagaatgtggcaaagcttttaacttatcctcaaaccttactgcacataagaaaaatcgtactggagagaaaccctacaaatgtgaagaatgtggcaaagctaacctatcatcaacccttactccacataagacaattcatatttgagagaaaccctgcaaatgtgaagaatgtggcaatgcttgtaactaaatctcaaactttactaaacataagaaaattaatactggaaactttacaaacctgaaagatgtgacaatgattttgacaacaccttcaaacttttctaaacataaaataaatcatactggtgagaaatcttaaaaatatgaagaatggtacaaagcctttaaatggttgtcacacttgattgtaggtaagataatttatactggaggaaactcccagaagtgtgaagaatgtggcaaaacttttaatttttcacaccttatagcacaggaaagcacttcagaaaaattgtacaaatataaatgtggaaaagccattaatatctgcttacatcttactcaacattagagagttagtgcttaataaaagcattataaaagcaattagtgtaaaatcagaaaatgaaagttttttttttttttttagatggagtcttgctctgtcacccaggctggagtgcagtggtgtgatcttggctcactgcaacctctgcctcccaggttcaagcaattctcctgccttagcctccagagtagctgagactacaggcacacaccaccacatttggctaatttttttatttttagtagagactggctatcaccatgttggccaggctgatcttgaactcctgacctcaagtgatccacatgcctctgcctcccaaagtgctgggattataggtgtgagtcactgtgcctgacaaatataagcctttaaagagaagaaggttttcattttgaagacaaacattaggtacataaagagggttgtagtgtctttatttgtatcacagattttattgtacacattatgtactaaaggaaaatcctgaagcagtgctcaaactttgatcaacatcagggagtttatattggagaaaaactgcaaatgtaatatatttggaaaaacatttttcaaaaactactgcttagaaaacaccaggggatttatactaaaatatatttttgcagatgcagtaagtataaaagaaatttaatccaaaattaagtgtgtgtaaatatcagagaattcacagtagaaatatctaaggcactgacattttagacattgaactaatcagtgtgctgagtacagaaaataatccaaaattaaagttggtagataaattatttatatataactttaaaagaggtagaaatatttttagttataattacatttaaagtatacttttttctttgaaaaaattacaaaatttttaaaaagtgaatgatgtaattcaactcaaattacttcatgcttttcattctattgtattcacatgtgaaagcatgtgatcaattgctgcttcatcaaagatatgagacattcttttttgttaggtgggcaatattttttaccttttctatggaagagtaaagacattacaatgtaggatgcatgataaaaatctaagtggagaggctctttgtgtttaatttataatattgaatgatgtatgagggaagtgttcagaggaatattctgcattctagtgaaaatatcttttattttagttaaaattaaattaaaattagtagtatatcattttactaactgtacttttatgtaataaaatgcagcacatttaaaaaattttagattattgtgaacttaattttttaattaaactttttttttaacatgttaagaccaattgtgcattcagtgaagtattatcatgccactaacttcaacctatcccaccttactcaagggtgttggtaaaagatagtaacaatgtactatttaataacagagtggactaacatctctaataatttctcttgccagtgactttaaactaaagaacttaattaaagaacattgttcccataggttaaatttttattctttttcttatttaaacatatttttcttaacttttgtgggtacatagtgtgtgtatatatttatgccatatatggcatattttgatacaggcatatgaataggtattaatcacatcagggcaaatgaaatatccatcaactccagcatttatcatttgtattacaaaccgattctacacttttagttactttaaaatgtacaagtaaattgctattgactatagggtcattttcatgggtataataaaaattatatacaagtataaataaaatcctgagtcttaaaattctgagtcctgcttaaacattttaaaaattttgttatgtatttttctttgaacatgtctctctgcctgcaaacataacagaattttagtattggtttacatagagttaactatacccatatattactctaaaaataaatgttaagtgcaagaaagttatggactgtttttgtgtgagtgtgagtttgtacctattttcaaaagaaaagagcaatattggagcaaaacaaatattttaataaagtaatgtactagacaactgaaaacttc

SEQ ID NO: 870 - protein, 483 aa, Homo sapiens
MKRHEMVAKHLVMFYYFAQHLWPEQNIRDSFQKVTLRRYRKCGYENLQLRKGCKSVVECKQHKGDYSGLNQCLKTTLSKIFQCNKYVEVFHKISNSNRHKMRHTENKHFKCKECRKTFCMLSHLTQHKRIQTRVNFYKCEAYGRAFNWSSTLNKHKRIHTGEKPYKCKECGKAFNQTSHLIRHKRIHTEEKPYKCEECGKAFNQSSTLTTHNIIHTGEIPYKCEKCVRAFNQASKLTEHKLIHTGEKRYECEECGKAFNRSSKLTEHKYIHTGEKLYKCEECGKAFNQSSTLTTHKRIHSGEKPYKCEECGKAFKQFSNLTDHKKIHTGEKPYKCEECGKAFNQLSNLTRHKVIHTGEKPYKCGECGKAFNQSSALNTHKIIHTGENPHKCRESGKVFHLSSKLSTCKKIHTGEKLYKCEECGKAFNRSSTLIGHKRIHTGEKPYKCEECGKAFNQSSTLTTHKIIHTEEKQYKCDECGKAST

SEQ ID NO: 871 - DNA, 2829 bp, Homo sapiens
gactagtctatgcacggccgaagcttgagtcatcatcagggaagtaaatgtggttagaaatctgaagtccagtaattttccttgtcatattaattactttgctattaagctgtcactttgcttagccttctccccccaggaaaaagccttttctgtccatgctgggtatgaacatgctactcatcactttgttcttgctactccccttatccatgttaaaaggagaaccctgggagggatgcctccactgcacccacactacgtggtcggggaacatcatgactaaaaccctgttgtatcacacttattatgagtgtgctgggacctgcctaggaacttgtactcacaaccagacaacctactcagtctgtgacccaggaaggggccagccttatgtgtgttatgaccctaagtcttcacctgggacctggtttgaaattcatgtcgggtcaaaggaaggggatcttctaaaccaaaccaaggtatttccctctggcaaggatgtcgtatccttatactttgatgtttgccagatagtatccatgggctcactctttcccgtaatcttcagttccatggagtactatagtagctgccataaaaataggtatgcacaccctgcttgttccaccgattccccagtaacaacttgctgggactgcacaacgtggtccactaaccaacaatcactagggccaattatgcttaccaaaataccattagaaccagattgtaaaacaagcacttgcaattctgtaaatcttaccatcttagagccagatcagcccatatggacaacaggtttaaaagcaccgctaggggcacgagtcagcggtgaagaaattggcccaggagcctatgtctatctatatatcataaagaaaactcggacccgctcaacccaacagttccgagtttttgagtcattctatgagcatgttaaccagaaattgcctgagccccctcccttggccagtaatttattcgcccaactggctgaaaacatagccagcagcctgcacgttgcttcatgttatgtctgtgggggaatgaacatgggagaccaatggccatgggaagcaagggaactaatgccccaagataatttcacactaaccgcctcttccctcgaacctgcaccatcaagtcagagcatctggttcttaaaaacctccattattggaaaattctgtattgctcgctggggaaaggcctttacagacccagtaggagagttaacttgcctaggacaacaatattacaacgagacactaggaaagactttatggaggggcaaaagcaataattctgaatcaccacacccaagcccattctctcgtttcccatctttaaaccattcttggtaccaacttgaagctccaaatacctggcaggcaccctctggcctctactggatctgtgggccacaagcatatcgacaactgccagctaaatggtcaggggcctgtgtactggggacaattaggccgtccttcttcctaatgcccctaaaacagggagaagccttaggataccccatctatgatgaaactaaaaggaaaagcaaaagaggcataactataggagattggaaggacaatgaatggcctcctgaaagaataattcaatattatggcccagccacctgggcagaagatggaatgtggggataccgcaccccagtttacatgcttaaccgcattataagattgcaggcagtactagaaatcattaccaatgaaactgcaggggccttgaatctgcttgcccagcaagccacaaaaatgagaaatgtcatttatcaaaatagactggccttagactacctcctagcccaggaagagggagtatgcggaaagttcaaccttactaactgctgcctggaacttgatgacgaaggaaaggtcatcaaagaaataactgctaaaatccaaaagttagctcacatcccagttcagacttggaaaggatagtctccagattcccttttcagaggttggttctcatcccttggaggatttaaaaccttagtacaaatagtcctagccatattgggagtttgccttatactcccttgtctcttacccctcattgtcaaaaatatccaaacagccatagaggctcttgtggacagacggactaccacacgactaatggccctaactaagtattaacccctgccaagaaaagagctacttcctcttgaagtaaatgaagatagtgatgctttctcttaaactttacttataaaaagcatcaaaggggggaatgaagcaggaaatataaaaggaaaaacaagtaaagggaaaacaagtcctttcctgaccagtctgactcactccaaagtcctgctggagctatgataattatctgcaaggccaggcaggggctccgaaggagtgggctccaggagcagggatgagaaaaacaagttctccttatcagtttccctgtttgaaattctctccccataacattattctttgttctgctctcacaactatttttgtaactatttctgcaagtctgtaaagattttgtaagttcttgtttttctttctgtagcatggcaaggtcacaagacatgtttaagtaaggtaggctcatgttgcaaatcctgttgtaaaacctgtcacggtatgattaactgcctttgttctgcttctgtaagactgctttctcacctcgcaggttttgcgccaaaaacccgacttgcccctgcctgatgcatgtataaaagtcaagccctgtctttgttcagggctcagcctttggatgttaatccgctgggccagtggccacctaaataaaaccttcctgttgcaccca

SEQ ID NO: 872 - protein, 604 aa, Homo sapiens
MLGMNMLLITLFLLLPLSMLKGEPWEGCLHCTHTTWSGNIMTKTLLYHTYYECAGTCLGTCTHNQTTYSVCDPGRGQPYVCYDPKSSPGTWFEIHVGSKEGDLLNQTKVFPSGKDVVSLYFDVCQIVSMGSLFPVIFSSMEYYSSCHKNRYAHPACSTDSPVTTCWDCTTWSTNQQSLGPIMLTKIPLEPDCKTSTCNSVNLTILEPDQPIWTTGLKAPLGARVSGEEIGPGAYVYLYIIKKTRTRSTQQFRVFESFYEHVNQKLPEPPPLASNLFAQLAENIASSLHVASCYVCGGMNMGDQWPWEARELMPQDNFTLTASSLEPAPSSQSIWFLKTSIIGKFCIARWGKAFTDPVGELTCLGQQYYNETLGKTLWRGKSNNSESPHPSPFSRFPSLNHSWYQLEAPNTWQAPSGLYWICGPQAYRQLPAKWSGACVLGTIRPSFFLMPLKQGEALGYPIYDETKRKSKRGITIGDWKDNEWPPERIIQYYGPATWAEDGMWGYRTPVYMLNRIIRLQAVLEIITNETAGALNLLAQQATKMRNVIYQNRLALDYLLAQEEGVCGKFNLTNCCLELDDEGKVIKEITAKIQKLAHIPVQTWKG

SEQ ID NO: 873 - DNA, 198 bp, Homo sapiens
atggcgacggccgtcctgctgagcgtgtcggtgccgcggtgggagcgggtggcccggtatgcagtgtgcgctgccggaatcctgctctccatctacgcctaccatgtggagaggcagaaggagcgggaccccgagcaccgggccctctgcgacctggggccctgggtgaagtgctccgtcgcccttgcctccaggtag

SEQ ID NO: 874 - protein, 65 aa, Homo sapiens [sequence omitted]

SEQ ID NO: 875 - DNA, 5972 bp, Homo sapiens
ctgtgtgttcagccattactttgctcggcgctgctcccaggcatctccgaccctcggtgctgtggggagccccacacttgggctcctcgcctctcgccctcgctccccgtccctcctcccctctctccgccccttcccccttttctttctcctctctttcttcccctctctcccttctttcggccgccgtctcccccgcgccctcctcggggcggagggaagccgtgaagggggagggagggctcggtgtcaatttttttttgtgtggctgcggccgtagcctgtggcgggcaagcggggagaccccggcgcagcagaaccatggatggcccgacgcggggccatggactccgcaaaaagcggcggtcgcggtcgcagcgagaccgggagaggcgctcccggggcgggctgggggccggcgcggccggcggcggcggggctggccggacccgggcgctctcactcgcctcgtcgtcgggctccgacaaggaagacaatgggaagcccccgtcctccgccccgtcccggcccagacccccgcggaggaagcggagagagtccacctcggcagaagaggacatcattgatggatttgccatgaccagctttgtcacttttgaagcgctggagaaagatgtagcacttaagcctcaggaacgtgtggagaaacgccagacgcccctgaccaagaagaaacgagaagcacttaccaatggcttgtcctttcattcaaagaagagcagactcagccacccacaccactacagctcagatcgagaaaatgaccgcaatctctgccagcaccttgggaagagaaagaaaatgccgaaggcactcagacagctcaagccaggacagaacagctgcagggacagtgacagtgaaagtgccagtggagaatccaagggcttccaccggagcagctctcgggaaaggctcagtgatagttcagctccttccagcttgggaacaggctacttctgtgacagtgacagtgaccaggaagagaaggcatcagatgccagctctgaaaaactcttcaacactgttattgtaaacaaagatccggagttaggtgttggcacgctaccagaacatgacagccaggatgcagggccgattgtccccaagatatcgggtctagagagaagccaggagaagagccaggactgttgcaaagagccaatctttgagcctgtggtgcttaaagacccctgccctcaggtcgcacagccaataccccagccgcagacggagccccaactccgagctccttctccggaccctgacttggtgcagcgcacagaggccccacctcaacccccacctctgagtacacagccaccacagggccctcctgaggcccagctccagcctgccccgcagcctcaggtgcagaggccacccaggccacagtcccccacccagctgctccatcagaacctcccacctgtgcaggcccacccctctgctcagagcctctcccagccattgtcagcctacaacagcagtagcttaagcctcaacagtttaagcagcagcagaagcagcactccagcgaagactcagcccgccccacctcacatctcccaccacccctctgcctccccgttccccctctccctgcccaaccacagccccctgcacagcttcacacccaccctccagccccccgcacactcacatcaccccaatatgtttgcccctcccactgctctgcctcctccaccaccactgacatcaggaagtctgcaggtggccggacacccggccgggagcacttactcagagcaagacatcttgcgacaggaactgaacactcgttttttggcctctcagagtgctgaccgcggggcttccctgggccctccgccctacctgcggaccgagttccatcagcaccagcaccagcaccagcacacccaccagcacacgcaccagcacaccttcacgccgttcccccacgccatcccacccaccgccatcatgccgacgccagcacctcccatgtttgacaaataccctacaaaagttgacccattctaccggcacagtctcttccattcctatcctcctgcagtgtcgggcatcccccctatgatcccacccactggcccttttggttcactacaaggagcatttcagccgaagacatccaaccctatcgatgtcgctgctcggcctgggacagtcccacacactttactccaaaaggacccgaggttgacagatcctttcagacctatgttaaggaaaccagggaagtggtgtgctatgcatgttcacatcgcctggcagatttaccaccaccaacagaaagtcaagaaacagatgcagtcagacccacataagctggactttggactgaaacctgagttcctgagccgccctccaggccccagtctttttggagccatccaccacccccatgacctggcacggccttcaactttgttctctgccgctggtgctgcacacccaactgggaccccttttgggccacctcctcatcacagcaacttcctcaaccctgctgcccacctagagccttttaatcggccgtctacattcacaggcctagcagcagttggtggcaatgccttcgggggacttggaaatccttccgttacacccaactcaatgttcggccacaaggatggccccagtgtgcagaactttagcaaccctcacgaaccctggaaccggctgcaccgaacgcctccgtcgttcccgacccctccgccctggctgaagccaggggagctggagcgcagcgcgtccgctgcagctcatgacagagatagagatgtagataaacgagactcatctgttagtaaagatgacaaagaaagggaaagcgtcgagaagagacactccagccacccttcaccagcacctgtcctcccggtgaatgccctgggacatacccgcagctccactgaacagatccgggctcatctgaacactgaggctcgggagaaggacaaacccaaagagagggagagagaccactcggaatcccgcaaggacctggccgccgacgagcacaaggcgaaagagggccacctgcccgagaaggacgggcacggccacgaggggcgcgccgcgggcgaagaggccaagcagctggcccgggtgccgtctccctacgtgcggaccccggtggtggagagtgccaggcccaacagcacctcgagccgggaggccgagccgcgcaagggtgagccggcctacgagaaccccaagaagagctccgaggtcaaggtgaaggaggagcggaaggaagaccatgacctgcctccagaggccccgcagacccaccgggcctcggagccgccgcctcccaactcctcgtccagcgtgcacccggggcccctggcctcgatgcccatgacggtgggggtgacgggcattcaccccatgaacagcatcagcagcctggacaggactcgcatgatgacccccttcatgggcatcagccccctcccgggcggagagcgcttcccgtacccttctttccactgggaccccatccgggaccccttgagggatccttaccgagaacttgacattcaccggagagacccgctgggcagggacttcctgctaaggaacgacccgctccaccggctctcgactccccggctgtacgaagccgaccgctccttcagggaccgggagcctcacgactacagccaccaccaccaccaccaccaccacccgctgtctgtggaccctcggcgggagcacgagcggggaggccacctggacgagcgggagcgcttgcacatgctcagagaagactacgagcacacgcggctccactccgtgcaccccgcctccctcgacggacacctcccccaccccagcctcatcaccccgggactccccagcatgcactatccccgcatcagccccaccgcgggcaaccagaacggactcctcaacaagacccctccgacagcagcgctgagcgcacctcccccgctcatctccacgctggggggccgcccggtctctcccagaaggacgactcctctgtccgcagagataagggagaggcccccttcccacacgctgaaggatatcgaggcccgataagccgagaacaggagcaagaacgaggaagaagaaaccctaggcagacaccaggccaggcttgagagacagaactcctgcatggctcacacagactgggggggaaagccccaccccttccccttgtaaaaaatgtatagactcagtgcacattttgaaatgttttgtatattatatgttgagatttttcagatcttttagcccagtcatatgttctcacgtctcctactttttgtttctcgtataaaactttttgatttgaaccaaaacagtgaagatgacaacacacaccaattggatgataattgtagcgggggcggtgggggggagaagtccacgccatccatcatgcaaaattctttcagatgaggtgggaaggccgtgtacatagttatgtaaaaagagattgcttcatgagctaatggttcatatatgcaaaagggtaagatgaaagctttactttgtacaaatgtaaatagataaagtaacataatacattaatacttcttaaaatgtgctatttgcaaacttacttaatatcagtgaacacagtcggctaaagctgtgttcccatatattgttatagacagctaaacccttcaactatgcaatgaatgttcgggcttttcacaaaagcccgcctaactcaaaggagccttttcaaatccatttacagcatacttaaggtcatattttccctgaacaagcgcttacgtgatatgactctgttttccttgcttgttttttttcaaacggagaaacatcctgttttgcaaattggaccccaggctggaacttagcatctgaagttgccgcttgtgggctctgggggaaagtgtagccccggagaggtaactgaggacatgagcaaccagtgccagggagggtgggatttgccagatgccaaaatcaggggacgggtggtggtgtctgtcagacacacacaggtcgccagtgacttcacacacacctcatgtgagaaccatgccttttttagtgtgtcctatttcatacctgtacacacttcctcgttttgtaatgagatttacttacacccaaacagatcctgaaagaaagcttcaagttttctcagatgatggatatgttttcactgtattcaataactgacggatgtaaggtgcacgtttcctgatgtgacgcactgtattccagctggtgatcaagtctgggaacagccgtaacaggtcaaccttgtggagccatcgcgagttagagggtgaaagatggcagaaaaaaaagtcttgtgtgtgagtgtgttttttgagtttgcatcaatcttaatgtctcttcataatacttttataatacattaagcctcttgtctacatatttggagagaatatgactttactagcagagaaatacaatatatcttgtctactggactgtaaaatatatgtatgaaataaaattagttccatttggtcttctagtatattaaagtgctatctgacgttgttatcctgtttttgcaaaaaaaaaaaaaaaaaaaagttaactacagaccattgtttctaataagcagagagatctattttagtagtaaactgaaggtttagttgtgagcttcagattttgtgaactccagatgttgtgcggtgtttttttttttttttaagacaacaactaaaaaaatgcaaggaatatgtacactggaactgtagtggtagctttcagtattgtaaagagattgttctatacggacctttttgctgtttatcctgtatgtaataaagtcctttctagatcctatgtgaaaagaaaagtgaagcaactgaatcttcagcatgttctcatcggcggagccttcttgtgtaatgtaaactgtgccatgttattaaaaaatgtgaact

SEQ ID NO: 876 - protein, 1259 aa, Homo sapiens
MDGPTRGHGLRKKRRSRSQRDRERRSRGGLGAGAAGGGGAGRTRALSLASSSGSDKEDNGKPPSSAPSRPRPPRRKRRESTSAEEDIIDGFAMTSFVTFEALEKDVALKPQERVEKRQTPLTKKKREALTNGLSFHSKKSRLSHPHHYSSDRENDRNLCQHLGKRKKMPKALRQLKPGQNSCRDSDSESASGESKGFHRSSSRERLSDSSAPSSLGTGYFCDSDSDQEEKASDASSEKLFNTVIVNKDPELGVGTLPEHDSQDAGPIVPKISGLERSQEKSQDCCKEPIFEPVVLKDPCPQVAQPIPQPQTEPQLRAPSPDPDLVQRTEAPPQPPPLSTQPPQGPPEAQLQPAPQPQVQRPPRPQSPTQLLHQNLPPVQAHPSAQSLSQPLSAYNSSSLSLNSLSSSRSSTPAKTQPAPPHISHHPSASPFPLSLPNHSPLHSFTPTLQPPAHSHHPNMFAPPTALPPPPPLTSGSLQVAGHPAGSTYSEQDILRQELNTRFLASQSADRGASLGPPPYLRTEFHQHQHQHQHTHQHTHQHTFTPFPHAIPPTAIMPTPAPPMFDKYPTKVDPFYRHSLFHSYPPAVSGIPPMIPPTGPFGSLQGAFQPKTSNPIDVAARPGTVPHTLLQKDPRLTDPFRPMLRKPGKWCAMHVHIAWQIYHHQQKVKKQMQSDPHKLDFGLKPEFLSRPPGPSLFGAIHHPHDLARPSTLFSAAGAAHPTGTPFGPPPHHSNFLNPAAHLEPFNRPSTFTGLAAVGGNAFGGLGNPSVTPNSMFGHKDGPSVQNFSNPHEPWNRLHRTPPSFPTPPPWLKPGELERSASAAAHDRDRDVDKRDSSVSKDDKERESVEKRHSSHPSPAPVLPVNALGHTRSSTEQIRAHLNTEAREKDKPKERERDHSESRKDLAADEHKAKEGHLPEKDGHGHEGRAAGEEAKQLARVPSPYVRTPVVESARPNSTSSREAEPRKGEPAYENPKKSSEVKVKEERKEDHDLPPEAPQTHRASEPPPPNSSSSVHPGPLASMPMTVGVTGIHPMNSISSLDRTRMMTPFMGISPLPGGERFPYPSFHWDPIRDPLRDPYRELDIHRRDPLGRDFLLRNDPLHRLSTPRLYEADRSFRDREPHDYSHHHHHHHHPLSVDPRREHERGGHLDERERLHMLREDYEHTRLHSVHPASLDGHLPHPSLITPGLPSMHYPRISPTAGNQNGLLNKTPPTAALSAPPPLISTLGGRPVSPRRTTPLSAEIRERPPSHTLKDIEAR

SEQ ID NO: 877 - DNA, 3298 bp, Homo sapiens
atggcttcactgagaagagtcaaagtgctgttggtgttgaacttgatcgcggtagccggcttcgtgctcttcctggccaagtgccggcccatcgcggtgcgcagcggagacgccttccacgagatccggccgcgcgccgaggtggccaacctcagcgcgcacagcgccagccccatccaggatgcggtcctgaagcgcctgtcgctgctggaggacatcgtgtaccggcagctgaatggcttatccaaatcccttgggctcattgaaggttatggtgggcggggtaaagggggccttccggctactctttccccggctgaagaagaaaaggctaagggaccccatgagaagtatggctacaattcatacctcagtgaaaaaatttcactggaccgttccattccggattatcgtcccaccaagtgtaaggagctcaagtactccaaggacctgccccagatatccatcatattcatcttcgtgaacgaggccctgtcggtgatcctgcggtccgtgcacagtgccgtcaatcacacgcccacacacctgctgaaggaaatcattctggtggatgacaacagcgacgaagaggagctgaaggtccccctagaggagtatgtccacaaacgctaccccgggctggtgaaggtggtaagaaatcagaagagggaaggcctgatccgcgctcgcattgagggctggaaggtggctaccgggcaggtcactggcttctttgatgcccacgtggaattcaccgctggctgggctgagccggttctatcccgcatccaggaaaaccggaagcgtgtgatcctcccctccattgacaacatcaaacaggacaactttgaggtgcagcggtacgagaactcggcccacgggtacagctgggagctgtggtgcatgtacatcagccccccaaaagactggtgggacgccggagacccttctctccccatcaggaccccagccatgataggctgctcgttcgtggtcaacaggaagttcttcggtgaaattggtcttctggatcctggcatggatgtatacggaggagaaaatattgaactgggaatcaaggtatggctctgtgggggcagcatggaggtccttccttgctcacgggtggcccacattgagcggaagaagaagccatataatagcaacattggcttctacaccaagaggaatgctcttcgcgttgctgaggtctggatggacgattacaagtctcatgtgtacatagcgtggaacctgccgctggagaatccgggaattgacatcggtgatgtctccgaaagaagagcattaaggaaaagtttaaagtgtaagaatttccagtggtacctggaccatgtttacccagaaatgagaagatacaataataccgttgcttacggggagcttcgcaacaacaaggcaaaagacgtctgcttggaccaggggccgctggagaaccacacagcaatattgtatccgtgccatggctggggaccacagcttgcccgctacaccaaggaaggcttcctgcacttgggtgccctggggaccaccacactcctccctgacacccgctgcctggtggacaactccaagagtcggctgccccagctcctggactgcgacaaggtcaagagcagcctgtacaagcgctggaacttcatccagaatggagccatcatgaacaagggcacgggacgctgcctggaggtggagaaccggggcctggctggcatcgacctcatcctccgcagctgcacaggtcagaggtggaccattaagaactccatcaagtagagggagggagctggggcactggagcctggcccccaggacatggctgctccccccaacatctggaccagctgccctggcggagagacagcaaggggccggcaggtgctcgatgggccccccagggcttctccagggcagcacagggaccccggatgaagactctgtcccccctcaggcattcagctgcccacaagtttcctgcaccctggaaaagccccccacccttcctctgggaaactgacagctgtcttccacagcctctgatgtggacctggtactgaggagcaagactgtccagttctcctccacatctcccatcccagaatcaggatctgggactggcagggtcccctcctgtgtctcatctcttgcagcagcagctgctgaactccagccatcaacacggtgggaggcagcgggggcttcagccatgtcctagctccccgccctaaaaggaggcagtgaggaccaggcactatttcctccgaggttacttctacccagatgacacctgcctgttcacgccccaaggcagctactgcccctaacccttcccaccagggtagctttgggcactgcagctctggacttttctggcccctcctgagatgacctgatggagctgatgctttctctcctaatccctgggcactaggctcttatcagtgtgcttgggccagctctcctgcctgtgtctagaggaagccagagacagaaataggctaagcctgcagtaggatctcagccacaagggccccgcaggatggagctgggtcaaggaccagggagccctgactcccagaggctgccaccggggagaagcagcggtcctccatccagaacctaagggctgaagcaaaggctgccaggacccttgaagatgcttttggctcacctcatttcaccccacgctctgctggctggcagaggagaaggcagtcgtttcctctctgaagagtatttttttcgattgccctctggttagggtgcacatataaatcagagttaatatatgaacgcgtgtgcatgcacaagtgtgtgtgtgcctgcgtgctgtgcgtggcagggtgtgtgtgtgtgtgtctggctgtgcgttccggagtgtgtgacgatgctgacctagctgtgtggccttgggcttgctgcttcattactcacctggatggggacgagggatgagaagggtgtgggtttggccccatgtcactggccggaaggatgtgtctcagccctgccctgtggggtgcccccgatgggaggctgtcccatctcccagtccccatctctttttccccacactgtccctggccaagccctgcccagagctgaaccctgtagctgcccccttgccctgtgtgggattcgcagtgtctcatttggtgacgtcttactggtgatcatctcctcaccccatctcccaccttgtggaataaatacatgttagcacttcccaaaaaaaaaaaaaaaaaaaaaaaaaaaaagaaaaaaaaaaaaaaaaaaa

SEQ ID NO: 878 - protein, 598 aa, Homo sapiens
MASLRRVKVLLVLNLIAVAGFVLFLAKCRPIAVRSGDAFHEIRPRAEVANLSAHSASPIQDAVLKRLSLLEDIVYRQLNGLSKSLGLIEGYGGRGKGGLPATLSPAEEEKAKGPHEKYGYNSYLSEKISLDRSIPDYRPTKCKELKYSKDLPQISIIFIFVNEALSVILRSVHSAVNHTPTHLLKEIILVDDNSDEEELKVPLEEYVHKRYPGLVKVVRNQKREGLIRARIEGWKVATGQVTGFFDAHVEFTAGWAEPVLSRIQENRKRVILPSIDNIKQDNFEVQRYENSAHGYSWELWCMYISPPKDWWDAGDPSLPIRTPAMIGCSFVVNRKFFGEIGLLDPGMDVYGGENIELGIKVWLCGGSMEVLPCSRVAHIERKKKPYNSNIGFYTKRNALRVAEVWMDDYKSHVYIAWNLPLENPGIDIGDVSERRALRKSLKCKNFQWYLDHVYPEMRRYNNTVAYGELRNNKAKDVCLDQGPLENHTAILYPCHGWGPQLARYTKEGFLHLGALGTTTLLPDTRCLVDNSKSRLPQLLDCDKVKSSLYKRWNFIQNGAIMNKGTGRCLEVENRGLAGIDLILRSCTGQRWTIKNSIK

SEQ ID NO: 879 - DNA, 3822 bp, Homo sapiens
cggcggaggcaaggcggccgcggcgcggagcagccgacgcacgctagtgggtccgcccgccaccgccccttcctcggcgtccgctcccgcccttgccgtcccccgcgcggctccgcgcctcgggccccgggcgcagccagccctccagacgcccgcggtcccggcggcgtgtgctgctcttcctccgcccgcggtttccagcgccgctccttcccccgcttgggcagggagggggcattgatcttcgatcgcgaagatggctgctggctgcctgctggccttgactctgacacttttccaatctttgctcatcggcccctcgtcggaggagccgttcccttcggccgtcactatcaaatcatgggtggataagatgcaagaagaccttgtcacactggcaaaaacagcaagtggagtcaatcagcttgttgatatttatgagaaatatcaagatttgtatactgtggaaccaaataatgcacgccagctggtagaaattgcagccagggatattgagaaacttctgagcaacagatctaaagccctggtgcgcctggcattggaagcggagaaagttcaagcagctcaccagtggagagaagattttgcaagcaatgaagttgtctactacaatgcaaaggatgatctcgatcctgagaaaaatgacagtgagccaggcagccagaggataaaacctgttttcattgaagatgctaattttggacgacaaatatcttatcagcacgcagcagtccatattcctactgacatctatgagggctcaacaattgtgttaaatgaactcaactggacaagtgccttagatgaagttttcaaaaagaatcgcgaggaagacccttcattattgtggcaggtttttggcagtgccactggcctagctcgatattatccagcttcaccatgggttgataatagtagaactccaaataagattgacctttatgatgtacgcagaagaccatggtacatccaaggagctgcatctcctaaagacatgcttattctggtggatgtgagtggaagtgttagtggattgacacttaaactgatccgaacatctgtctccgaaatgttagaaaccctctcagatgatgatttcgtgaatgtagcttcatttaacagcaatgctcaggatgtaagctgttttcagcaccttgtccaagcaaatgtaagaaataaaaaagtgttgaaagacgcggtgaataatatcacagccaaaggaattacagattataagaagggctttagttttgcttttgaacagctgcttaattataatgtttccagagcaaactgcaataagattattatgctattcacggatggaggagaagagagagcccaggagatatttaacaaatacaataaagataaaaaagtacgtgtattcacgttttcagttggtcaacacaattatgacagaggacctattcagtggatggcctgtgaaaacaaaggttattattatgaaattccttccattggtgcaataagaatcaatactcaggaatatttggatgttttgggaagaccaatggttttagcaggagacaaagctaagcaagtccaatggacaaatgtgtacctggatgcattggaactgggacttgtcattactggaactcttccggtcttcaacataaccggccaatttgaaaataagacaaacttaaagaaccagctgattcttggtgtgatgggagtagatgtgtctttggaagatattaaaagactgacaccacgttttacactgtgccccaatgggtattactttgcaatcgatcctaatggttatgttttattacatccaaatcttcagccaaagaaccccaaatctcaggagccagtaacattggatttccttgatgcagagttagagaatgatattaaagtggagattcgaaataagatgattgatggggaaagtggagaaaaaacattcagaactctggttaaatctcaagatgagagatatattgacaaaggaaacaggacatacacatggacacctgtcaatggcacagattacagtttggccttggtattaccaacctacagtttttactatataaaagccaaactagaagagacaataactcaggccagatcaaaaaagggcaaaatgaaggattcggaaaccctgaagccagataattttgaagaatctggctatacattcatagcaccaagagattactgcaatgacctgaaaatatcggataataacactgaatttcttttaaatttcaacgagtttattgatagaaaaactccaaacaacccatcatgtaacgcggatttgattaatagagtcttgcttgatgcaggctttacaaatgaacttgtccaaaattactggagtaagcagaaaaatatcaagggagtgaaagcacgatttgttgtgactgatggtgggattaccagagtttatcccaaagaggctggagaaaattggcaagaaaacccagagacatatgaggacagcttctataaaaggagcctagataatgataactatgttttcactgctccctactttaacaaaagtggacctggtgcctatgaatcgggcattatggtaagcaaagctgtagaaatatatattcaagggaaacttcttaaacctgcagttgttggaattaaaattgatgtaaattcctggatagagaatttcaccaaaacctcaatcagagatccgtgtgctggtccagtttgtgactgcaaaagaaacagtgacgtaatggattgtgtgattctggatgatggtgggtttcttctgatggcaaatcatgatgattatactaatcagattggaagattttttggagagattgatcccagcttgatgagacacctggttaatatatcagtttatgcttttaacaaatcttatgattatcagtcagtatgtgagcccggtgctgcaccaaaacaaggagcaggacatcgctcagcatatgtgccatcagtagcagacatattacaaattggctggtgggccactgctgctgcctggtctattctacagcagtttctcttgagtttgacctttccacgactccttgaggcagttgagatggaggatgatgacttcacggcctccctgtccaagcagagctgcattactgaacaaacccagtatttcttcgataacgacagtaaatcattcagtggtgtattagactgtggaaactgttccagaatctttcatggagaaaagcttatgaacaccaacttaatattcataatggttgagagcaaagggacatgtccatgtgacacacgactgctcatacaagcggagcagacttctgacggtccaaatccttgtgacatggttaagcaacccagataccgaaaagggcctgatgtctgctttgataacaatgtcttggaggattatactgactgtggtggtgtttctggattaaatccctccctgtggtatatcattggaatccagtttctactactttggctggtatctggcagcacacaccgcctgttatgaccttctaaaaaccaaatctgcatagttaaactccagaccctgccaaaacatgagccctgccctcaattacagtaacgtagggtcagctataaaatcagacaaacattagctgggcctgttccatggcataacactaaggcgcagactcctaaggcacccactggctgcatgtcagggtgtcagatccttaaacgtgtgtgaatgctgcatcatctatgtgtaacatcaaagcaaaatcctatacgtgtcctctattggaaaatttgggagtttgttgttgcattgttggt

SEQ ID NO: 880 - protein, 1091 aa, Homo sapiens
MAAGCLLALTLTLFQSLLIGPSSEEPFPSAVTIKSWVDKMQEDLVTLAKTASGVNQLVDIYEKYQDLYTVEPNNARQLVEIAARDIEKLLSNRSKALVRLALEAEKVQAAHQWREDFASNEVVYYNAKDDLDPEKNDSEPGSQRIKPVFIEDANFGRQISYQHAAVHIPTDIYEGSTIVLNELNWTSALDEVFKKNREEDPSLLWQVFGSATGLARYYPASPWVDNSRTPNKIDLYDVRRRPWYIQGAASPKDMLILVDVSGSVSGLTLKLIRTSVSEMLETLSDDDFVNVASFNSNAQDVSCFQHLVQANVRNKKVLKDAVNNITAKGITDYKKGFSFAFEQLLNYNVSRANCNKIIMLFTDGGEERAQEIFNKYNKDKKVRVFTFSVGQHNYDRGPIQWMACENKGYYYEIPSIGAIRINTQEYLDVLGRPMVLAGDKAKQVQWTNVYLDALELGLVITGTLPVFNITGQFENKTNLKNQLILGVMGVDVSLEDIKRLTPRFTLCPNGYYFAIDPNGYVLLHPNLQPKNPKSQEPVTLDFLDAELENDIKVEIRNKMIDGESGEKTFRTLVKSQDERYIDKGNRTYTWTPVNGTDYSLALVLPTYSFYYIKAKLEETITQARSKKGKMKDSETLKPDNFEESGYTFIAPRDYCNDLKISDNNTEFLLNFNEFIDRKTPNNPSCNADLINRVLLDAGFTNELVQNYWSKQKNIKGVKARFVVTDGGITRVYPKEAGENWQENPETYEDSFYKRSLDNDNYVFTAPYFNKSGPGAYESGIMVSKAVEIYIQGKLLKPAVVGIKIDVNSWIENFTKTSIRDPCAGPVCDCKRNSDVMDCVILDDGGFLLMANHDDYTNQIGRFFGEIDPSLMRHLVNISVYAFNKSYDYQSVCEPGAAPKQGAGHRSAYVPSVADILQIGWWATAAAWSILQQFLLSLTFPRLLEAVEMEDDDFTASLSKQSCITEQTQYFFDNDSKSFSGVLDCGNCSRIFHGEKLMNTNLIFIMVESKGTCPCDTRLLIQAEQTSDGPNPCDMVKQPRYRKGPDVCFDNNVLEDYTDCGGVSGLNPSLWYIIGIQFLLLWLVSGSTHRLL

SEQ ID NO: 881 - DNA, 6276 bp, Homo sapiens
attaaattaacaccatttgaaagagaacattgttttcatcatgaatgctaataaagatgaaagacttaaagccagaagccaagattttcacctttttcctgctttgatgatgctaagcatgaccatgttgtttcttccagtcactggcactttgaagcaaaatattccaagactcaagctaacctacaaagacttgctgctttcaaatagctgtattccctttttgggttcatcagaaggactggattttcaaactcttctcttagatgaggaaagaggcaggctgctcttgggagccaaagaccacatctttctactcagtctggttgacttaaacaaaaattttaagaagatttattggcctgctgcaaaggaacgggtggaattatgtaaattagctgggaaagatgccaatacagaatgtgcaaatttcatcagagtacttcagccctataacaaaactcacatatatgtgtgtggaactggagcatttcatccaatatgtgggtatattgatcttggagtctacaaggaggatattatattcaaactagacacacataatttggagtctggcagactgaaatgtcctttcgatcctcagcagccttttgcttcagtaatgacagatgagtacctctactctggaacagcttctgatttccttggcaaagatactgcattcactcgatcccttgggcctactcatgaccaccactacatcagaactgacatttcagagcactactggctcaatggagcaaaatttattggaactttcttcataccagacacctacaatccagatgatgataaaatatatttcttctttcgtgaatcatctcaagaaggcagtacctccgataaaaccatcctttctcgagttggaagagtttgtaagaatgatgtaggaggacaacgcagcctgataaacaagtggacgacttttcttaaggccagactgatttgctcaattcctggaagtgatggggcagatacttactttgatgagcttcaagatatttatttactccccacaagagatgaaagaaatcctgtagtatatggagtctttactacaaccagctccatcttcaaaggctctgctgtttgtgtgtatagcatggctgacatcagagcagtttttaatggtccatatgctcataaggaaagtgcagaccatcgttgggtgcagtatgatgggagaattccttatccacggcctggtacatgtccaagcaaaacctatgacccactgattaagtccacccgagattttccagatgatgtcatcagtttcataaagcggcactctgtgatgtataagtccgtatacccagttgcaggaggaccaacgttcaagagaatcaatgtggattacagactgacacagatagtggtggatcatgtcattgcagaagatggccagtacgatgtaatgtttcttggaacagacattggaactgtcctcaaagttgtcagcatttcaaaggaaaagtggaatatggaagaggtagtgctggaggagttgcagatattcaagcactcatcaatcatcttgaacatggaattgtctctgaagcagcaacaattgtacattggttcccgagatggattggttcagctctccttgcacagatgcgacacttatgggaaagcttgcgcagactgttgtcttgccagagacccctactgtgcctgggatggaaatgcatgctctcgatatgctcctacttctaaaaggagagctagacgccaagatgtaaaatatggcgacccaatcacccagtgctgggacatcgaagacagcattagtcatgaaactgctgatgaaaaggtgatttttggcattgaatttaactcaacctttctggaatgtatacctaaatcccaacaagcaactattaaatggtatatccagaggtcaggggatgagcatcgagaggagttgaagcccgatgaaagaatcatcaaaacggaatatgggctactgattcgaagtttgcagaagaaggattctgggatgtattactgcaaagcccaggagcacactttcatccacaccatagtgaagctgactttgaatgtcattgagaatgaacagatggaaaatacccagagggcagagcatgaggaggggaaggtcaaggatctattggctgagtcacggttgagatacaaagactacatccaaatccttagcagcccaaacttcagcctcgaccagtactgcgaacagatgtggcacagggagaagcggagacagagaaacaaggggggcccaaagtggaagcacatgcaggaaatgaagaagaaacgaaatcgaagacatcacagagacctggatgagctccctagagctgtagccacgtagttttctacttaatttaaagaaaagaattccttacctataaaaacattgccttctgttttgtatatcccttatagtaattcataaatgcttcccatggagttttgctaaggcacaagacaataatctgaataagacaatatgtgatgaatataagaaagggcaaaaaattcatttgaaccagttttccaagaacaaatcttgcacaagcaaagtataagaattatcctaaaaatagggggtttacagttgtaaatgttttatgttttgagttttggaatttattgtcatgtaaatagttgagctaagcaagccccgaatttgatagtgtataaggtgctttattccctcgaatgtccattaagcatggaatttaccatgcagttgtgctatgttcttatgaacagatatatcattcctattgagaaccagctaccttgtggtagggaataagaggtcagacacaaattaagacaactcccattatcaacaggaactttctcagtgagccattcactcctggagaatggtataggaatttggagaggtgcattatttctttctggccactggggttaaatttagtgtactacaacattgatttactgaagggcactaatgtttcccccaggatttctattgactagtcaggagtaacaggttcacagagagaagttggtgcttagttatgtgttttttagagtatatactaagctctacagggacagaatgcttaataaatactttaataagatatgggaaaatattttaataaaacaaggaaaacataatgatgtataatgcatcctgatgggaaggcatgcagatgggatttgttagaagacagaaggaaagacagccataaattctggctttggggaaaactcatatccccatgaaaaggaagaacaatcacaaataaagtgagagtaatgtaatggagctcttttcactagggtataagtagctgccaatttgtaattcatctgttaaaaaaaatctagattataacaaactgctagcaaaatctgaggaaacataaattcttctgaagaatcataggaagagtagacattttatttataaccaatgatatttcagtatatattttctctcttttaaaaaatatttatcatactctgtatattatttctttttactgcctttattctctcctgtatattggattttgtgattatatttgagtgaataggagaaaacaatatataacacacagagaattaagaaaatgacatttctggggagtggggatatatatttgttgaataacagaacgagtgtaaaattttaacaacggaaagggttaaattaactctttgacatcttcactcaaccttttctcattgctgagttaatctgttgtaattgtagtattgtttttgtaatttaacaataaataagcctgctacatgtaaaaagaaccaaactcacaatattaacataaacatctttcatattttgttagtactttcaaatgttttcaatttgactttccctctgaatatgcatggtgtgtttcctgtctgtttaagcagaactcacctttccttcttgtaacacagaacccttagccttcttctgttttgccttttcacgccctttatagtgtgaaatgaaaaattagtcacttcctcacatggaaggcagcttttcagaaaataacagacattgctcgtttctcatgcattctacatatcttgaaagaaaagtctgtgagaaaaccctgtgattagagggcaacttaatgcaagatctgtggctctatgttgagagcattctctctctgttatttttattttatttgcattgcttacctatctcaaagtagtcaaactgatatatgagattgagtactcccttttgatattatactgatgaatatttgtaggtgtttcactataaggaacagctaaggaataattttaataaaagtgaaccagaacaaatcactcatttaaaaagtaattcagaagaacagtgtggcatgatcagacttctaattgaatagcgtaacaacagtgtttgtaattatagatttgcttggacaaaatattccaggaactcatagcgagctcaaagcaattaagtgggaacatttttaatttaaaaaaaatttccaaatatttgtgggtccgacagtaatgatcaaaatatgaatgactttggaaaatttacatgaagctcaagtgttaggattgacttatgaaaataaattttatttctatccaaatttgaatgtccaaaccattttttagttacttctttctaatcctagttattcagacaaaatttggaaacttattttatgaccacatctaatattctggctgctttggatacaatactcttgatttatgataattagttaaaatatattaaaaatattattagtaaaataaaatttcacacaataaaaaacaacatagagtacacatatttatatgtatttttaaagataaagaatatctaaaatgtgtttttttcttagctttttagttgtctagaacatttagagaaagagtatgaatatattaaatccacaaacacactatatacttcctcaccactgactattttatcaaatttgccttaaaataatgaaaaagaaaagtatagttaatggtttcaaatatgctaagaaattgactctgcggaggggatcttaaaatgcctgtttactcatgttttcgtatttttcttgtctctaatacttttgtctttgtctgccttgtgtgttcttttctgaatttcatttcagcaatttatgctgctaaatagaatcccgcatgtctgcattcatttacattcaacttattgtaaattttgagattttatttagaaatgaattgtctaattaatttatgtagagtccttttttccaaagagctcaaaacactacatccacattattgacttttggaaaccaaccaaattacttaagaaatggaaaagtagtcacagagaaatttagtaatttgcaaaagccacaacagtagtggaagaattaaaattcataaagtctcatcattctgttggctaaaataatgctctttacaatatgctggctacaaaatggtcttactcttgaattttgcttttggttcatattttggttcttcatattctagtatgttttgttcctgctgaattttacagactcagctaaacaataagttattagtagtcacttgttttcattatcataattgaatttccaagaacaacttgatatcattcagctgtccaaaaaataataagagcattcattaaatactgattttcttaaacttaaatgttgtatttcatatttatttatataatacaaatggaaatcaaaactgaaatagcctccctttagaatgtcacatttttcttagaaaacattttggaattggttaaccttattgggaatggataatttagaaacaaaccaaaaaaaaaaaaagatatttgaagtgtttttataggagatgtatttttatcatagtaaatgatcacaattttaaataattcatcttacaagtcaggtaaaataaaatcgattcccagattccatacattaggagtgcaaagacaggatcatacacatgacttatacctctcatttaaatattttatagtataaagtatttatggaaagggtttgagatagatgatttttgggaaagggcaaaatgtgtcagatgccctagttaatcatgtaatttaattctggtattgtgagtggttagcaatcaattttgaatttataattctgctattttaaaagaaatgtagtcttgtagtatgaaataattaaaaattgttaaatgtatattttggttgtattataataaaatgcaaacatgactgttctatgattataaaaaaaaaaaaaaaaaaaa

SEQ ID NO: 882 - protein, 777 aa, Homo sapiens
MNANKDERLKARSQDFHLFPALMMLSMTMLFLPVTGTLKQNIPRLKLTYKDLLLSNSCIPFLGSSEGLDFQTLLLDEERGRLLLGAKDHIFLLSLVDLNKNFKKIYWPAAKERVELCKLAGKDANTECANFIRVLQPYNKTHIYVCGTGAFHPICGYIDLGVYKEDIIFKLDTHNLESGRLKCPFDPQQPFASVMTDEYLYSGTASDFLGKDTAFTRSLGPTHDHHYIRTDISEHYWLNGAKFIGTFFIPDTYNPDDDKIYFFFRESSQEGSTSDKTILSRVGRVCKNDVGGQRSLINKWTTFLKARLICSIPGSDGADTYFDELQDIYLLPTRDERNPVVYGVFTTTSSIFKGSAVCVYSMADIRAVFNGPYAHKESADHRWVQYDGRIPYPRPGTCPSKTYDPLIKSTRDFPDDVISFIKRHSVMYKSVYPVAGGPTFKRINVDYRLTQIVVDHVIAEDGQYDVMFLGTDIGTVLKVVSISKEKWNMEEVVLEELQIFKHSSIILNMELSLKQQQLYIGSRDGLVQLSLHRCDTYGKACADCCLARDPYCAWDGNACSRYAPTSKRRARRQDVKYGDPITQCWDIEDSISHETADEKVIFGIEFNSTFLECIPKSQQATIKWYIQRSGDEHREELKPDERIIKTEYGLLIRSLQKKDSGMYYCKAQEHTFIHTIVKLTLNVIENEQMENTQRAEHEEGKVKDLLAESRLRYKDYIQILSSPNFSLDQYCEQMWHREKRRQRNKGGPKWKHMQEMKKKRNRRHHRDLDELPRAVAT

SEQ ID NO: 883 - DNA, 1050 bp, Homo sapiens
atgaaaactgaattagtatttagcacaagacccaatgcagcaaagataaaggaagagctttttttggcttggagaacttgcgctatttctggaatacaactgaaagaggcttcagaaacagaagacaataaccacatgcagatataccgggctttgatatttggagaggctcaaaacctgtacaagtcccccaagaagacgcgaaggcagctccagccgggcctgagccgtgctagcaccttccccaggagacccttgcagttctccgtggtaaccaagtgcgaccaaaaggccgtgatcaaaaatacggacatgtcggaagagatgcaacaggactcagtggagtgcgctgctcaggcgctggagaaatacaacatagaggacactgcggctcatatcaagaaagaatttgacaagaaggatactgatttcactgtggctaagcagctgcttatgaccttgaacaaagcagaagtgttggaatgccttcctgctgtctgtatggacctgctcttgccagttactgcacaaagaaatagtttaattccacttggaatacagggctgccggcggctccgcttgctcagccagggctgcggctcagaggaacgcgcgccggtgccccgggttgccgcgccgctggacctcagcctgcatcccgttcccctctccctgaaaaggcaccaggaaaagagagagggagagaagagttcacagcaggctgcaggttcatttggagacgctttagtcgggaacatccggggagtacttgaccaaagggcatctgcgccctcgctcgctcctttccttgttggtctgggagaagggaaaggggcaaggaagaaggaagggaagcgtggtggtttttgttgtagcgttttggaagaggaatgggcgacgcctttttcttcgccggggaatcgcgacgttccgtctgatggaagtgtgcatccttttagatttagagggaaagttggagtcaaacagcagccacaaagctggctgtctgaaatgtggttaaggcaaaacactcgggggatctctttgtag

SEQ ID NO: 884 - protein, 349 aa, Homo sapiens
MKTELVFSTRPNAAKIKEELFLAWRTCAISGIQLKEASETEDNNHMQIYRALIFGEAQNLYKSPKKTRRQLQPGLSRASTFPRRPLQFSVVTKCDQKAVIKNTDMSEEMQQDSVECAAQALEKYNIEDTAAHIKKEFDKKDTDFTVAKQLLMTLNKAEVLECLPAVCMDLLLPVTAQRNSLIPLGIQGCRRLRLLSQGCGSEERAPVPRVAAPLDLSLHPVPLSLKRHQEKREGEKSSQQAAGSFGDALVGNIRGVLDQRASAPSLAPFLVGLGEGKGARKKEGKRGGFCCSVLEEEWATPFSSPGNRDVPSDGSVHPFRFRGKVGVKQQPQSWLSEMWLRQNTRGISL

SEQ ID NO: 885 - DNA, 3191 bp, Homo sapiens
ctgggctgaggcggaggcaggggagttgcagcgcgcgaggctccgtgagtgtgtctcctgcgcgctgagaggcggggggaggcggaggaccaggaggaggaggaggaggaggaggagggggagaatgcccggagccgccgccgctgccgccgccgccgccgccgcgatgctcccggctcaggaggctgccaagctgtaccacaccaactatgtgcggaactcgcgggccatcggcgtgctgtgggccatcttcaccatctgctttgccatcgtcaacgtggtgtgcttcatccagccctactggataggcgacggcgtggacaccccgcaagccggctatttcgggctcttccactactgcatcggcaacggcttctcccgggagctgacctgcaggggcagcttcacggacttctccacgctgccctcgggcgccttcaaagccgcctccttctttatcggcctctccatgatgctcatcattgcctgcatcatttgctttaccctcttcttcttctgcaacacggccactgtgtacaagatatgtgcctggatgcagctcacctccgctgcctgccttgtgcttggctgtatgattttccctgatggctgggactcagatgaagtaaaacggatgtgtggagaaaagacagacaagtacactcttggggcttgctcagtccgctgggcatacatcctggctattattggaattttggatgccctgatcctctcatttctagcatttgtgcttggtaatcgacaagacagcttgatggcagaggaactgaaggcagaaaacaaagttctgctaagccaatattctctagaatgagcacaaaacaaatcgaataacagctaaacaaatcgaataacagctaaacgaatcgaataacagcttttgtacatcaacatcaagaaggaatacgcctgagagagatcagagtatatagatgaatatgaacaagaatggaacattcacttgtcaacgcactttctaaatctagatcagcagagatgggagtgattttctggaaagagatgtgatcatggattaaacaccagctcattggaaactcattggatgagatcagaaaacgttcatgaaaaatcatattcaggaaataaggaagaggaatataaatgctctagagttaacatgtaaaatatatacgtactgaggtttgtaaactgtcctttttaaatcaaactgaaaacaaaaagctttaacctttcaacagaatttttaaaaaggcagttagttctaaattattcctatctcaatagccaagaggctgatcaagcgtcatttattgaggaagcatcttagaaaatgcctctgaatgttttcataggagccgtgacctttggttcttcatctctaccattcatttacttcactgtgtaattagttacaaccactcagttattaagagacgtaacgcttcaaactttttaccaagtctgtgttctgtttaatctgtccatacaagttattactgagaaagtgtttatgccatatactattactccatcaagctgtatattacaggaagtacatctttacatcataggttcccaagcaacatagatttccctatctttcaggaaacagcatcaaggaactctgaaaaatatagaaaaagttcattttcaccttggaagctcacgtgtaatattataggctactatcaaataaacactttttttctaattctccctagtatatgcataggaatttaatatactttataaataagtatctaaaatgtctcctacttttttcctatttctttgccatacatgttatcagaaatccatgtcttctatttcccttactgatgggcactcatttttatttttttaaaaatcattccattaaacatatttctaaataatagtaagtggtactaacaaaataaataataatttaatagccttagaaataaatgactgtatacttatacaggttgaaaaaaactcggtaggaataagttacctttttgtttactaatgttggtttcaaaaatactcagattcattttagttggctgacatctggaagtagttaacaactaaccagtggacttcaacaatcatttgctcccaggcttcccccatcatcaccctcaccacatatcctgctaatatccaacaacaaacaaatatttaatattgaaatagcccattgcctgagaatgaacacaagctaaaatacatgcaagggtacttaatggaagccaaaccatgttctatacctaaggagaaaacatggacatgtagaatgcttttattcatgtattcaaaatcagaacaaatcagtgtatatcactagaacatcagatggaggataacacaagaagtgatacagatcagggttcacttctcttaccctctctctgttaggaccacattcctattttagccaaatgtttctggtacgggccatcttttcaccataaatggcattatgtttcaaatggctaaaagcatattatgggtatgctcaaaggagtaaaacccaattcacagagatgtggcttttctaaagaaccaaattaagggaatacttagtatctacaactaaagtattagtcattctgaggattatttgttgctttaagtattagctccctactacatccataacaccctacttactaaatttaattacacacaacttttcaagaattcgtattttatttgaagggaggtacctgtctactttatctacaataaaaacaaagggtattggctttctctaatccatgcaaactacaaattccatcgggagtcctacatcactaacagtggtatgaacaaaactaagaaagtacttcctatccacatgtgaatgttttaaaaaagtttttgccataaaacctaagtgtaatttagcataccacagtgctctgaagatgggtcattgacgatgtaccatttgtatataggtaatacacatgtaaatcactaattgttaattaaatataagaagtaggtttttatctttttaaaaaaaaaacaaaaaaggtgactccctttctcattctgttctgttgtattgcgtccaaaagttgtgtgtaatttttttaaggtccaagaaatgtaaagaaatttgttggaatacctgaatttctgtaaaaaaataaaaataaaaataagattttgttacttaaaaaaaaaaaaaaaaa

SEQ ID NO: 886 - protein, 236 aa, Homo sapiens
MPGAAAAAAAAAAAMLPAQEAAKLYHTNYVRNSRAIGVLWAIFTICFAIVNVVCFIQPYWIGDGVDTPQAGYFGLFHYCIGNGFSRELTCRGSFTDFSTLPSGAFKAASFFIGLSMMLIIACIICFTLFFFCNTATVYKICAWMQLTSAACLVLGCMIFPDGWDSDEVKRMCGEKTDKYTLGACSVRWAYILAIIGILDALILSFLAFVLGNRQDSLMAEELKAENKVLLSQYSLE

SEQ ID NO: 887 - DNA, 3678 bp, Homo sapiens
gacgcgcgccgggagccgcgggccgggccagccgggccgccggggcccagtgcgccgcgctcgcagccggtagcgcgccagcgccgtaggcgctcgctcggcagccgcggggccctaggccgtgccggggagggggcgagggcggcgcccaggcgcctgccgccccggaggcaggatgagcatcgagatcccggcgggactgacggagctgctgcagggcttcacggtggaggtgctgaggcaccagcccgcggacctgctggagttcgcgctgcagcacttcacccgcctgcagcaggagaacgagcgcaaaggcaccgcgcgcttcggccatgagggcaggacctggggggacctgggcgccgctgccgggggcggcacccccagcaagggggtcaacttcgccgaggagcccatgcagtccgactccgaggacggggaggaggaggaggcggcgcccgcggacgcaggggcgttcaatgctccagtaataaaccgattcacaaggcgtgcctcagtatgtgcagaagcttataatcctgatgaagaagaagatgatgcagagtccaggattatacatccaaaaactgatgatcaaagaaataggttgcaagaggcttgcaaagacatcctgctgtttaagaatctggatccggagcagatgtctcaagtattagatgccatgtttgaaaaattggtcaaagatggggagcatgtaattgatcaaggtgacgatggtgacaacttttatgtaattgatagaggcacatttgatatttatgtgaaatgtgatggtgttggaagatgtgttggtaactatgataatcgtgggagtttcggcgaactggccttaatgtacaatacacccagagcagctacaatcactgctacctctcctggtgctctgtggggtttggacagggtaaccttcaggagaataattgtgaaaaacaatgccaaaaagagaaaaatgtatgaaagctttattgagtcactgccattccttaaatctttggagttttctgaacgcctgaaagtagtagatgtgataggcaccaaagtatacaacgatggagaacaaatcattgctcagggagattcggctgattcttttttcattgtagaatctggagaagtgaaaattactatgaaaagaaagggtaaatcagaagtggaagagaatggtgcagtagaaatcgctcgatgctcgcggggacagtactttggagagcttgccctggtaactaacaaacctcgagcagcttctgcccacgccattgggactgtcaaatgtttagcaatggatgtgcaagcatttgaaaggcttctgggaccttgcatggaaattatgaaaaggaacatcgctacctatgaagaacagttagttgccctgtttggaacgaacatggatattgttgaacccactgcatgaagcaaaagtatggagcaagacctgtagtgacaaaattacacagtagtggttagtccactgagaatgtgtttgtgtagatgccaagcattttctgtgatttcaggttttttcctttttttacatttacaacgtatcaataaacagtagtgatttaatagtcaataggctttaacatcactttctaaagagtagttcataaaaaaatcaacatactgataaaatgactttgtactccacaaaattatgactgaaaggtttattaaaatgattgtaatatatagaaagtatctgtgtttaagaagataattaaaggatgttatcataggctatatgtgttttacttattcagactgataatcatattagtgactatccccatgtaagagggcacttggcaattaaacatgctacacagcatggcatcacttttttttataactcattaaacacagtaaaattttaatcatttttgttttaaagttttctagcttgataagttatgtgctggccttggcctattggtgaaatggtataaaatatcatatgcagttttaaaactttttatatttttgcaataaagtacattttgactttgttggcataatgtcagtaacatacatattccagtggttttatggacaggcaatttagtcattatgataataaggaaaacagtgttttagatgagagatcattaatgcatttttccctcatcaagcatatatctgcttttttttattttgcaattctctgtattctatgtctttaaaaatttgatcttgacatttaatgtcacaaagttttgtttttttaaaaagtgatttaaacttaagatccgacattttttgtattctttaagattttacacctaaaaaatctctcctatcccaaaaataatgtgggatccttatcagcatgcccacagtttatttctttgttcttcactaggcctgcataatacagtcctatgtagacatctgttcccttgggtttccgttctttcttaggatggttgccaacccacaatctcattgatcagcagccaatatgggtttgtttggtttttttaattcttaaaaacatcctctagaggaatagaaacaaatttttatgagcataaccctatataaagacaaaatgaatttctgaccttaccatatataccattaggccttgccattgctttaatgtagactcatagttgaaattagtgcagaaagaactcagatgtactagattttcattgttcattgatatgctcagtatgctgccacataagatgaatttaattatattcaaccaaagcaatatactcttacatgatttctaggccccatgacccagtgtctagagacattaattctaaccagttgtttgcttttaaatgagtgatttcattttgggaaacaggtttcaaatgaatatatatacatgggtaaaattactctgtgctagtgtagtcttactagagaatgtttatggtcccacttgtatatgaaaatgtggttagaatgttaattggataatgtatatataagaagttaaagtatgtaaagtataacttcagccacatttttagaacactgtttaacatttttgcaaaaccttcttgtaggaaaagagagctctctacatgaagatgacttgttttatatttcagattttattttaaaagccatgtctgttaaacaagaaaaaacacaaaagaactccagattcctggttcatcattctgtattcttactcactttttcaagttatctattttgttgcataaactaattgttaactattcatggaacagcaaacgcctgtttaataaagaactttgaccaaggctataaatgccacgtacattattttcagtattgttggttatatttaaattttccttacaataaagcacacttttataataaaatacatgaattattgtttttcatacttttttgcttgtttctttaaagttttctgacgtgcataatgcataattcattgaaaagcatgatagcaatgtggcatgtggaagcgaacccccagggcataacatagtaagaaagtatggttctgtatggcaataggtttttaaaattattagctattcatcatgtgtgggagaaataattgtggtgtgttgcagatttatttggccatttagaataaccaaatcaatctggctaactaggaatttatgtgtaaaattatctgattaaaacagctcaagtttgaaaaaaaaaaaaaaaaaa

SEQ ID NO: 888 - protein, 418 aa, Homo sapiens
MSIEIPAGLTELLQGFTVEVLRHQPADLLEFALQHFTRLQQENERKGTARFGHEGRTWGDLGAAAGGGTPSKGVNFAEEPMQSDSEDGEEEEAAPADAGAFNAPVINRFTRRASVCAEAYNPDEEEDDAESRIIHPKTDDQRNRLQEACKDILLFKNLDPEQMSQVLDAMFEKLVKDGEHVIDQGDDGDNFYVIDRGTFDIYVKCDGVGRCVGNYDNRGSFGELALMYNTPRAATITATSPGALWGLDRVTFRRIIVKNNAKKRKMYESFIESLPFLKSLEFSERLKVVDVIGTKVYNDGEQIIAQGDSADSFFIVESGEVKITMKRKGKSEVEENGAVEIARCSRGQYFGELALVTNKPRAASAHAIGTVKCLAMDVQAFERLLGPCMEIMKRNIATYEEQLVALFGTNMDIVEPTA

SEQ ID NO: 889 - DNA, 2858 bp, Homo sapiens
ggcgacgggtttggtaagtaggaaagtttcggttgaggagtaagagctgccgcgggagcagtaacccgcgcgggggaggccgacgtcggtcggagagggggtacgagagctgctggtggtgttgtcgtggccggagcggcccgcgcctgggctgccggcacttcgcggcagtcagagcaccataacatggtgtgggaagtgaagacaaatcagatgcctaatgcagtacagaaactcctgttggtgatggacaagagagcctcaggaatgaatgactcattggagttgctgcagtgtaatgagaatttgccatcttcacctggatataactcctgtgatgaacacatggagcttgatgaccttcctgaacttcaggcagttcaaagtgatcctacccaatctggcatgtaccagctgagttcagatgtttcacatcaagaatacccaagatcatcttggaaccaaaatacctcagacataccagaaactacttaccgtgaaaatgaggtggactggctaacagaattggcaaatatcgcgaccagtccacaaagtccactgatgcagtgctcattttacaatagatcatctcctgtacacatcatagccactagcaaaagtttacattcctatgcacgccctccaccagtgtcctcttcttcgaagagtgaaccagccttccctcatcaccattggaaggaggaaacaccagtaagacacgaaagggcaaatagtgagtcagaatctggcattttctgcatgtcctccctgtcagatgatgatgatttgggatggtgcaattcctggccttcaactgtctggcactgttttttgaaaggcacacgactgtgctttcataagggaagcaataaggaatggcaagatgttgaagattttgctagagctgaaggctgtgataatgaggaagatcttcaaatgggcattcacaagggctatggttctgatggtctaaagttgttatcacatgaagaaagtgtatcatttggcgagtctgtactgaagttgacttttgatcctggtacagtagaagatggtttacttaccgtagagtgtaagctggaccaccctttctatgttaaaaataaaggttggtcatcattttatccaagcttgactgtggtacagcatggcattccatgttgtgaagttcatattggcgatgtatgtctacctcctggacaccccgatgccattaattttgatgattcaggtgtttttgatacatttaaaagctatgacttcacacctatggattcttctgcagtttatgtgttaagtagtatggctcgccagcgtcgtgcatctttgtcttgtggaggacctggtggtcaagactttgcaagatctggattcagtaaaaactgtggctcacctggatcatcacagctctcttccaattctttgtatgctaaagctgtcaaaaaccacagctcagggactgtgagtgccacttctcctaataagtgcaaaagaccaatgaatgccttcatgctttttgccaaaaaatacagagttgaatatactcagatgtatccagggaaagataacagagccataagtgtgatccttggtgacaggtggaagaaaatgaagaatgaagagagaagaatgtacacattagaagcaaaggctttggctgaagaacagaaacgtttaaatcctgactgttggaagaggaaaagaaccaattcaggctcacaacaacattaaaccaggatgcttatgttcttaagtctatatttgcatatacattgactcttgatggaaagacttaagaagatcaaggtctcaccatttgtcctcaattcgtgtgaccataagatactgatagcattgagtcttgaaatgatttaataatatgagtgaggatttgctttctccattagagcattaagctaaaactatcaacattttaaaccaaattgccttatttttcttccaaacttcatatatgtctatcaggtaataataggcttgaaaattgatatcctgtggtgctaaagtacagtagaaagagaggagaagtgtatacatgttttattttaaattgtacgaaaggggaatttaaaaaatatgtaactgctgtttatacattggctccttactgcttattaatctgtattgtacacatgatgaaatgaagcagaagctgggagtcggcctttcctctagtaaccaccacatggctcagcatctgtgccaaacataggcgctcctagtctggtcagtgccaagaggctaccagaacatggggcaggtggctggtgttggtgtcccagcctaagagccacctgctgcagttaccatggcatgctgagttgatgcaccaggtggcagcagccatccgttattatttccaatggagacctagcccaggccaaggtaaagttagttaatagcattgggatatagtcactgtaatggtgctattaacaaacagtcaacaccattgtattttttaacttcgtgttctgtatctcctcagccatgtatcttaaatatattttgtcatcataatctttatggtgggggcagactttgcacttactgcagtgcaacacttgcactttaattttcctccaactgtctaaaattagagcaaatacattggcaatacagctgcttttgctctgagctacaatcatggcttttcatgttacttaccaagtggtgtttctggttaggaatcacagctgtaaaattgatttcagttcatcacacttcttcatgatgttgcccctaaattttgcacactatattcttgtatattatttcaaataaatggaaaaaaaagttgcttatctctgaaaaaaaaaaaaaaaaaaaaaaaaaaaaaa

SEQ ID NO: 890 - protein, 514 aa, Homo sapiens
MVWEVKTNQMPNAVQKLLLVMDKRASGMNDSLELLQCNENLPSSPGYNSCDEHMELDDLPELQAVQSDPTQSGMYQLSSDVSHQEYPRSSWNQNTSDIPETTYRENEVDWLTELANIATSPQSPLMQCSFYNRSSPVHIIATSKSLHSYARPPPVSSSSKSEPAFPHHHWKEETPVRHERANSESESGIFCMSSLSDDDDLGWCNSWPSTVWHCFLKGTRLCFHKGSNKEWQDVEDFARAEGCDNEEDLQMGIHKGYGSDGLKLLSHEESVSFGESVLKLTFDPGTVEDGLLTVECKLDHPFYVKNKGWSSFYPSLTVVQHGIPCCEVHIGDVCLPPGHPDAINFDDSGVFDTFKSYDFTPMDSSAVYVLSSMARQRRASLSCGGPGGQDFARSGFSKNCGSPGSSQLSSNSLYAKAVKNHSSGTVSATSPNKCKRPMNAFMLFAKKYRVEYTQMYPGKDNRAISVILGDRWKKMKNEERRMYTLEAKALAEEQKRLNPDCWKRKRTNSGSQQH

SEQ ID NO: 891 - DNA, 3604 bp, Homo sapiens
gcttagcccaggcgcgggctgagagtcagttcgccaggtgggcctggagccatgggctgggtgggcgggcggcgccgggattctgcgtcaccacctgggcggagccgttctgctgctgacgacatcaacccggcacctgccaacatggaaggtggcggcggcagcgtcgctgtagctggcctcggagctcgaggctctggagcggctgcagctacagtccgggaacttctgcaggacgggtgttatagtgactttttaaacgaagactttgatgtaaagacttatacttctcaatctattcatcaagctgtaattgctgaacaactagcaaaacttgcccaaggaatcagtcagttggacagagaactacacttacaggttgttgcaagacatgaagatttactggcacaagcaactgggattgagtcgttggaaggtgttcttcagatgatgcagacgagaattggggctttacagggagctgttgataggataaaagcaaaaattgttgaaccatacaataagatagttgcccggactgcacaactagcaagacttcaggttgcctgtgatttgcttcggaggattattcgtatcttgaatctcagtaagagactccaaggacaactgcaagggggaagtagagagataacaaaagctgctcagagtctcaatgaacttgattatctttctcaaggaatagatctttctggaatagaagtgatagaaaatgatctactttttattgcaagagcccgacttgaagtggaaaatcaagctaagcgcctactagagcagggtttggagactcagaatccaactcaagtcggaacagctcttcaggttttctataatcttggaactttgaaggatactattaccagtgttgtggatggatattgtgctactttagaagaaaatatcaacagtgcattagacataaaagttttgactcagccttcccagtcagctgtgagagggggacctggacgatctaccatgccaaccccaggaaatactgcagctttgcgtgcctcactctggaccaatatggagaaacttatggatcatatttatgctgtttgtggacaggtacaacatctacaaaaagtattggccaagaagagagatcctgtttctcacatttgtttcattgaagaaatagttaaggatggacaaccggaaattttctacacattttggaattcagttactcaggcactttcttctcaatttcatatggcaacaaactcttcgatgtttttgaagcaggcatttgaaggagaataccctaaattattacgtctttataatgacttatggaagcgtcttcaacaatacagtcagcatatccaagggaattttaatgcaagtggaactacagacctctatgttgacctacaacacatggaagatgatgcacaagatatattcataccaaaaaagccagattatgatccagaaaaggctttgaaagactcactacaaccctatgaggctgcttatctatcaaaatccttatctcgactcttcgatcctatcaacttggtttttcccccgggtggtcgtaatcctccttcctctgatgaacttgatggtattattaaaactatagcaagtgaactaaatgttgctgctgttgatacaaacctcacattagctgtgtcaaaaaatgtggcaaagaccatccagttatacagtgtaaaatcagagcagcttctctccacacaaggagatgcaagtcaggtgattgggcctcttactgaaggacagagaagaaatgtggcagtagtgaattcattgtataagttgcaccaatcagtaacaaaggttgtttccagtcagagctcattcccactggcagctgagcaaactataatttcagctctaaaggctattcatgctcttatggaaaatgctgtgcaacccttactcacttctgtgggagatgctatagaggccataatcatcaccatgcatcaagaagacttttctgggtcattatccagctcaggaaaacctgatgttccttgttctctgtacatgaaggagctacaaggtttcattgccagagttatgagtgactattttaaacactttgaatgcttggattttgtctttgacaacactgaggctattgcccaaagagctgttgaactttttatccgccatgccagtctcataagacctcttggtgaaggtgggaaaatgcgacttgctgctgattttgcacagatggagttggctgtgggtccattctgtagacgagtatctgatttaggaaagtcctatcggatgctgagatcattcagacctctgctcttccaggcaagtgaacatgtagccagtagtcctgcattgggggatgtgattccgttcagcatcattattcagtttttgttcacgagagcacccgctgaactgaaatctcctttccagagggcagagtggtcccacacacgcttctctcagtggctggatgaccatccatctgaaaaggacaggctcctcctcatcaggggagccctggaagcttatgttcaatcagtgagaagtagagaaggcaaagaatttgcaccagtttatcccataatggttcagctgcttcaaaaggctatgtctgctcttcagtaatgacatgaaatctttgttcatctccactttgtgctaacccattcatagttggcagttaaacacatactccaaaagactgctactatctactattttaagaatgtaattgattgttcggtatttcctatcgacgtttatttacctctttagcacttatactttagcataaaaaatgttgagttatcaccacctttcaattccatggacctgatttttccagaaagatgttttcctctttcagatttttgtacaaggctaaaatgtctttcccatccataaccaagtcctcctatgggtacataaacccaaagtccccacttcttttaaagggatatgatcaagttataacatgtaccctgcttcccccaaccctgccttcttcactaaataagcatgtagctcagtggtttccaaatttggctgcacattcataccaatcaccaggggatttttttaaaatcctgatgcccaacttgcactccacattaattaacatgtctaggagtgggagcctgacagacaccactattaaaaaaaaaaaaaatccccaaaatgattccaatagacaacaaagttgaggaaccactggcacatcccaagctaagatacaaggttaaatggcctttttaagtatgtcatactggatctttaaataaagcaaggcttttgttacactttgtcatgttattaaaagcagacctttgggctgtttaaccgtgtaacaaaaatgccacgtgaaaaataaaaatttttattgtatagcaattctctataaatagtagataatctaagtccttattttctgatggctcttgttccactattaacattgtttttaatttttaaaatcctatcagcagcctcctaattagcagtgttaggaatttgccttatgttttccatctcatctcctgaacctgttattctgagaactcataaataaaattcagccaagattaatcaatcaatc

SEQ ID NO: 892 - protein, 860 aa, Homo sapiens
MGWVGGRRRDSASPPGRSRSAADDINPAPANMEGGGGSVAVAGLGARGSGAAAATVRELLQDGCYSDFLNEDFDVKTYTSQSIHQAVIAEQLAKLAQGISQLDRELHLQVVARHEDLLAQATGIESLEGVLQMMQTRIGALQGAVDRIKAKIVEPYNKIVARTAQLARLQVACDLLRRIIRILNLSKRLQGQLQGGSREITKAAQSLNELDYLSQGIDLSGIEVIENDLLFIARARLEVENQAKRLLEQGLETQNPTQVGTALQVFYNLGTLKDTITSVVDGYCATLEENINSALDIKVLTQPSQSAVRGGPGRSTMPTPGNTAALRASLWTNMEKLMDHIYAVCGQVQHLQKVLAKKRDPVSHICFIEEIVKDGQPEIFYTFWNSVTQALSSQFHMATNSSMFLKQAFEGEYPKLLRLYNDLWKRLQQYSQHIQGNFNASGTTDLYVDLQHMEDDAQDIFIPKKPDYDPEKALKDSLQPYEAAYLSKSLSRLFDPINLVFPPGGRNPPSSDELDGIIKTIASELNVAAVDTNLTLAVSKNVAKTIQLYSVKSEQLLSTQGDASQVIGPLTEGQRRNVAVVNSLYKLHQSVTKVVSSQSSFPLAAEQTIISALKAIHALMENAVQPLLTSVGDAIEAIIITMHQEDFSGSLSSSGKPDVPCSLYMKELQGFIARVMSDYFKHFECLDFVFDNTEAIAQRAVELFIRHASLIRPLGEGGKMRLAADFAQMELAVGPFCRRVSDLGKSYRMLRSFRPLLFQASEHVASSPALGDVIPFSIIIQFLFTRAPAELKSPFQRAEWSHTRFSQWLDDHPSEKDRLLLIRGALEAYVQSVRSREGKEFAPVYPIMVQLLQKAMSALQ

SEQ ID NO: 893 - DNA, 3541 bp, Homo sapiens
gcttagcccaggcgcgggctgagagtcagttcgccaggtgggcctggagccatgggctgggtgggcgggcggcgccgggattctgcgtcaccacctgggcggagccgttctgctgctgacgacatcaacccggcacctgccaacatggaaggtggcggcggcagcgtcgctgtagctggcctcggagctcgaggctctggagcggctgcagctacagtccgggaacttctgcaggacgggtgttatagtgactttttaaacgaagactttgatgtaaagacttatacttctcaatctattcatcaagctgtaattgctgaacaactagcaaaacttgcccaaggaatcagtcagttggacagagaactacacttacaggttgttgcaagacatgaagatttactggcacaagcaactgggattgagtcgttggaaggtgttcttcagatgatgcagacgagaattggggctttacagggagctgttgataggataaaagcaaaaattgttgaaccatacaataagatagttgcccggactgcacaactagcaagacttcaggttgcctgtgatttgcttcggaggattattcgtatcttgaatctcagtaagagactccaaggacaactgcaagggggaagtagagagataacaaaagctgctcagagtctcaatgaacttgattatctttctcaaggaatagatctttctggaatagaagtgatagaaaatgatctactttttattgcaagagcccgacttgaagtggaaaatcaagctaagcgcctactagagcagggtttggagactcagaatccaactcaagtcggaacagctcttcaggttttctataatcttggaactttgaaggatactattaccagtgttgtggatggatattgtgctactttagaagaaaatatcaacagtgcattagacataaaagttttgactcagccttcccagtcagctgtgagagggggacctggacgatctaccatgccaaccccaggaaatactgcagctttgcgtgcctcactctggaccaatatggagaaacttatggatcatatttatgctgtttgtggacaggtacaacatctacaaaaagtattggccaagaagagagatcctgtttctcacatttgtttcattgaagaaatagttaaggatggacaaccggaaattttctacacattttggaattcagttactcaggcactttcttctcaatttcatatggcaacaaactcttcgatgtttttgaagcaggcatttgaaggagaataccctaaattattacgtctttataatgacttatggaagcgtcttcaacaatacagtcagcatatccaagggaattttaatgcaagtggaactacagacctctatgttgacctacaacacatggaagatgatgcacaagatatattcataccaaaaaagccagattatgatccagaaaaggctttgaaagactcactacaaccctatgaggctgcttatctatcaaaatccttatctcgactcttcgatcctatcaacttggtttttcccccgggtggtcgtaatcctccttcctctgatgaacttgatggtattattaaaactatagcaagtgaactaaatgttgctgctgttgatacaaacctcacattagctgtgtcaaaaaatgtggcaaagaccatccagttatacagtgtaaaatcagagcagcttctctccacacaaggagatgcaagtcaggtgattgggcctcttactgaaggacagagaagaaatgtggcagtagtgaattcattgtataagttgcaccaatcagtaacaaaggctattcatgctcttatggaaaatgctgtgcaacccttactcacttctgtgggagatgctatagaggccataatcatcaccatgcatcaagaagacttttctgggtcattatccagctcaggaaaacctgatgttccttgttctctgtacatgaaggagctacaaggtttcattgccagagttatgagtgactattttaaacactttgaatgcttggattttgtctttgacaacactgaggctattgcccaaagagctgttgaactttttatccgccatgccagtctcataagacctcttggtgaaggtgggaaaatgcgacttgctgctgattttgcacagatggagttggctgtgggtccattctgtagacgagtatctgatttaggaaagtcctatcggatgctgagatcattcagacctctgctcttccaggcaagtgaacatgtagccagtagtcctgcattgggggatgtgattccgttcagcatcattattcagtttttgttcacgagagcacccgctgaactgaaatctcctttccagagggcagagtggtcccacacacgcttctctcagtggctggatgaccatccatctgaaaaggacaggctcctcctcatcaggggagccctggaagcttatgttcaatcagtgagaagtagagaaggcaaagaatttgcaccagtttatcccataatggttcagctgcttcaaaaggctatgtctgctcttcagtaatgacatgaaatctttgttcatctccactttgtgctaacccattcatagttggcagttaaacacatactccaaaagactgctactatctactattttaagaatgtaattgattgttcggtatttcctatcgacgtttatttacctctttagcacttatactttagcataaaaaatgttgagttatcaccacctttcaattccatggacctgatttttccagaaagatgttttcctctttcagatttttgtacaaggctaaaatgtctttcccatccataaccaagtcctcctatgggtacataaacccaaagtccccacttcttttaaagggatatgatcaagttataacatgtaccctgcttcccccaaccctgccttcttcactaaataagcatgtagctcagtggtttccaaatttggctgcacattcataccaatcaccaggggatttttttaaaatcctgatgcccaacttgcactccacattaattaacatgtctaggagtgggagcctgacagacaccactattaaaaaaaaaaaaaatccccaaaatgattccaatagacaacaaagttgaggaaccactggcacatcccaagctaagatacaaggttaaatggcctttttaagtatgtcatactggatctttaaataaagcaaggcttttgttacactttgtcatgttattaaaagcagacctttgggctgtttaaccgtgtaacaaaaatgccacgtgaaaaataaaaatttttattgtatagcaattctctataaatagtagataatctaagtccttattttctgatggctcttgttccactattaacattgtttttaatttttaaaatcctatcagcagcctcctaattagcagtgttaggaatttgccttatgttttccatctcatctcctgaacctgttattctgagaactcataaataaaattcagccaagattaatcaatcaatc

SEQ ID NO: 894 - protein, 839 aa, Homo sapiens
MGWVGGRRRDSASPPGRSRSAADDINPAPANMEGGGGSVAVAGLGARGSGAAAATVRELLQDGCYSDFLNEDFDVKTYTSQSIHQAVIAEQLAKLAQGISQLDRELHLQVVARHEDLLAQATGIESLEGVLQMMQTRIGALQGAVDRIKAKIVEPYNKIVARTAQLARLQVACDLLRRIIRILNLSKRLQGQLQGGSREITKAAQSLNELDYLSQGIDLSGIEVIENDLLFIARARLEVENQAKRLLEQGLETQNPTQVGTALQVFYNLGTLKDTITSVVDGYCATLEENINSALDIKVLTQPSQSAVRGGPGRSTMPTPGNTAALRASLWTNMEKLMDHIYAVCGQVQHLQKVLAKKRDPVSHICFIEEIVKDGQPEIFYTFWNSVTQALSSQFHMATNSSMFLKQAFEGEYPKLLRLYNDLWKRLQQYSQHIQGNFNASGTTDLYVDLQHMEDDAQDIFIPKKPDYDPEKALKDSLQPYEAAYLSKSLSRLFDPINLVFPPGGRNPPSSDELDGIIKTIASELNVAAVDTNLTLAVSKNVAKTIQLYSVKSEQLLSTQGDASQVIGPLTEGQRRNVAVVNSLYKLHQSVTKAIHALMENAVQPLLTSVGDAIEAIIITMHQEDFSGSLSSSGKPDVPCSLYMKELQGFIARVMSDYFKHFECLDFVFDNTEAIAQRAVELFIRHASLIRPLGEGGKMRLAADFAQMELAVGPFCRRVSDLGKSYRMLRSFRPLLFQASEHVASSPALGDVIPFSIIIQFLFTRAPAELKSPFQRAEWSHTRFSQWLDDHPSEKDRLLLIRGALEAYVQSVRSREGKEFAPVYPIMVQLLQKAMSALQ

SEQ ID NO: 895 - DNA, 2976 bp, Homo sapiens
gtcattctgcaaaagctgcccgaacaggctttcctctgaaaagcagtgccgttcctttttagaaagactgaatctaaatgttgtctctggagacaagaagccttcagtatgttaaattactttcattatgtattttcagatgcttattgattccacagtaggaagagtgagagactgcagcagcctctaagcagcactacatgttccatacattagcagtactgctgaaacaatggcacactacagacacatattttcattaaggtcattttcgaagagatgtttatgaccctcttcccccagtcctctactaacaagtgaacaaaatgaatcaatccaaactggaaatgcttcaactacatcaagaatttatcaaatctttagcagagggccaatagcagctaattcagtatttacaactgacaatatgaagaatgcaattgactgagcatctccctagctgtctgaactacgaactgcaagatgttcttgtaacacgactttaagacattaaggagttaaaaccagggaataggtctacattactgatggaatataaaaaatcaactgtatcctaagaagatgctacataaaataaccacaaaaagaaaaacaatataactgtaaaagcctgaaaagaatttttaaaaggggaagtttatactttcatataccagaattgtggaagttactgattctggaagacataatgaaacatgaatttccaaaaagaaaagaaaatactttatcagcacacaaaaggaagatttaggaagtgttttctgcactaaatattcagatattcatatcaattggtatgactaatggatttttctatctgacttttatgaccaattatgtatcctcttctaatgaaaacaaacaaaattaaacagcagatggtttttatcaaaaggacatggcctggatttataatataaagcaagttatgtgatcaagaaatcatttcaaaatagtgagcactgctattaaaaacagatttacaatggtaacaaaaggatgtctaaatatattttagaagctacaaacgttatgtttccttttttgttttcacatattctggaaaataaagaaatattatcatgtactccatcaaagggaaacataattcctatcatctgaggaaattcctcttggccgtgactttttaaagcaaaacaaatacaaatattatgtactgttctttagaaatccatcagccaactaaatctcataatgcatgcagttgaagtattggagagaaaacgaaagaattcctacaagacatgaaataaaacacagctacttcactgttgtcagggaaaaaaaccaactgctccaaaagaatgtgtttttctcccattctggaaatcaacatgcagtctgaatctaacattacagtgcgagatgacattgatgacatcaacaccaatatgtaccaaccactatcatatccgttaagctttcaagtgtctctcaccggatttcttatgttagaaattgtgttgggacttggcagcaacctcactgtattggtactttactgcatgaaatccaacttaatcaactctgtcagtaacattattacaatgaatcttcatgtacttgatgtaataatttgtgtgggatgtattcctctaactatagttatccttctgctttcactggagagtaacactgctctcatttgctgtttccatgaggcttgtgtatcttttgcaagtgtctcaacagcaatcaacgtttttgctatcactttggacagatatgacatctctgtaaaacctgcaaaccgaattctgacaatgggcagagctgtaatgttaatgatatccatttggattttttcttttttctctttcctgattccttttattgaggtaaattttttcagtcttcaaagtggaaatacctgggaaaacaagacacttttatgtgtcagtacaaatgaatactacactgaactgggaatgtattatcacctgttagtacagatcccaatattctttttcactgttgtagtaatgttaatcacatacaccaaaatacttcaggctcttaatattcgaataggcacaagattttcaacagggcagaagaagaaagcaagaaagaaaaagacaatttctctaaccacacaacatgaggctacagacatgtcacaaagcagtggtgggagaaatgtagtctttggtgtaagaacttcagtttctgtaataattgccctccggcgagctgtgaaacgacaccgtgaacgacgagaaagacaaaagagagtcttcaggatgtctttattgattatttctacatttcttctctgctggacaccaatttctgttttaaataccaccattttatgtttaggcccaagtgaccttttagtaaaattaagattgtgttttttagtcatggcttatggaacaactatatttcaccctctattatatgcattcactagacaaaaatttcaaaaggtcttgaaaagtaaaatgaaaaagcgagttgtttctatagtagaagctgatcccctgcctaataatgctgtaatacacaactcttggatagatcctaaaagaaacaaaaaaattacctttgaagatagtgaaataagagaaaaatgtttagtgcctcaggttgtcacagactagagaaaagtctcagtttcaccaaatccacattcaaatgagttttaaatttaaattgtaaaaactgatattactgccaaatataagaaaaatattttaagtattggttatgttgtaaattttcaatgtgaatgtcaattagataggtcatatatattcaatttcttcattacttaatgtatttgttgcatggcagtttgttaaagtactatcatgtgtatattttgtcaatattatgtccaacagaaaatattcatgtaagtcatattttttaaggaataaatacatagccttaaaacagtgtataactttaaaatgtaaaaaaaaaaaa

SEQ ID NO: 896 - protein, 433 aa, Homo sapiens
MCFSPILEINMQSESNITVRDDIDDINTNMYQPLSYPLSFQVSLTGFLMLEIVLGLGSNLTVLVLYCMKSNLINSVSNIITMNLHVLDVIICVGCIPLTIVILLLSLESNTALICCFHEACVSFASVSTAINVFAITLDRYDISVKPANRILTMGRAVMLMISIWIFSFFSFLIPFIEVNFFSLQSGNTWENKTLLCVSTNEYYTELGMYYHLLVQIPIFFFTVVVMLITYTKILQALNIRIGTRFSTGQKKKARKKKTISLTTQHEATDMSQSSGGRNVVFGVRTSVSVIIALRRAVKRHRERRERQKRVFRMSLLIISTFLLCWTPISVLNTTILCLGPSDLLVKLRLCFLVMAYGTTIFHPLLYAFTRQKFQKVLKSKMKKRVVSIVEADPLPNNAVIHNSWIDPKRNKKITFEDSEIREKCLVPQVVTD

SEQ ID NO: 897 - DNA, 2252 bp, Homo sapiens
catggctccaggcccacctggcgaactgactctcagcccgcgcctgggctaagcctggctaggagccgcgcaggtactcgagcagtgggcgcccagggtccgagtgctctgcgcccagcgcaccgagggagccaaggccgtcgggccggcgctttcagctgtctctcgcagcagctcagggccgcgccccctgggctggcgtcgtgccctagccaaggagaagtttcagtcacgtgccagactttttcttaattacaaactgatagatggtccacatctcaactaacagtattgacgctgtaagagcatcagatttgaaacatatctgtattaatgaagagtgactgcatgcaaacgacaatatgtcaggaaagaaaaaaagatcccatagaaatgtttcattctggacagctggtaaaagtctgtgccccaatggttcgatattcaaagttggcttttaggacactagtaagaaaatatagttgtgatctgtgttacacaccaatgattgttgccgctgattttgtcaaatctataaaagccagagacagcgaatttaccacaaatcaaggtgattgcccattgattgttcagtttgctgctaacgatgcaagacttttatctgatgctgctcgtatagtctgtccttatgcgaatggaatagacattaactgtggttgccctcagaggtgggcaatggcagaaggttatggggcttgcttaataaacaagccagagcttgttcaagacatggtgaaacaagtaagaaatcaagtggaaacccctggattttcagtttctattaaaataaggatccatgatgaccttaaaagaactgtagatctttgtcaaaaggctgaagcaacaggagtttcatggattacagtccatggaagaactgctgaagaaagacatcagccagtgcactatgattccattaaaataattaaggaaaatatgtctatacctgtaattgctaatggagacatcagaagcttaaaggaagcagaaaatgtgtggcggattactgggacagatggtgtgatggttgcaagaggactcttagcaaacccggccatgtttgctggatatgaggaaaccccactgaaatgcatctgggactgggttgacattgctcttgaactcgggactccttacatgtgtttccatcaacatttaatgtacatgatggaaaagataacttcaaggcaggaaaaaagggtatttaatgctctgtcaagcacatcagcaatcatagattaccttacagaccattatggcatttgactagacttcccaaataattttaatatatacttttagacccacagtgaaaccacagaaggtcatattttgtaccttaaaccagtagctctcaaattttagtataaaaacaattcctgggagcgttttttaaaaatcagttgtagacaccaccctcagagattctgattaggtagatctggagtagacccagaaatacacagtttaaagaaaactcccagtggttcaaacatcctgatcatcctaggcaaacattgacaaatactgctctgaatcctgttctatagatattggggggatgggtagagtgggaattttttcctaatcatgtttttaacattttaaaataaaatttaatactaagaaattatggcttatagtatctataaattaacaagaagtatgcaggtgcaaaaaagtggtggaacaaataccaacatccatccaaaatgaaaaagaacaggaaattctgaatagaattgcactcagaacttatattaaaaattccatttggttaatgacattaaatttggtacatttcaaaacttctaggtcctccaaagattgaaagcttaataatctcctacctaaaaagataaaattaattgcaatctaccatatcttaagtataggaaatttggtgtccaacctggagatgattatatatttgaaatatttcctagagaatagtaaccaggttttgtttttaactttaaaacctaattacttttgtgcctctcagccgttgattgtaactttaaagtcccatggttttggagtgttattaatagattttgttatcggtgggcatgcactgcaagaattaagtatctcagactgaaataaaaccgttcataattaaagtattattttgttttgccaacatgaaaactgttataaggaaacaattatgtaaaactgtttaattcacgtttgggaatattgaatgaatccattttaacataaaa

SEQ ID NO: 898 - protein, 317 aa, Homo sapiens
MKSDCMQTTICQERKKDPIEMFHSGQLVKVCAPMVRYSKLAFRTLVRKYSCDLCYTPMIVAADFVKSIKARDSEFTTNQGDCPLIVQFAANDARLLSDAARIVCPYANGIDINCGCPQRWAMAEGYGACLINKPELVQDMVKQVRNQVETPGFSVSIKIRIHDDLKRTVDLCQKAEATGVSWITVHGRTAEERHQPVHYDSIKIIKENMSIPVIANGDIRSLKEAENVWRITGTDGVMVARGLLANPAMFAGYEETPLKCIWDWVDIALELGTPYMCFHQHLMYMMEKITSRQEKRVFNALSSTSAIIDYLTDHYGI

SEQ ID NO: 899 - DNA, 600 bp, Homo sapiens
atggacagtgttccaccttcccccacctgggaaggcaagcacggaccccggtcaggaaggggaaaagggtggcccgggaagcgggtgtcgccacctccctgggagtcgtgggaactggcgaggcggctcgctggccactgccttttccgccagcttcgcggcgacagaagcccaacgcctccctccaccaacgcccggcttcccggccctcccgctcccagaaggcgccgcgggccctcgaccaccgcgccgcggaccgggccgggccgggtcgggccaggccagctccgcggggttctccagaccaggcagcggcgctctccctccgcggcctacgccccacgggtccccgggtcgcagaagcccttacccgccggcagcccgcctggctccctgcgctgctccgcggccgccgacgcgcgggacgtcagacgccgcggctgggcgggggaggggagccagggccccaccccgcctcacgccccgcaggctcccgcccgcgggtccgtcccggctgaggtcacaggcggcgcgaccacgtttattggcaacagttgttttctaattggcggcaggtcagagaatgagttagacttttga

SEQ ID NO: 900 - protein, 199 aa, Homo sapiens
MDSVPPSPTWEGKHGPRSGRGKGWPGKRVSPPPWESWELARRLAGHCLFRQLRGDRSPTPPSTNARLPGPPAPRRRRGPSTTAPRTGPGRVGPGQLRGVLQTRQRRSPSAAYAPRVPGSQKPLPAGSPPGSLRCSAAADARDVRRRGWAGEGSQGPTPPHAPQAPARGSVPAEVTGGATTFIGNSCFLIGGRSENELDF

SEQ ID NO: 901 - DNA, 2971 bp, Homo sapiens
gcggagcagcgcagggagccaggcgggctgccggcgggtgtgaagaaaaaaatgacactccaatgggctgcagtggcaacctttctttatgccgaaataggactcattttaatcttctgcctaccttttattcctcctcagagatggcagaagattttttcatttaatgtctggggtaaaattgcaactttttggaacaaggctttccttaccattatcatcctattgattgttctatttctagatgctgtgagagaagtaaggaaatattcctcagttcataccattgagaagagctccaccagcagacctgatgcctatgaacacacacagatgaaactttttaggtctcaaagaaatctttacatttctggattttccctatttttttggctagttttgagacgtctggttacgcttattactcaactggcaaaagaactgtcaaacaaaggtgtacttaaaactcaagcagaaaatactaacaaggctgccaaaaaatttatggaagaaaacgaaaaactaaaaaggattttgaaaagccatggtaaagatgaagaatgtgttttggaagcagaaaataaaaaactagtagaagaccaggagaaactgaaaactgaattaaggaagacttcagatgccctttctaaggcacaaaatgatgtgatggaaatgaagatgcagtcagagagactttcgaaagaatatgatcaactcctgaaagaacactctgaacttcagcattccagttttggtgaatttttaagcaaaagaagccacaaaaatggcagcattggaaaacagactggttctagaaaaggatcgtttagaaagaggcaacaagaaaagactgtgaactttataaaagacacttgcaatatactgtgtcaaaatgataattttgttatgttagcctctagaaaatttaagttcagaaaaatgcactatgaccggttcgtaatttttttaatgccacacataggttgtattgtaatggcattatcaaaatatttgatgatgtttcagatatattgcaaagtctgtattccagctcttaagaaaaatataagcatgttaaataccatatttacatattgataatgtcattggtatatggtggctgtttaccaataaaaggaaaaaattcattaaccggttgcttccaaaattagaagttttaagttgcatgaaaccattaatagccttgaaagctttgataagttttcagtaataataacctatttaatcagatgatgatgtgtttgaaaatagtgttcaatatcagcaaatttgtacacagggaatgtaaataaggataactgatcagagttatccactgtatttataaggaagagtcggaaaaaacaatgaccttagttttttttaagcctgatgatactatggtttactctaataagatagctatattgataattatatttttgttactgtgcccttgcacattttggtctttttgttaatatttttattaataacacataattagtaaccactctactgtttcaagttaatctagtaatagagcttacatatatttgtataactgctataccactgaactgaatttattttacaacagtgtagaattcttgaaaagttaacgtagaaaatatccaaaaagcagtatttctagaaagtgtccaaaaagcagtatttctttcccttggttgtgagagtaactaattatataaatattacctcaaaaatacatacactggtatcacacagtctttctacaatgtttctgtattctgaaagctaaatattaagtactatttttccattcaaatattcatttagaatttcctttagaagatggcagtgattataatattaatatgatttcatttgttccagtgtttagacatgaaatcatcttccttgtctcatgaaaacctaaatataaaaaaaaggaaaatactggagtttttatttctcttgtctttgttacatcctctgtttattataattttagcaccaacttcacacctagctaatttttttcatcataaagtggatgaaatgagcaagtacctaaaaattttatttcagataaaagtcaggagttactgctaaaaaacagacatgtaggagacattcaacaggagtatgaaatgagagttagaccatatgggctgacaacaccataaataacaagaaaagggagtgctgaaataggagagaacagagcaaatgttagctcaaagtatagacttagaaatatcaaagtaagagctatctggataaatatatagatattgagtgcttggaatcctagcctactatgtgaaaattaagtctaatgtcagaataacttacagaaaaatagaaaatgcacagctttaaaatgggcagagttaaaatctattcccagctttatcacttatttagccatgctagcctaggcctctatttccttgtctccaaaatgagaataataaaatttaggtcaggattactatataaactaagataatacagtgattctcaaagttgttcagactgtatagtaaggagaaagtctggttgcactttgaagagcttgaagatttgaaagattcccaaaaaagcattttaaagtttacatttaagggaccttggacctcaaccctctcaagtttacaagtctgaaactttagacatcaaaagtttgagcagtttttccaaggcaacattgatagttagattcagggccaggctgtaagtctagaatttagatatcctgatcccccagataccgctcttctggttatacacagaccagctataatttgctaaacataaaatattgcagtgtattagccggctgtggctccagagtctgtgccctttaccaccgtgcccaactgtttcacatgctgtgtttggtagtttttcctagtactctccttaataatggtggtgtttagcaaattgtattacataaataaatatttatttcatggattga

SEQ ID NO: 902 - protein, 348 aa, Homo sapiens
MTLQWAAVATFLYAEIGLILIFCLPFIPPQRWQKIFSFNVWGKIATFWNKAFLTIIILLIVLFLDAVREVRKYSSVHTIEKSSTSRPDAYEHTQMKLFRSQRNLYISGFSLFFWLVLRRLVTLITQLAKELSNKGVLKTQAENTNKAAKKFMEENEKLKRILKSHGKDEECVLEAENKKLVEDQEKLKTELRKTSDALSKAQNDVMEMKMQSERLSKEYDQLLKEHSELQHSSFGEFLSKRSHKNGSIGKQTGSRKGSFRKRQQEKTVNFIKDTCNILCQNDNFVMLASRKFKFRKMHYDRFVIFLMPHIGCIVMALSKYLMMFQIYCKVCIPALKKNISMLNTIFTY

SEQ ID NO: 903 - DNA, 2429 bp, Homo sapiens
gcggagcagcgcagggagccaggcgggctgccggcgggtgtgaagaaaaaaatgacactccaatgggctgcagtggcaacctttctttatgccgaaataggactcattttaatcttctgcctaccttttattcctcctcagagatggcagaagattttttcatttaatgtctggggtaaaattgcaactttttggaacaaggctttccttaccattatcatcctattgattgttctatttctagatgctgtgagagaagtaaggaaatattcctcagttcataccattgagaagagctccaccagcagacctgatgcctatgaacacacacagatgaaactttttaggtctcaaagaaatctttacatttctggattttccctatttttttggctagttttgagacgtctggttacgcttattactcaactggcaaaagaactgtcaaacaaaggtgtacttaaaactcaagcagaaaatactaacaaggctgccaaaaaatttatggaagaaaacgaaaaactaaaaaggattttgaaaagccatggtaaagatgaagaatgtgttttggaagcagaaaataaaaaactagtagaagaccaggagaaactgaaaactgaattaaggaagacttcagatgccctttctaaggcacaaaatgatgtgatggaaatgaagatgcagtcagagagactttcgaaagaatatgatcaactcctgaaagaacactctgaacttcagaagcaaagggagatattaccacacagaagaggagaaagcacagtgaccacagaggcagagattggagtgatggagccgcagcaaaggaatgctgacagccaccagaagctggaggaggcaaagaacagattcttccccagagcctcttccagcaggagcatggccctacagataccgataaaactgatattggacttcctggcctccagaactatgggaataaatttattgtttcaagctatcaagtttgtgattatttgttactgctgccatagtaaattaatacaggagcatgcaggacagatctgtaatggcctgaactgaatttcaaggggtgtggaaaacagttactctttaacaccactccgtcttccccattagccatttggataagtcaaagatagccttagccatctcctatcttagttacttttctccttcaactgtattttgccattgtcgttgccattgcctctgcctaactgcaagccatcatcatctctcacatggactatgacgacctcctcatctccctgtatcttctctaatgcttctctcatatacatgctctcagcagccacctggtttaaaacaaaaacaaaaaaaacactaatcatgtcattccctgcttgtcttcccgttctttccaactgtcattccctgcttgtcttccaattctttccaactgcagttaagatcaaaccaccaagacctcaccaggctcccatctacttttcagcctcaactcagtccacctgctctgccaatcacacctgtttctttttgttgttctttccctaggatatagatcctggcatacctgcattctgattcttcttggaacaagccaaattctttcccctgtcagtacgtttgcatgtgtagtacatgttgcatcccaggcctgtctgccttcttaccctattttattttcatcatagcacttactaccatctgaaatgatctcatttatggtttgtctcctcagtgattaacacagttcctgcacacagtaaatcagtagttctcaacaggaagtgaagaggtcatcctgaggggaacatttagcaatacctagagacatttctggttgtcataaccaggggaatgctcctagtggatagaagtcagggaggctgttaaacccattccacaatgcacaggactggaacaaagaatgatctctcactcagaatgtcagtgttgccaaggtggagacatcctgcagtagatgcttgtggcagagggtactggttgtaccccagtatccattctttcattcacctgtgttaatacatgctccagttttgtatttttttttataaacagctgtcaagcataaagataacattttccatctccttgtatgtaagtggaaataggactgtcatgtggggccagtttcttttttttcttcctctgtcctgctgcttgaaacatatgctgctatcttagatcatgaggtcgaggccatgcaaagtggagcaacaaggagctgtgtccctgacgccataagcaccacacctgtcctgaattgctgtgaatgacaccagctaactacaatgcattgtctcaacatcctagacataataaaaagccataaatatgtttgtcctatgcagcacaaaacctttgtatctttgccttttatgttgggatcttaattaaaaattacatcctctactgtc

SEQ ID NO: 904 - protein, 337 aa, Homo sapiens
MTLQWAAVATFLYAEIGLILIFCLPFIPPQRWQKIFSFNVWGKIATFWNKAFLTIIILLIVLFLDAVREVRKYSSVHTIEKSSTSRPDAYEHTQMKLFRSQRNLYISGFSLFFWLVLRRLVTLITQLAKELSNKGVLKTQAENTNKAAKKFMEENEKLKRILKSHGKDEECVLEAENKKLVEDQEKLKTELRKTSDALSKAQNDVMEMKMQSERLSKEYDQLLKEHSELQKQREILPHRRGESTVTTEAEIGVMEPQQRNADSHQKLEEAKNRFFPRASSSRSMALQIPIKLILDFLASRTMGINLLFQAIKFVIICYCCHSKLIQEHAGQICNGLN

SEQ ID NO: 905 - DNA, 2640 bp, Homo sapiens
gcggagcagcgcagggagccaggcgggctgccggcgggtgtgaagaaaaaaatgacactccaatgggctgcagtggcaacctttctttatgccgaaataggactcattttaatcttctgcctaccttttattcctcctcagagatggcagaagattttttcatttaatgtctggggtaaaattgcaactttttggaacaaggctttccttaccattatcatcctattgattgttctatttctagatgctgtgagagaagtaaggaaatattcctcagttcataccattgagaagagctccaccagcagacctgatgcctatgaacacacacagatgaaactttttaggtctcaaagaaatctttacatttctggattttccctatttttttggctagttttgagacgtctggttacgcttattactcaactggcaaaagaactgtcaaacaaaggtgtacttaaaactcaagcagaaaatactaacaaggctgccaaaaaatttatggaagaaaacgaaaaactaaaaaggattttgaaaagccatggtaaagatgaagaatgtgttttggaagcagaaaataaaaaactagtagaagaccaggagaaactgaaaactgaattaaggaagacttcagatgccctttctaaggcacaaaatgatgtgatggaaatgaagatgcagtcagagagactttcgaaagaatatgatcaactcctgaaagaacactctgaacttcaggtttttgctaaactacttaactacctccttatgaggaagtggtgagccagcctccaactcctcccccagcatacagtgacttccagctacgcagcagcagcagctcctgcctccacagtgaggcctggcagatggcagtcccccagcgccaatcccaccaggggatccaagggaatcccttgtctgagcccagcagaagcatcacaagacccccaagcatcgctgatcctgagccctctgacctaccaggtgaccgagtagccaccaaagccctggggatgcagcccagtggctctgtagccagcctgggagagctggacccaggggccttcctggacaaggaggcagaatgtaaggaggagctgctgaaagatgacagttctgaacatggcagcgcaccgcccaacagcaaagagaagatgctcaggagacattgccacttcactggtgacgcgggcattgaagtgcgtatgtcagggccaccatgatcatagccttaaagagttcaacatgctcatcgctgatgcactggatgggcccctggacttctgcgacagctgccatgtgcagcctcctggtgatgaggaggaaggcctcttccagccctccaaggagcaggcttgacagcctgggcacctgcacctgccacagctacctgcatgcctgctgctaaacatcatcaatgagcagtactctcccaactcccagagcagcagctcccgcagctagatcaggctctgccagcacccaagaacttggcaaagcaaccagggtaggggagaaccacgagagaagcattaaatgactttcagagaaagtggtacagccacttgattcctttttttttttttctttctcctctcctgcattttcctccatctccaggtacagtttggggtgtggatgcctctcgccctacaaaggcacaatgttgtggagggctgagaagttggttctgtttctcgttcctcataccccatccctatcccctttattctccctttaaagtcctatctcacctacctgtttgggtcagagagatgtgttttaaaggcccccaaggaaggaggctgggactgtgccctgagatgattcttggtgacgaagtggatttgtgctctgagtttagtttaagagaacgtcactgtgtctcagtcccggagaggcaacccatcttagacctgggtgaagaaggaagcctgcagaggcctaggctttgtcgcctgtggctcccagtgtctgcagagccagcattgagctaatcctgtgggaggatgagagctgatcggcagttgtatgataggttggtagggggcttgtgatctgtgaaattccaggtgatggatgcatccagtgtgcatcactaagaggccctttcccagtggcctctggctggctgcaggctggttccagtgtgaaagattatactgccttttcttttttttattttccttttgaaaacagacaacaaaagacaactgaaaataacttccccagtgagcaggcaagaattctcttctgaaaaatgacgtttgtagttctttcccaagttggccttcaaagagcctggctgcagttgagccagaaggagatgtcttgtgtgaaggctaaagtggaggctgtctctgaaatctccgtgagcaggtggccctaagccatggtggtggatagatgtgcagctttctgcatctctgccccttggtctgtgcccacaggtggccggcgtcagcctccatcccgagcacatgctccgcgggtctttatgtctcactgttcttcacacataggaggaaagagataggagactgaggaagggatggaccctgagaaagggcccctccagcctggctctcacacagtattttgtctttgattctgaataaatttttttttgtggtt

SEQ ID NO: 906 - protein, 244 aa, Homo sapiens
MTLQWAAVATFLYAEIGLILIFCLPFIPPQRWQKIFSFNVWGKIATFWNKAFLTIIILLIVLFLDAVREVRKYSSVHTIEKSSTSRPDAYEHTQMKLFRSQRNLYISGFSLFFWLVLRRLVTLITQLAKELSNKGVLKTQAENTNKAAKKFMEENEKLKRILKSHGKDEECVLEAENKKLVEDQEKLKTELRKTSDALSKAQNDVMEMKMQSERLSKEYDQLLKEHSELQVFAKLLNYLLMRKW

SEQ ID NO: 907 - DNA, 2892 bp, Homo sapiens
gcggagcagcgcagggagccaggcgggctgccggcgggtgtgaagaaaaaaatgacactccaatgggctgcagtggcaacctttctttatgccgaaataggactcattttaatcttctgcctaccttttattcctcctcagagatggcagaagattttttcatttaatgtctggggtaaaattgcaactttttggaacaaggctttccttaccattatcatcctattgattgttctatttctagatgctgtgagagaagtaaggaaatattcctcagttcataccattgagaagagctccaccagcagacctgatgcctatgaacacacacagatgaaactttttaggtctcaaagaaatctttacatttctggattttccctatttttttggctagttttgagacgtctggttacgcttattactcaactggcaaaagaactgtcaaacaaaggtgtacttaaaactcaagcagaaaatactaacaaggctgccaaaaaatttatggaagaaaacgaaaaactaaaaaggattttgaaaagccatggtaaagatgaagaatgtgttttggaagcagaaaataaaaaactagtagaagaccaggagaaactgaaaactgaattaaggaagacttcagatgccctttctaaggcacaaaatgatgtgatggaaatgaagatgcagtcagagagactttcgaaagaatatgatcaactcctgaaagaacactctgaacttcaggatcgtttagaaagaggcaacaagaaaagactgtgaactttataaaagacacttgcaatatactgtgtcaaaatgataattttgttatgttagcctctagaaaatttaagttcagaaaaatgcactatgaccggttcgtaatttttttaatgccacacataggttgtattgtaatggcattatcaaaatatttgatgatgtttcagatatattgcaaagtctgtattccagctcttaagaaaaatataagcatgttaaataccatatttacatattgataatgtcattggtatatggtggctgtttaccaataaaaggaaaaaattcattaaccggttgcttccaaaattagaagttttaagttgcatgaaaccattaatagccttgaaagctttgataagttttcagtaataataacctatttaatcagatgatgatgtgtttgaaaatagtgttcaatatcagcaaatttgtacacagggaatgtaaataaggataactgatcagagttatccactgtatttataaggaagagtcggaaaaaacaatgaccttagttttttttaagcctgatgatactatggtttactctaataagatagctatattgataattatatttttgttactgtgcccttgcacattttggtctttttgttaatatttttattaataacacataattagtaaccactctactgtttcaagttaatctagtaatagagcttacatatatttgtataactgctataccactgaactgaatttattttacaacagtgtagaattcttgaaaagttaacgtagaaaatatccaaaaagcagtatttctagaaagtgtccaaaaagcagtatttctttcccttggttgtgagagtaactaattatataaatattacctcaaaaatacatacactggtatcacacagtctttctacaatgtttctgtattctgaaagctaaatattaagtactatttttccattcaaatattcatttagaatttcctttagaagatggcagtgattataatattaatatgatttcatttgttccagtgtttagacatgaaatcatcttccttgtctcatgaaaacctaaatataaaaaaaaggaaaatactggagtttttatttctcttgtctttgttacatcctctgtttattataattttagcaccaacttcacacctagctaatttttttcatcataaagtggatgaaatgagcaagtacctaaaaattttatttcagataaaagtcaggagttactgctaaaaaacagacatgtaggagacattcaacaggagtatgaaatgagagttagaccatatgggctgacaacaccataaataacaagaaaagggagtgctgaaataggagagaacagagcaaatgttagctcaaagtatagacttagaaatatcaaagtaagagctatctggataaatatatagatattgagtgcttggaatcctagcctactatgtgaaaattaagtctaatgtcagaataacttacagaaaaatagaaaatgcacagctttaaaatgggcagagttaaaatctattcccagctttatcacttatttagccatgctagcctaggcctctatttccttgtctccaaaatgagaataataaaatttaggtcaggattactatataaactaagataatacagtgattctcaaagttgttcagactgtatagtaaggagaaagtctggttgcactttgaagagcttgaagatttgaaagattcccaaaaaagcattttaaagtttacatttaagggaccttggacctcaaccctctcaagtttacaagtctgaaactttagacatcaaaagtttgagcagtttttccaaggcaacattgatagttagattcagggccaggctgtaagtctagaatttagatatcctgatcccccagataccgctcttctggttatacacagaccagctataatttgctaaacataaaatattgcagtgtattagccggctgtggctccagagtctgtgccctttaccaccgtgcccaactgtttcacatgctgtgtttggtagtttttcctagtactctccttaataatggtggtgtttagcaaattgtattacataaataaatatttatttcatggattga

SEQ ID NO: 908 - protein, 241 aa, Homo sapiens
MTLQWAAVATFLYAEIGLILIFCLPFIPPQRWQKIFSFNVWGKIATFWNKAFLTIIILLIVLFLDAVREVRKYSSVHTIEKSSTSRPDAYEHTQMKLFRSQRNLYISGFSLFFWLVLRRLVTLITQLAKELSNKGVLKTQAENTNKAAKKFMEENEKLKRILKSHGKDEECVLEAENKKLVEDQEKLKTELRKTSDALSKAQNDVMEMKMQSERLSKEYDQLLKEHSELQDRLERGNKKRL

SEQ ID NO: 909 - DNA, 5858 bp, Homo sapiens
cacatgccccgtttgctgcctgaacctctccacaaagactcccagatcctgtagaattgaatttaatcatctcctgacaaaagaatgcaatttcaactgaccctttttttgcaccttgggtggctcagttactcaaaagctcaagatgactgcaacaggggtgcctgtcatcccaccactggtgatctcctggtgggcaggaacacgcagcttatggcttcttctacctgtgggctgagcagagcccagaaatactgcatcctcagttacctggagggggaacaaaaatgcttcatctgtgactctagatttccatatgatccgtatgaccaacccaacagccacaccattgagaatgtcattgtaagttttgaaccagacagagaaaagaaatggtggcaatctgaaaatggtcttgatcatgtcagcatcagactggacttagaggcattatttcggttcagccaccttatcctgacctttaagacttttcggcctgctgcaatgttagttgaacgttccacagactatggacacaactggaaagtgttcaaatattttgcaaaagactgtgccacttcctttcctaacatcacatctggccaggcccagggagtgggagacattgtttgtgactccaaatactcggatattgaaccctcaacaggtggagaggttgttttaaaagttttggatcccagttttgaaattgaaaacccttatagcccctacatccaagaccttgtgacattgacaaacctgaggataaactttaccaagctccacacccttggggatgctttgcttggaaggaggcaaaatgattcccttgataaatactactatgctctgtacgagatgattgttcggggaagctgcttttgcaatggccatgctagcgaatgtcgccctatgcagaagatgcggggagatgttttcagccctcctggaatggttcacggtcagtgtgtgtgtcagcacaatacagatggtccgaactgtgagagatgcaaggacttcttccaggatgctccttggaggccagctgcagacctccaggacaacgcttgcagatcgtgcagctgtaatagccactccagccgctgtcactttgacatgactacgtacctggcaagcggtggcctcagcgggggcgtgtgtgaagactgccagcacaacactgaggggcagcactgcgaccgctgcagacccctcttctacagggacccgctcaagaccatctcagatccctacgcgtgcattccttgtgaatgtgaccccgatgggaccatatctggtggcatttgtgtgagccactctgatcctgccttagggtctgtggccggccagtgcctttgtaaagagaacgtggaaggagccaaatgcgaccagtgcaaacccaaccactacggactaagcgccaccgaccccctgggctgccagccctgcgactgtaacccccttgggagtctgccattcttgacctgtgatgtggatacaggccaatgcttgtgcctgtcatatgtcaccggagcacactgcgaagaatgcactgttggatactggggcctgggaaatcatctccatgggtgttctccctgtgactgtgatattggaggtgcttattctaacgtgtgctcacccaagaatgggcagtgtgaatgccgcccacatgtcactggccgtagctgctctgaaccagcccctggctacttctttgctcctttgaatttctatctctacgaggcagaggaagccacaacactccaaggactggcgcctttgggctcggagacgtttggccagagtcctgctgttcacgttgttttaggagagccagttcctgggaaccctgttacatggactggacctggatttgccagggttctccctggggctggcttgagatttgctgtcaacaacattccctttcctgtggacttcaccattgccattcactatgaaacccagtctgcagctgactggactgtccagattgtggtgaacccccctggagggagtgagcactgcatacccaagactctacagtcaaagcctcagtcttttgccttaccagcggctacgagaatcatgctgcttcccacacccatctgtttagaaccagatgtacaatattccatagatgtctatttttctcagcctttgcaaggagagtcccacgctcattcacatgtcctggtggactctcttggccttattccccaaatcaattcattggagaatttctgcagcaagcaggacttagatgagtatcagcttcacaactgtgttgaaattgcctcagcaatgggacctcaagtgctcccgggtgcctgtgaaaggctgatcatcagcatgtctgccaagctgcatgatggggctgtggcctgcaagtgtcacccccagggctcagtcggatccagctgcagccgacttggaggccagtgccagtgtaaacctcttgtggtcgggcgctgctgtgacaggtgctcaactggaagctatgatttggggcatcacggctgtcacccatgtcactgccatcctcaaggatcaaaggacactgtatgtgaccaagtaacaggacagtgcccctgccatggagaggtgtctggccgccgctgtgatcgctgcctggcaggctactttggatttcccagctgccacccttgcccttgtaataggtttgctgaactttgtgatcctgagacagggtcatgcttcaattgtggaggctttacaactggcagaaactgtgaaaggtgtattgatggttactatggaaatccttcttcaggacagccctgtcgtccttgcctgtgtccagatgatccctcaagcaatcagtattttgcccattcctgttatcagaatctgtggagctcagatgtaatctgcaattgtcttcaaggttatacgggtactcagtgtggagaatgctctactggtttctatggaaatccaagaatttcaggagcaccttgccaaccatgtgcctgcaacaacaacatagatgtaaccgatccagagtcctgcagccgggtaacaggggagtgccttcgatgtttgcacaacactcagggcgcaaactgccagctctgcaaaccaggtcactatggatcagccctcaatcagacctgcagaagatgctcctgccatgcttccggcgtgagtcccatggagtgtccccctggtgggggagcttgcctctgtgaccctgtcactggtgcatgtccttgtctgccgaatgtcacaggcctggcctgtgaccgttgtgctgatggatactggaatctggtccctggcagaggatgtcagtcatgtgactgtgaccctaggacctctcaaagtagccactgtgaccagcttacaggccagtgtccgtgtaaattaggttacggcgggaaacgttgcagtgagtgccaggaaaattattatggtgatccacctgggcgatgcattccatgtgattgtaacagggcaggtacccagaagcccatctgtgatccagacacaggcatgtgccgctgccgggagggtgtcagcggccagagatgtgatcgctgtgcccggggacacagccaggaattccctacttgtcttcaatgtcacttgtgctttgatcagtgggaccacaccatttcttccctctccaaagcggtgcaagggttaatgagactggctgctaacatggaagataaaagagagaccctgcctgtctgtgaggcagacttcaaagacctcagagggaacgtgtctgaaatagaaaggattttgaaacatcctgttttcccatctgggaaattcttaaaagtcaaggattatcatgactctgttagaagacaaatcatgcagctaaatgaacaactgaaagcagtgtatgaatttcaagatctgaaagatacaatagaaagagcaaagaatgaagcagacctcttacttgaagaccttcaggaagaaattgatttgcaatccagtgtccttaatgcaagcattgcggactcctcagaaaacatcaagaaatattatcacatatcatcatctgctgaaaagaaaattaatgaaactagttccaccattaatacctctgcaaatacaaggaatgacttacttaccatcttagatacactaacctcaaaaggaaacttgtcattggaaagattaaagcagattaagataccagatatccaaatattgaatgaaaaggtgtgcggagatccaggaaatgtgccatgtgtgcccttgccctgtggcggtgctctctgcacgggccggaaggggcacaggaagtgtaggggtcccggctgtcacggctccctgaccctctcaacgaatgccctccaaaaagcccaggaagcaaaatccattattcgtaatttggacaaacaggttcgtgggttgaaaaatcagatcgaaagtataagtgaacaggcagaagtctccaaaaacaatgccttacagctgagggaaaaactgggaaatataagaaaccaaagtgactctgaagaagaaaacatcaatcttttcatcaaaaaagtgaaaaactttttgttagaggaaaacgtgcctccagaagacatcgagaaggttgcgaatggtgtgcttgacattcacctaccaattccatcccaaaatctaaccgatgaacttgtcaaaatacagaaacatatgcaactctgtgaggattacaggacagatgaaaacaggttaaatgaagaagcagatggagcccaaaagcttttggtgaaggccaaagcagctgagaaagcagcaaatattctattaaatcttgacaaaacattgaaccagttacaacaagctcaaatcactcaaggacgggcaaactctaccattacacagctgactgccaatataacaaaaataaaaaagaatgtgctgcaggctgaaaatcaaaccagggaaatgaagagtgagctggagttagcaaagcagcgatcagggctggaggatggactttccctgctgcagaccaagttgcaaaggcatcaagaccacgctgtcaatgcgaaagttcaggctgaatctgcccaacaccaggctgggagtcttgagaaggaatttgttgagctgaaaaaacaatatgctattctccaacgtaagacaagcactacaggactaacaaaggagacattaggaaaagttaaacagctaaaagatgcggcagaaaaattggctggagatacagaggccaagataagaagaataacagatttagaaaggaaaatccaagatttgaatctaagtagacaagcaaaagctgatcaactgagaatattggaagatcaagttgttgccattaaaaatgaaattgttgaacaagaaaaaaaatatgctaggtgctatagctaggcagagttaaagagcaaaagcttgtgcctttgtttctggtttctgatgtacaagcccctggggctctgttgaacctgtgaaatactgacaatgtcttctaccttccttccccacaccctgtccttattagacacctgctcagtgtggctggaggttgaaatgccaccaggaaaatgccacttcataattgaaaggggaaagtaatgaaattgtctctggtttcagaaacttttcctcttaccttcctttctctttcctaacttaaaaataacagtttccatataacaagtagaaatttaagtaagtactctactaactaataatcatttcagtcagataaacctaaacattaaataaatatctccaatattaggatggaatacatatgtatggcatgtactagattgtcctatattttatgtttatttggatttgcttttatttgtaaaattattcttttctgaataaactgcatacaattcaaaatg

SEQ ID NO: 910 - protein, 1761 aa, Homo sapiens
MQFQLTLFLHLGWLSYSKAQDDCNRGACHPTTGDLLVGRNTQLMASSTCGLSRAQKYCILSYLEGEQKCFICDSRFPYDPYDQPNSHTIENVIVSFEPDREKKWWQSENGLDHVSIRLDLEALFRFSHLILTFKTFRPAAMLVERSTDYGHNWKVFKYFAKDCATSFPNITSGQAQGVGDIVCDSKYSDIEPSTGGEVVLKVLDPSFEIENPYSPYIQDLVTLTNLRINFTKLHTLGDALLGRRQNDSLDKYYYALYEMIVRGSCFCNGHASECRPMQKMRGDVFSPPGMVHGQCVCQHNTDGPNCERCKDFFQDAPWRPAADLQDNACRSCSCNSHSSRCHFDMTTYLASGGLSGGVCEDCQHNTEGQHCDRCRPLFYRDPLKTISDPYACIPCECDPDGTISGGICVSHSDPALGSVAGQCLCKENVEGAKCDQCKPNHYGLSATDPLGCQPCDCNPLGSLPFLTCDVDTGQCLCLSYVTGAHCEECTVGYWGLGNHLHGCSPCDCDIGGAYSNVCSPKNGQCECRPHVTGRSCSEPAPGYFFAPLNFYLYEAEEATTLQGLAPLGSETFGQSPAVHVVLGEPVPGNPVTWTGPGFARVLPGAGLRFAVNNIPFPVDFTIAIHYETQSAADWTVQIVVNPPGGSEHCIPKTLQSKPQSFALPAATRIMLLPTPICLEPDVQYSIDVYFSQPLQGESHAHSHVLVDSLGLIPQINSLENFCSKQDLDEYQLHNCVEIASAMGPQVLPGACERLIISMSAKLHDGAVACKCHPQGSVGSSCSRLGGQCQCKPLVVGRCCDRCSTGSYDLGHHGCHPCHCHPQGSKDTVCDQVTGQCPCHGEVSGRRCDRCLAGYFGFPSCHPCPCNRFAELCDPETGSCFNCGGFTTGRNCERCIDGYYGNPSSGQPCRPCLCPDDPSSNQYFAHSCYQNLWSSDVICNCLQGYTGTQCGECSTGFYGNPRISGAPCQPCACNNNIDVTDPESCSRVTGECLRCLHNTQGANCQLCKPGHYGSALNQTCRRCSCHASGVSPMECPPGGGACLCDPVTGACPCLPNVTGLACDRCADGYWNLVPGRGCQSCDCDPRTSQSSHCDQLTGQCPCKLGYGGKRCSECQENYYGDPPGRCIPCDCNRAGTQKPICDPDTGMCRCREGVSGQRCDRCARGHSQEFPTCLQCHLCFDQWDHTISSLSKAVQGLMRLAANMEDKRETLPVCEADFKDLRGNVSEIERILKHPVFPSGKFLKVKDYHDSVRRQIMQLNEQLKAVYEFQDLKDTIERAKNEADLLLEDLQEEIDLQSSVLNASIADSSENIKKYYHISSSAEKKINETSSTINTSANTRNDLLTILDTLTSKGNLSLERLKQIKIPDIQILNEKVCGDPGNVPCVPLPCGGALCTGRKGHRKCRGPGCHGSLTLSTNALQKAQEAKSIIRNLDKQVRGLKNQIESISEQAEVSKNNALQLREKLGNIRNQSDSEEENINLFIKKVKNFLLEENVPPEDIEKVANGVLDIHLPIPSQNLTDELVKIQKHMQLCEDYRTDENRLNEEADGAQKLLVKAKAAEKAANILLNLDKTLNQLQQAQITQGRANSTITQLTANITKIKKNVLQAENQTREMKSELELAKQRSGLEDGLSLLQTKLQRHQDHAVNAKVQAESAQHQAGSLEKEFVELKKQYAILQRKTSTTGLTKETLGKVKQLKDAAEKLAGDTEAKIRRITDLERKIQDLNLSRQAKADQLRILEDQVVAIKNEIVEQEKKYARCYS

SEQ ID NO: 911 - DNA, 8343 bp, Homo sapiens
agttcagtgaatcagaacaatgactgcgccgccgggtacccgggagcgcgtcggaggactgtgagcagccgccgccgggagagctgcgggcggcgcagtgtcaacgctgggctcgggagcctccagcgcagatcctgcccagcgcccgcagcccgcgcgaagccgctgggctccggcactgcagcgctgctcggggactgtgcattgttgtgagccggagaaggggcgcggggattacaaagcctgaagaccccggagcccctttagccatgtggatacctacggagcacgagaaatacggcgtggttattgccagtttccgaggaaccgttccatatggcctgtcattggaaattggagatacagttcagatcctggagaagtgtgatggctggtacagaggatttgccttaaaaaacccaaatatcaagggtatatttccttccagctacgttcacttgaaaaatgcctgtgtaaagaacaaaggacaatttgaaatggttattcccactgaagactctgttatcacagaaatgacatcaacattaagagactggggaaccatgtggaaacaactctatgtgcgtaatgaaggcgatctcttccaccggctgtggcacatcatgaatgaaatcctggacctgaggcggcaggtgctggtgggccacctcacccacgaccggatgaaggacgtgaagcgccacattactgcccggcttgactggggcaatgaacaactgggactggacctggtgcctaggaaagagtacgcaatggtggatccggaagacatcagcattactgagctctaccgattgatggaacatcgacatcggaagaaagacaccccggtgcaggccagcagtcaccacctctttgtccagatgaagagcctcatgtgttccaacctgggagaggagctggaggtcatcttctcactctttgacagtaaagagaaccggccaatcagtgagagatttttcttgaggctgaatagaaacgggcttcccaaagcccctgataaaccggaacgacattgctccctctttgtggatttgggcagcagtgagctaagaaaggacatttatatcaccgtgcacattatccgaatcggtcgaatgggagcaggagaaaaaaagaatgcctgtagtgtccagtaccgacgaccctttggctgtgcagttcttagcatcgctgacctgctaacaggagagacaaaggatgacctcattctgaaagtatacatgtgtaacacagagagtgagtggtaccaaatccatgagaacatcatcaaaaagctgaatgcacgttataacttgactggctccaatgcaggtttagcagtttccttacagctattgcacggagacattgaacaaatcagaagggaatattcatcagtattttctcatggagtatccataacaaggaagctgggattttcaaatattattatgcctggtgaaatgaggaatgatttatatatcactattgaaaggggagaatttgagaaaggagggaagagcgtggccagaaatgtggaagttacgatgttcattgtagacagtagtggccaaaccctgaaggattttatctccttcggctctggggagccaccagccagtgagtaccactcctttgtgctttaccataacaacagtcccaggtggtctgaactgctgaaacttcccattcctgtggataaattccggggtgcacacatccgcttcgagtttcggcattgttccacaaaggagaaaggagagaagaagttgtttgggttttcttttgtccctctgatgcaagaagatggtaggactcttccagatggcactcatgagctcatcgtgcataagtgtgaagaaaacacaaatcttcaggatactacccgctacctcaaacttcccttttccaagggcattttccttgggaataataatcaagccatgaaggccacaaaggagtccttttgtattacatcttttctctgttccacaaaactcacacaaaatggtgatatgcttgatcttttgaaatggagaacccacccagacaagatcactggctgtctctctaaattaaaagaaattgatggctcagagatagtaaagtttctgcaggatacactggataccttatttggaattttagatgaaaattcccaaaaatatgggtctaaagtgtttgattctttggttcacataataaatttgctgcaagatagcaaatttcatcattttaaacctgtaatggacacttacattgagagtcattttgctggggcacttgcatacagagatctcatcaaagtgctcaaatggtacgtggaccggatcacagaagcagagcggcaagagcatatccaggaggtgctgaaggcacaagaatacatttttaagtatatagttcaatctcgaaggctgttttcccttgccactggtgggcaaaacgaagaggagttccgctgctgcattcaggagcttctcatgtcagtccgtttctttctttcgcaagagagcaaagggtctggagcattatctcagtcacaggctgtgtttctgagctctttccctgccgtgtactcagaactgttgaagctctttgatgtccgggaagtagccaacttggtccaggacaccctgggcagtctgccgaccatcctgcatgtggatgattccctgcaggccatcaaactgcagtgcattggcaaaaccgtggaaagccagctttataccaacccagattcccgatacattcttctgcctgtcgtgttacatcacctccacattcacttgcaagaacagaaggacctgatcatgtgtgcacgtatccttagcaacgtattttgtcttatcaagaaaaatagctcagaaaaatctgtgctggaggaaatagatgtgatagtggccagcttgctggatattctgctgaggaccatattggagatcaccagccgacctcagccatccagctcagcaatgcggttccagttccaggatgtcactggggagtttgttgcttgtctcctgtccctattacgacaaatgacagatagacattatcaacagcttcttgatagttttaatacaaaggaagaactaagggatttcctgctgcagatatttactgtgttccgaatattgatacgcccggagatgtttccaaaggactggactgttatgcgcttggttgctaacaatgttattattacaacagttctatacctctcagatgcacttcgtaagaacttcttaaatgaaaactttgattataagatctgggattcctacttttacctcgcagtcatttttataaaccagttgtgtctgcagttggagatgttcacaccttccaagaagaaaaaggtgttagaaaagtatggtgacatgcgggtaacaatgggttgtgaaattttcagcatgtggcaaaacctaggagagcacaagcttcattttatccctgccctgattggccccttcctagaagtgaccttgataccccagccagatcttcggaatgtcatgattccaatttttcatgatatgatggactgggagcagaggcggagtggcaactttaaacaggtggaagccaagctaattgacaaactggatagcctgatgtcagaaggcaaaggtgacgaaacataccgcgagctcttcaacagtattctactaaagaaaattgagcgggaaacatggcgggaaagtggcgtttcattaattgctactgtaactcgtctaatggagaggttgttagattacagggactgcatgaaaatgggagaggtagatggcaaaaagattggctgcacagttagccttctgaacttctataagactgaactgaacaaggaggagatgtatatacgctacattcacaaactctatgatctgcatctcaaagcacagaactttacagaagctgcatataccctcctcttatatgacgagctactggaatggtctgatcggcccctcagggagttcctgacctaccccatgcaaacagaatggcagcgcaaagagcacctgcacctcaccatcatccagaactttgacagaggcaaatgttgggagaatggcattatcttgtgccggaagattgcagagcagtatgagagttattatgactacagaaacctgagcaagatgcggatgatggaagcctctttgtatgacaaaattatggaccagcaacgtcttgaaccagagttcttcagagttggattttatggaaaaaaatttccatttttcttaagaaataaggagtttgtgtgtcgagggcatgactacgagaggctggaagccttccaacagagaatgctgaacgagttcccccatgccatcgccatgcagcacgccaaccagcccgatgagaccatcttccaggcagaagctcagtatttgcagatatatgctgtgactcccattccagagagccaggaggtcctgcagagagagggtgttccggacaacatcaaaagcttctataaagtgaatcacatctggaaattccgctatgaccgaccatttcacaaaggcacaaaagataaagagaatgaattcaagagtctctgggtggagagaacgtcattatacttggtgcagagtttgcctggcatctctcgctggtttgaagtggaaaagcgtgaagtggtagaaatgagtcctctggaaaatgcaattgaagtgctagaaaataagaatcagcagctgaagactctgattagtcagtgtcagacaagacagatgcagaatattaatcccctgactatgtgcctgaatggagttatagatgctgcagttaatggtggcgtttccaggtatcaagaggcattctttgtcaaagaatatatcttaagtcaccctgaagatggggagaaaattgcacgattaagagagctgatgcttgagcaggcacagattctggaatttggtttggccgtgcatgagaagtttgtacctcaagatatgagaccccttcacaaaaagctggttgaccaattctttgtgatgaagtcgagcttagggatacaggagttctctgcttgtatgcaagccagtcctgtccattttcctaatggaagccctcgtgtgtgtagaaactcagcacctgcttctgtgagcccagatggtaccagggtaattcctagacgcagcccgttaagttacccagctgtcaaccgatattcttcctcctcactgtcctcacaagcttctgctgaagtaagcaatattacagggcaatcagaaagctctgatgaagtctttaacatgcagccaagtccatctacctcaagcttgagttctactcactcggcttcacctaatgtgacaagttctgctccatcgagtgccagagcttctcctttgttgtctgacaaacacaaacattcccgagaaaactcttgcctgtcaccaagagagagaccatgcagtgccatctatccaacacctgtggagccttcgcagaggatgctgtttaatcatattggagacggggccttgccacgcagtgacccaaatctctctgcacctgaaaaagctgtgaaccccacccctagcagctggagcctggacagtgggaaggaagccaagaacatgtcggatagtgggaaacttatctctccccctgtccctccaagacccacacagactgcttcaccagcaagacacacgacatcagtatccccctcgcctgccgggcgatctccattgaagggctctgtgcagtctttcaccccctctccagtggagtaccactcgccaggactcatctccaactcccctgtcttgtcgggcagctacagcagtgggatttcttctctcagccggtgcagcacgtcggaaacctcaggctttgaaaatcaggtgaatgaacagtcggcccccctgccggtgccagtgccggtgcccgtgccgagctacggcggggaggagccagtgcgcaaggagagcaagactccgcccccgtacagcgtctacgagcggactctgcggcgccccgtcccgctacctcacagcctctccatccccgtcacgtcggagccgcccgcgctgccccccaagcctctggcagcgcgatccagccacctggagaatggggcccggaggactgaccccggcccgcggcccaggcccctgccccgcaaggtctctcagttataagtcacttttctatgtacctgcgatgcattctttgcccgtttacaaaataagaagtatgatgagaagacatttagtgtaggcactttaataacttactcagctccttcgatgaatggaattaaaacttgcttattaaatatcatgttgcacaatattaaaagttgctgatctaaaacgccagatgttaaatgaagtatggctgaatttcattaaaacgtttctcatttggaagtggtaaatagtgataaagactccttttgtacctttttatgttcacttttttttatatagtttaatcttaaaaccaatacgatattgtcaaacgatacaatgtgtgacaatgttgtatcgtttttactgaatacttgatacttggagaaagcttattaagtcagtgcacatcctaacacagtggtccttattttagaagacttctgtaaataaggcaaggtttatcagtgcagatcatcagaattaaagttcaagcaggcgagcaagacagtatacttaaggggttgcaaagcttgggactggaaattgttttgttcttgaaacaaaatacttctttaaggttgcttttgctgtttgactgctgtctacattcgtaaaattctattttgtgaattggtagctaaatcccttactaccctgacaccgtggtatctactgtatttcttttcaaggtgcaatttgcttcagagttccaatcagctagattaagcaagaggctccagaagaaatgtttacttgaattttgcgcttcctttcttgatagtttcctatataaaatttgtcattgaacaagagcaaatgctgaagtattaatgaggcacaaatgactgtgccccattagcaagaattcaggaatcaatacagacagtattaaattaatagcttaagtgaagaaaaaaaaaacttagtgaaaatgtattagcacgattaaatggcaaaaggacttataaaaggcaagggcattaactttcagtcctgcacaaaataaaaaattcctcacgactctccacttttaccagtggagtttgtcttagctgacctgtcgtctttctcttgaaggaggattgctgtagacttctctagcttgaatattgcaacatagcatcttaggtctagatagggatgctaatgccagttgtagaagtgtgaaaaaagcaccttgtatgtagtaatgtattttatatctttgttttttcttttactgactgtttataacactcaattgacaatagatatgaactgtattttaaatcatactgttaaatattttccctcttttgttgggaagctcattttagtttaaccatgtttgttttgttggtagcttacctggaaggcagtgaccacttttttatattctcttaatgaaaccattcagcaggtatatgctgttgaggctggttatagaggttttctataataaatgttcaagtatttttgtatataactggttaattttaataagagataccattatgtgtaaaaaaaagtaaaaataaacgcaaacagttgttgatgcagtatgattgttataattatgccaaatactttacgtatggaaaaagaatatttgtacatatgtgcttttaacaattctgccatattgactttacaattttgaatgtcggaaaaattaatatatgttaaatatttatgtttagtgaaagtgttcataattgagaaaaggaacatatgcattttagctttgtatcttgcaagttttgcagtcagaaattttttgaactagcttttgcttttgataacacttcgtgtttgtaaccacattcatatatatatacatatatatgtgaagctccatatttctgttgctttaaagaagtaaaaccttccatttaaataagatgacatgcataagataacaaagcttccttgatttccttttcctgtgtaatttaatagatttgttgactagtgcttgggcacattataaatcagtgttatttgctcttggagccattttttaaaaaaaattttggcagtgagcagttgaatttatcttgaatttatcatgtgtgtgtatttctgaagcagctacatagcagaacattttaagagattctgttagcccacatgttcatgttggttgctgctgaatggtaaatattaaataaaattaccagattaatcttaataaaaaaaa

SEQ ID NO: 912 - protein, 1966 aa, Homo sapiens
MWIPTEHEKYGVVIASFRGTVPYGLSLEIGDTVQILEKCDGWYRGFALKNPNIKGIFPSSYVHLKNACVKNKGQFEMVIPTEDSVITEMTSTLRDWGTMWKQLYVRNEGDLFHRLWHIMNEILDLRRQVLVGHLTHDRMKDVKRHITARLDWGNEQLGLDLVPRKEYAMVDPEDISITELYRLMEHRHRKKDTPVQASSHHLFVQMKSLMCSNLGEELEVIFSLFDSKENRPISERFFLRLNRNGLPKAPDKPERHCSLFVDLGSSELRKDIYITVHIIRIGRMGAGEKKNACSVQYRRPFGCAVLSIADLLTGETKDDLILKVYMCNTESEWYQIHENIIKKLNARYNLTGSNAGLAVSLQLLHGDIEQIRREYSSVFSHGVSITRKLGFSNIIMPGEMRNDLYITIERGEFEKGGKSVARNVEVTMFIVDSSGQTLKDFISFGSGEPPASEYHSFVLYHNNSPRWSELLKLPIPVDKFRGAHIRFEFRHCSTKEKGEKKLFGFSFVPLMQEDGRTLPDGTHELIVHKCEENTNLQDTTRYLKLPFSKGIFLGNNNQAMKATKESFCITSFLCSTKLTQNGDMLDLLKWRTHPDKITGCLSKLKEIDGSEIVKFLQDTLDTLFGILDENSQKYGSKVFDSLVHIINLLQDSKFHHFKPVMDTYIESHFAGALAYRDLIKVLKWYVDRITEAERQEHIQEVLKAQEYIFKYIVQSRRLFSLATGGQNEEEFRCCIQELLMSVRFFLSQESKGSGALSQSQAVFLSSFPAVYSELLKLFDVREVANLVQDTLGSLPTILHVDDSLQAIKLQCIGKTVESQLYTNPDSRYILLPVVLHHLHIHLQEQKDLIMCARILSNVFCLIKKNSSEKSVLEEIDVIVASLLDILLRTILEITSRPQPSSSAMRFQFQDVTGEFVACLLSLLRQMTDRHYQQLLDSFNTKEELRDFLLQIFTVFRILIRPEMFPKDWTVMRLVANNVIITTVLYLSDALRKNFLNENFDYKIWDSYFYLAVIFINQLCLQLEMFTPSKKKKVLEKYGDMRVTMGCEIFSMWQNLGEHKLHFIPALIGPFLEVTLIPQPDLRNVMIPIFHDMMDWEQRRSGNFKQVEAKLIDKLDSLMSEGKGDETYRELFNSILLKKIERETWRESGVSLIATVTRLMERLLDYRDCMKMGEVDGKKIGCTVSLLNFYKTELNKEEMYIRYIHKLYDLHLKAQNFTEAAYTLLLYDELLEWSDRPLREFLTYPMQTEWQRKEHLHLTIIQNFDRGKCWENGIILCRKIAEQYESYYDYRNLSKMRMMEASLYDKIMDQQRLEPEFFRVGFYGKKFPFFLRNKEFVCRGHDYERLEAFQQRMLNEFPHAIAMQHANQPDETIFQAEAQYLQIYAVTPIPESQEVLQREGVPDNIKSFYKVNHIWKFRYDRPFHKGTKDKENEFKSLWVERTSLYLVQSLPGISRWFEVEKREVVEMSPLENAIEVLENKNQQLKTLISQCQTRQMQNINPLTMCLNGVIDAAVNGGVSRYQEAFFVKEYILSHPEDGEKIARLRELMLEQAQILEFGLAVHEKFVPQDMRPLHKKLVDQFFVMKSSLGIQEFSACMQASPVHFPNGSPRVCRNSAPASVSPDGTRVIPRRSPLSYPAVNRYSSSSLSSQASAEVSNITGQSESSDEVFNMQPSPSTSSLSSTHSASPNVTSSAPSSARASPLLSDKHKHSRENSCLSPRERPCSAIYPTPVEPSQRMLFNHIGDGALPRSDPNLSAPEKAVNPTPSSWSLDSGKEAKNMSDSGKLISPPVPPRPTQTASPARHTTSVSPSPAGRSPLKGSVQSFTPSPVEYHSPGLISNSPVLSGSYSSGISSLSRCSTSETSGFENQVNEQSAPLPVPVPVPVPSYGGEEPVRKESKTPPPYSVYERTLRRPVPLPHSLSIPVTSEPPALPPKPLAARSSHLENGARRTDPGPRPRPLPRKVSQL

SEQ ID NO: 913 - DNA, 5339 bp, Homo sapiens
gcgatgccgaggtcctctgctcccgccgggcgtgcagcgggcgcgcgcgcgtgtgtttatgtgtctgtgtgcgtgtgtgtgtgtgtctctctctgtgtgtgtgtgagatgaattggagtcatacgactgggtgtttccttccgagtggttttcatcagcaatccattaggaaatcatggaaactttttttttcctggctaaaaggatgaaaactgagtcatccacttttgactgtcatccatggaagagctcttattaaaagcctcagactttcgggacctatgattctttggcacaaccttttggaaaattcttaagcagggatgaagcaaacttgattggagttggggaaaaagaagacagattagtatttttcatgctgacaaaaaatagctgctatgacttttcccgcaacgtggacaggggccaagtgaagctgaactggtcatggtctgtcgcccagtgttcccttgtcgtcggcgattttgcccccgacccttcttggtgggcttagtggtggcaatctgtctcttctaccagactctgaccctccgagggtcgaggaagctcacagccgctgcccctggggctgtcccacacacatccactgaaacccaggcaagcagatgcaagaaaggattctctcaggacaaacagtgcttccttctctctggtaatgcccaggaaaccagaaaggtcaaagaatcaatggagacacactttggcagccatggccgaagggccatactctacaggcctcctttctacagcaaaacagagcttcagctacaccagcacattctgactcaacatggctatacggttgtcatcgctgaagaaaggctcaatgctggcctagggccggggctactagaacaaggtgatctgggctcttgggatctgctcatttgcctgtcttctaagaaagcagaaggaacaccctgtatatccaaggaagtcatgtgccagttaggtttacatcaaaaggcaaacagattaccagaaatacagcagccactttgcagaaaggaaggattatgtcaaatagttagaagattcccagaactgcaacttccagtgagtccctctgtgtgtctggatcagggaatgcaattaaagccgagtacttcgagtcaccttttaaaaacagtgaagccacgtgtgtggaaaccaggggactggagtcgtgaacagctgaatgaaacgacagtccttgctccacatgaaacaatctttcgagccgaagatctatctgtgattcttaaagcgtatgtgttggtgacgtccttaacccctttgcgtgcattcattcattcgacgggcacagtttggaatccaccaaagaaaaaacgcttcactgtcaagctgcaaacattttttgagacattcctgagagccagttcacctcaacaggcttttgacattatgaaggaagcaattggcaaactactgctagcggctgaagtattcagtgaaacatctactctgggaccaaagaccttccatagatgcagattctgctttcaacttctaacttttgatattggttatggcagtttcatgtaccctgtagtgctccaggtacacgagcatttaaattttcaagattatgataatatggattttgaggaccaaaatacagaagaattccttttaaatgacactttcaattttctcttccctaatgaatcatcactttccatattttctgagatatttcagagactttatagatcagatgttttcaagggtgaaaactatcaaaaggaactaaatcagtgtctgtccttagaagaaattaactcaattatgactttcataaaggaacttggaagtctgggacaattccaactgctcttcccatctactactcctgggattcagtcactgatgcatgaattttatgatgtggcaaatcctgtgggaaatcctggctcagtcctgacccaatactggtctcttttaaatgtatttgaacaatttcagttcatgaataaaaagacacagccacatccactggaatggaattctttcacagaagataagaacattgaaaaaccacaagtgccatttgatgcaatagaaaataaaaaagctgcagttccacaaattaaaaatgaaaataaagaaatacattgcagtgatgatgaaaacacaccatgtcatatcaagcagatcttcacacatccacatttggaactaaatcctgactttcatccaaagatcaaagattattactgtgaagtcccatttgatgtggtaacagtgacaattggagtggaaactcctaagtgtctgtgcaaggtgcacctgtacgagcaggcagggccaagctttgccagctaccctctgggcttaggaatgaacaaaatctcaatatttgttgtggatgaatctccagcacacggtgagactctgatcacgtacaaactcaccatctatagagaagaccgcccaagtctgcccttgtttgaggccttcacagcatgtggttttgtgcaggattgtggtttgctgattcatccagaggaaacctgtgggttacagcctatttcttctgactacattgaagccattttacagtctgaactaaaaagatgtccatctggggacatgaaaggccagtggattgtgccttgccttagttgttcggacaacaggacgtgtgactggagagaaataacctggcagccccacaactgccaatatggtgtcctaactaagcctcaactccagcagtgcctgggaggaaggaagattctgttcattggagattcaaccaacagagggatcatgtactatcttattgaaaggctgaatgaaacgttgcaggaatggcagaaagtacatggcactaaattctatcacaacgtcaatggtgggaagactttgatcagttattcctactatccccagttctggataagcccttcattgagaccaacatttgaaaatgcacttgaacacctcttgcaaagatcacgtcccctagagaatactggccagactgtattggttgttggtggtgttcagtggcttaattccaatcacctgcaaattattcacaaagttttgaagagggaaaatttactcaatatcctagtgatcatcaaaactttgggaattggatttcatctgccagtggatggagtacatttcttaacacagagtgaagtacagaacttatggaaagaaaatttgattattctggatactgcaaaaaaacatggctatgaagtagttgacacattcactataacaatggggcgttacaaagagtttctacaggggaagtgtggatgtcatttccatgaggtagtgaaatcaaagttatccaaagaatataactttattaaaatgaaaagatcaagaaatcatatcatgggaagatatttcagcaatcaaagcaaactacaacaaggcactgtaacaaattttcgatcgccatatcatgtcagaggtccaataaatcaggtttgttctgaaatccttctcagcaggatgtgtgcaaataaaaggactatgtaggctccctgcaggagagctgaatctggagctggagacgagctagtcacccggacaatggtctaggagccaagcgctgcacatcgcacacatttgggatcgaccacacacacttgtgcacaccagcacatgcatgcacaccagtacacacacagttaaataatgataacacttcttacagctttatgaattcaagatgtgaccttgaacaccagtccatttcacagtgaaagatatacctagagaaacgttacttgaagcataattattaaccagaaccactgtgggccaggtatggcattgtgataataaagagaaatatagacacttaaaattatgtgaaaaaaaggataatgctctttcatgttgtcttaccatatctataggtacatcaatattgaaaaggagaaaaaccaatgacattccactggcaagtagaagttgtcctttcattctttaccaggagaaaatgtgatgtttatgatggcttaggctttgtgaatctaatgcttatgaaaaacatttcttcctatactttttaaattttattactgaaaggaaaagaacaggaatgttccacaagggaatttgaagagattctgtgagagagatatgaaatattttatagttaaaacaccaatatattcaactttacacttcttgtgtttttcataaacattccctcttgtcttatctgtgtacttcgatgggtaactgcagtctgaattaatgaaatatgtaattttaaagtaagtaacaaaatgtagttcctcatgtattactgtactatgtttcattgatgatattacttaaatcttgtgtttgccattacagccctatgtaacttaaaattacaattatattttatgtaaatattttgcaaaggactatgcattctgaaatgcataggtgctttttcccaccaagcatttgcatatgtccacaaatagtattatgttactagtatctatattttgattttcctgagcaactgtatcaaatccaaatttagattagacaaaaaattattattttaattaaactgtggcatacatataatacatacctaattatagtagtgagaactatttcttttatctctttaggttcaaaatggtgaatttctttattatatgaatgctttgttgtgagataacatcacactgttacaatggattttagaggtttgtcttttttgggtggggtgggaagctgagagggttaattcaatacatggctgaaattaccaaatgtataaatacctcattttcactaccatacaagaaaaaaacacctattttgattgatcagttcttttgtatgaatatccacctcctttaaatactctatttttatatatatttttatatgaagataaacatgaatttatatttaactgtcttaaattatatttacataaatgcaaatatcacttgatataaacaatacaaatctgcatcttacagatgataatttttttagaagaatgatacagaattaactttaaaaataaaacttttctaatatacacttaaatgcaaacatcatttttaaattttcagtgatttttttaatgacataaaacgttaccaatgtgtgcagcctctccatcatgttttaacatactgtatactctatagcagtattacagtcagtatttcatataattttctttagacctaactgttaccatctgactgaggttactctggtatttatctcttcgctgctgaaataataatggattttagaaacaattgtaataatatcattaataaatgtcttactagtaataaaaaaaaaaaaaaaaaaaa

SEQ ID NO: 914 - protein, 1026 aa, Homo sapiens
MVCRPVFPCRRRFCPRPFLVGLVVAICLFYQTLTLRGSRKLTAAAPGAVPHTSTETQASRCKKGFSQDKQCFLLSGNAQETRKVKESMETHFGSHGRRAILYRPPFYSKTELQLHQHILTQHGYTVVIAEERLNAGLGPGLLEQGDLGSWDLLICLSSKKAEGTPCISKEVMCQLGLHQKANRLPEIQQPLCRKEGLCQIVRRFPELQLPVSPSVCLDQGMQLKPSTSSHLLKTVKPRVWKPGDWSREQLNETTVLAPHETIFRAEDLSVILKAYVLVTSLTPLRAFIHSTGTVWNPPKKKRFTVKLQTFFETFLRASSPQQAFDIMKEAIGKLLLAAEVFSETSTLGPKTFHRCRFCFQLLTFDIGYGSFMYPVVLQVHEHLNFQDYDNMDFEDQNTEEFLLNDTFNFLFPNESSLSIFSEIFQRLYRSDVFKGENYQKELNQCLSLEEINSIMTFIKELGSLGQFQLLFPSTTPGIQSLMHEFYDVANPVGNPGSVLTQYWSLLNVFEQFQFMNKKTQPHPLEWNSFTEDKNIEKPQVPFDAIENKKAAVPQIKNENKEIHCSDDENTPCHIKQIFTHPHLELNPDFHPKIKDYYCEVPFDVVTVTIGVETPKCLCKVHLYEQAGPSFASYPLGLGMNKISIFVVDESPAHGETLITYKLTIYREDRPSLPLFEAFTACGFVQDCGLLIHPEETCGLQPISSDYIEAILQSELKRCPSGDMKGQWIVPCLSCSDNRTCDWREITWQPHNCQYGVLTKPQLQQCLGGRKILFIGDSTNRGIMYYLIERLNETLQEWQKVHGTKFYHNVNGGKTLISYSYYPQFWISPSLRPTFENALEHLLQRSRPLENTGQTVLVVGGVQWLNSNHLQIIHKVLKRENLLNILVIIKTLGIGFHLPVDGVHFLTQSEVQNLWKENLIILDTAKKHGYEVVDTFTITMGRYKEFLQGKCGCHFHEVVKSKLSKEYNFIKMKRSRNHIMGRYFSNQSKLQQGTVTNFRSPYHVRGPINQVCSEILLSRMCANKRTM

SEQ ID NO: 915 - DNA, 2894 bp, Homo sapiens
agcctgcaaaaaccacagagggcaaagccagaaagatggaaaggcacccatgcagctcaccacttgcctcagggagaccctcttcacaggggcttctcaaaagacctccctatggtggttgggcattgcctccttcggggttccagagaagctgggctgcgccaatttgccgctgaacagccgccagaaggagctgtgcaagaggaaaccgtacctgctgccgagcatccgagagggcgcccggctgggcattcaggagtgcgggagccagttcagacacgagagatggaactgcatgatcaccgccgccgccactaccgccccgatgggcgccagccccctctttggctacgagctgagcagcggcaccaaagagacagcatttatttatgctgtgatggctgcaggcctggtgcattctgtgaccaggtcatgcagtgcaggcaacatgacagagtgttcctgtgacaccaccttgcagaacggcggctcagcaagtgaaggctggcactgggggggctgctccgatgatgtccagtatggcatgtggttcagcagaaagttcctagatttccccatcggaaacaccacgggcaaagaaaacaaagtactattagcaatgaacctacataacaatgaagctggaaggcaggctgtcgccaagttgatgtcagtagactgccgctgccacggagtttccggctcctgtgctgtgaaaacatgctggaaaaccatgtcttcttttgaaaagattggccatttgttgaaggataaatatgaaaacagtatccagatatcagacaaaacaaagaggaaaatgcgcaggagagaaaaagatcagaggaaaataccaatccataaggatgatctgctctatgttaataagtctcccaactactgtgtagaagataagaaactgggaatcccagggacacaaggcagagaatgcaaccgtacatcagagggtgcagatggctgcaacctcctctgctgtggccgaggttacaacacccatgtggtcaggcacgtggagaggtgtgagtgtaagttcatctggtgctgctatgtccgttgcaggaggtgtgaaagcatgactgatgtccacacttgcaagtaaccactccatccagccttgggcaagatgcctcagcaatatacaatggcattgcaaccagagaggtgcccatccctgtgcagcgctagtaaagttgactcttgcagtggaatccctagaaccttggacctgagagtttcccttacctgatcgacatattttcctttatctgatcaacccatcaatcatgtggatttcttgggattctaatgttgaaaaggtttatattcaccttttgatgatttggggaatatatattgacatacaaggaagataatctgtttcctaagcaagaaataacaggaaagatcccttatgccaggaggcctgccatactcaggataagatccttgaatatggaacttagttacaggactcaataatggtgggtgaacattagtcatttttaaaagacacctcttatagcaataaggagacattaacatgaatctcatttattctctcagtattttaactgaagaaattatactgtttgtgtgtggatagaagatgttgaaaagttaacataagcattgggtgctgacttaccctttcatgtacttccaaagaaaggtaatcaaaaagaatcttcttaagtgatataatatccctaaaaaaatgatcattacagatgtttagtgacaaagaatcaatatgtaaaaagtataatgaatgatttagattttaagtgccttttcactgggagaatctggaaaaacctccataaggtatatagcaatctttgatctttagattcatacttttatcacagatcagtttcaactgttaaaaacccacctctgagatactggggggaggatcctgaaacatgcgggaaaaggagaggtaaacagtggaggtaaaaatataatttcatacattgtaaagaaaagcaccctttaaatgtgtaaagacagtgttttgtaaagaattttgtttaaaaagtttctattttgtaaatacagtacttaagttatatgatttatattaaaacatttattgacaaagcctaagagctaaggcagtaaaattatctcataaataatattagcttattttttttcatactattaatgctatttttttggacatcgaagagaatttaacttagcagttagttatatggatgtgtatttcttgctaaaatgacagttttatatgttatagattaaaatatgttgcaaaatatcaaaaatttgtgttatttcagcagtaagattaattgaattctcttttcacattagttatgcttaactcataaggttattataataaattatattagtaaaagtcttaactggaaaaaagaatctaaatcagaatagtgatcaatttgtggatttgatatcctggatatttattatattttatgtaatgctgcatttctatttgaatgttaagtggtctttcttgtttttaatattcatgcatgtatattcatcatattttacaaggttcctggtaaaaattacagggctctatttaaggatgtattttaatgtaaatgcttatgttttttatgaattgttaaatatttcagtattatatagaaaaaaatagatttttaaaattcagaatggacaaagagaatattcattttcttattaataagataaagaaatgtttccctgccccacagtcttcattctatttctctttaattttattcactgaggcagagaaacaatttttgaaaaagagcaaacccatggaaaatgtctcagatctaatattaaaatcaagactaagcatttaactgtgaaaaaaaaaaaaaaaaaaa

SEQ ID NO: 916 - protein, 355 aa, Homo sapiens
MQLTTCLRETLFTGASQKTSLWWLGIASFGVPEKLGCANLPLNSRQKELCKRKPYLLPSIREGARLGIQECGSQFRHERWNCMITAAATTAPMGASPLFGYELSSGTKETAFIYAVMAAGLVHSVTRSCSAGNMTECSCDTTLQNGGSASEGWHWGGCSDDVQYGMWFSRKFLDFPIGNTTGKENKVLLAMNLHNNEAGRQAVAKLMSVDCRCHGVSGSCAVKTCWKTMSSFEKIGHLLKDKYENSIQISDKTKRKMRRREKDQRKIPIHKDDLLYVNKSPNYCVEDKKLGIPGTQGRECNRTSEGADGCNLLCCGRGYNTHVVRHVERCECKFIWCCYVRCRRCESMTDVHTCK

SEQ ID NO: 917 - DNA, 3132 bp, Homo sapiens
cccgcatctcctgcacatctccacccctgcgcaggaggagatccccaggctgctctctccatctctcctacagctccctgcaaacgagggggaagctgctgagagtccctatcactgctggccttttaatgttgtatgcaaggaggaagagggcgagggataacttggtgctggacaactgacctgcggcccgaagggcctctggggagggggtgcaaaagaggagcggctgggctgggggactccatgcgggggcgatggacagggcggcgctcctgggactggcccgcttgtgcgcgctgtgggcagccctgctcgtgctgttcccctacggagcccaaggaaactggatgtggttgggcattgcctccttcggggttccagagaagctgggctgcgccaatttgccgctgaacagccgccagaaggagctgtgcaagaggaaaccgtacctgctgccgagcatccgagagggcgcccggctgggcattcaggagtgcgggagccagttcagacacgagagatggaactgcatgatcaccgccgccgccactaccgccccgatgggcgccagccccctctttggctacgagctgagcagcggcaccaaagagacagcatttatttatgctgtgatggctgcaggcctggtgcattctgtgaccaggtcatgcagtgcaggcaacatgacagagtgttcctgtgacaccaccttgcagaacggcggctcagcaagtgaaggctggcactgggggggctgctccgatgatgtccagtatggcatgtggttcagcagaaagttcctagatttccccatcggaaacaccacgggcaaagaaaacaaagtactattagcaatgaacctacataacaatgaagctggaaggcaggctgtcgccaagttgatgtcagtagactgccgctgccacggagtttccggctcctgtgctgtgaaaacatgctggaaaaccatgtcttcttttgaaaagattggccatttgttgaaggataaatatgaaaacagtatccagatatcagacaaaacaaagaggaaaatgcgcaggagagaaaaagatcagaggaaaataccaatccataaggatgatctgctctatgttaataagtctcccaactactgtgtagaagataagaaactgggaatcccagggacacaaggcagagaatgcaaccgtacatcagagggtgcagatggctgcaacctcctctgctgtggccgaggttacaacacccatgtggtcaggcacgtggagaggtgtgagtgtaagttcatctggtgctgctatgtccgttgcaggaggtgtgaaagcatgactgatgtccacacttgcaagtaaccactccatccagccttgggcaagatgcctcagcaatatacaatggcattgcaaccagagaggtgcccatccctgtgcagcgctagtaaagttgactcttgcagtggaatccctagaaccttggacctgagagtttcccttacctgatcgacatattttcctttatctgatcaacccatcaatcatgtggatttcttgggattctaatgttgaaaaggtttatattcaccttttgatgatttggggaatatatattgacatacaaggaagataatctgtttcctaagcaagaaataacaggaaagatcccttatgccaggaggcctgccatactcaggataagatccttgaatatggaacttagttacaggactcaataatggtgggtgaacattagtcatttttaaaagacacctcttatagcaataaggagacattaacatgaatctcatttattctctcagtattttaactgaagaaattatactgtttgtgtgtggatagaagatgttgaaaagttaacataagcattgggtgctgacttaccctttcatgtacttccaaagaaaggtaatcaaaaagaatcttcttaagtgatataatatccctaaaaaaatgatcattacagatgtttagtgacaaagaatcaatatgtaaaaagtataatgaatgatttagattttaagtgccttttcactgggagaatctggaaaaacctccataaggtatatagcaatctttgatctttagattcatacttttatcacagatcagtttcaactgttaaaaacccacctctgagatactggggggaggatcctgaaacatgcgggaaaaggagaggtaaacagtggaggtaaaaatataatttcatacattgtaaagaaaagcaccctttaaatgtgtaaagacagtgttttgtaaagaattttgtttaaaaagtttctattttgtaaatacagtacttaagttatatgatttatattaaaacatttattgacaaagcctaagagctaaggcagtaaaattatctcataaataatattagcttattttttttcatactattaatgctatttttttggacatcgaagagaatttaacttagcagttagttatatggatgtgtatttcttgctaaaatgacagttttatatgttatagattaaaatatgttgcaaaatatcaaaaatttgtgttatttcagcagtaagattaattgaattctcttttcacattagttatgcttaactcataaggttattataataaattatattagtaaaagtcttaactggaaaaaagaatctaaatcagaatagtgatcaatttgtggatttgatatcctggatatttattatattttatgtaatgctgcatttctatttgaatgttaagtggtctttcttgtttttaatattcatgcatgtatattcatcatattttacaaggttcctggtaaaaattacagggctctatttaaggatgtattttaatgtaaatgcttatgttttttatgaattgttaaatatttcagtattatatagaaaaaaatagatttttaaaattcagaatggacaaagagaatattcattttcttattaataagataaagaaatgtttccctgccccacagtcttcattctatttctctttaattttattcactgaggcagagaaacaatttttgaaaaagagcaaacccatggaaaatgtctcagatctaatattaaaatcaagactaagcatttaactgtgaaaaaaaaaaaaaaaaaaa

SEQ ID NO: 918 - protein, 365 aa, Homo sapiens
MDRAALLGLARLCALWAALLVLFPYGAQGNWMWLGIASFGVPEKLGCANLPLNSRQKELCKRKPYLLPSIREGARLGIQECGSQFRHERWNCMITAAATTAPMGASPLFGYELSSGTKETAFIYAVMAAGLVHSVTRSCSAGNMTECSCDTTLQNGGSASEGWHWGGCSDDVQYGMWFSRKFLDFPIGNTTGKENKVLLAMNLHNNEAGRQAVAKLMSVDCRCHGVSGSCAVKTCWKTMSSFEKIGHLLKDKYENSIQISDKTKRKMRRREKDQRKIPIHKDDLLYVNKSPNYCVEDKKLGIPGTQGRECNRTSEGADGCNLLCCGRGYNTHVVRHVERCECKFIWCCYVRCRRCESMTDVHTCK

SEQ ID NO: 919 - DNA, 2512 bp, Homo sapiens
attggtcgcggccgggaagcgtgggaggaggcccagcggcgagctggctttctcctggccacttgccggggtgaggggcagccggaggagtccgagaggaagcggaggcgcgagctggaggcggcggctcccgtcggcctccggcaggactgagcgctgggaggccggagcatattaatgaaaagtgccataaactgaaaaaccaaacatgagggtagcaggtgctgcaaagttggtggtagctgtggcagtgtttttactgacattttatgttatttctcaagtatttgaaataaaaatggatgcaagtttaggaaatctatttgcaagatcagcattggacacagctgcacgttctacaaagcctcccagatataagtgtgggatctcaaaagcttgccctgagaagcattttgcttttaaaatggcaagtggagcagccaacgtggtgggacccaaaatctgcctggaagataatgttttaatgagtggtgttaagaataatgttggaagagggatcaatgttgccttggcaaatggaaaaacaggagaagtattagacactaaatattttgacatgtggggaggagatgtggcaccatttattgagtttctgaaggccatacaagatggaacaatagttttaatgggaacatacgatgatggagcaaccaaactcaatgatgaggcacggcggctcattgctgatttggggagcacatctattactaatcttggttttagagacaactgggtcttctgtggtgggaagggcattaagacaaaaagcccttttgaacagcacataaagaacaataaggatacaaacaaatatgaaggatggcctgaagttgtagaaatggaaggatgcatcccccagaagcaagactaatggaaatgtggagagaattgaagaaagcgcactttcactcttaatgggagagctataaatggcagagctatgtgtaaatattttaagagcatgcagccatcttggtgtgtgcatgagtattgtctcttttgatatcaggattatttattgctaacgtaaatagatagcattgtaaataatcatcacaatgatcaaatcactgaaccatgtctccgcacatttccctaaaagtacaatgtttagactgctatggtaatacatattttaaattctaaaagcatacacaatgtgtaactgaatggtttgtgaaaaatatattgatatatatactagttgctatgaaaatatcatggaataatagggattttagggtggatactttattttcttttatgtttctatatgttgcgttgtgatgacattatcttttaaattaaaaagagatttggctagttgtgtgtgtaatgttactttacagtccgactctcctgatgtacctcttttcatgatctttttctttccttcccaagaaactgaggaatgtttaatatgaaaacatacatcggatatgtgaaaagcacaacaaaattcttaatgtacacagtaaaaaagtaaatatataaatgtagatggcatttaggaccacagcttgctggatttgtgttagctatgggaataacttgattttgtataagctatttagagtgaggctggaggtggcagcttcacagaactggagaaccaggccaagtcccctccccaacctaattaggtcattcaggacagctaagtcagtatatttagagcaatactagcatacgtttttcttaattgttatcagcattgaccaagtggtttggaaggaggcatgctttaatatcacaataattttgatttgtaaaccaagaaattaatcctgtgtttatctaacttcataatagcaattattgcccgaagctatagtggcatatttacaaaagttcttattactgggcggactgataacatttaaaaaataattgtgtttgaccccaaatgactttatacccaattctacataaaaatatagaagatctatctttttttgttaccttcagatgttcactaaataactcagtttttaagcagaagttttcagggcattaaatatatgttgtgtatgaagtatctcaaactggaacataaatttagtgatcaaactgccattcacagtgtaaggcagcacttaaatttcgaacctaaagtttagatgcattgtataaaaaaacctaaaagcagtatctgttatttagctgtaaaccaagttggaagctattcggataatttcttaaatattgatgaactttggagtactgtttcttccttcaaactgaatgtaattaattcatgaataaatgcaccttatatgtttaaacaatctttgtatacttttgggatttttggtgcttatatgctaaatcacattcagcatgtgtattttgacatttaaaatacttccctcaattctgtaaattaaaagaatagttattttacagttccagggattgtgaaataaatgttgcagttttttaaaataatgaaaataaatactcttggttttgctttgtgaaaaaaaaaaaa

SEQ ID NO: 920 - protein, 227 aa, Homo sapiens
MRVAGAAKLVVAVAVFLLTFYVISQVFEIKMDASLGNLFARSALDTAARSTKPPRYKCGISKACPEKHFAFKMASGAANVVGPKICLEDNVLMSGVKNNVGRGINVALANGKTGEVLDTKYFDMWGGDVAPFIEFLKAIQDGTIVLMGTYDDGATKLNDEARRLIADLGSTSITNLGFRDNWVFCGGKGIKTKSPFEQHIKNNKDTNKYEGWPEVVEMEGCIPQKQD

SEQ ID NO: 921 - DNA, 2552 bp, Homo sapiens
attggtcgcggccgggaagcgtgggaggaggcccagcggcgagctggctttctcctggccacttgccggggtgaggggcagccggaggagtccgagaggaagcggaggcgcgagctggaggcggcggctcccgtcggcctccggcaggactgagcgctgggaggccggaaggcgggcgcgcacggcggagaggcgggcgggaggccggagcatattaatgaaaagtgccataaactgaaaaaccaaacatgagggtagcaggtgctgcaaagttggtggtagctgtggcagtgtttttactgacattttatgttatttctcaagtatttgaaataaaaatggatgcaagtttaggaaatctatttgcaagatcagcattggacacagctgcacgttctacaaagcctcccagatataagtgtgggatctcaaaagcttgccctgagaagcattttgcttttaaaatggcaagtggagcagccaacgtggtgggacccaaaatctgcctggaagataatgttttaatgagtggtgttaagaataatgttggaagagggatcaatgttgccttggcaaatggaaaaacaggagaagtattagacactaaatattttgacatgtggggaggagatgtggcaccatttattgagtttctgaaggccatacaagatggaacaatagttttaatgggaacatacgatgatggagcaaccaaactcaatgatgaggcacggcggctcattgctgatttggggagcacatctattactaatcttggttttagagacaactgggtcttctgtggtgggaagggcattaagacaaaaagcccttttgaacagcacataaagaacaataaggatacaaacaaatatgaaggatggcctgaagttgtagaaatggaaggatgcatcccccagaagcaagactaatggaaatgtggagagaattgaagaaagcgcactttcactcttaatgggagagctataaatggcagagctatgtgtaaatattttaagagcatgcagccatcttggtgtgtgcatgagtattgtctcttttgatatcaggattatttattgctaacgtaaatagatagcattgtaaataatcatcacaatgatcaaatcactgaaccatgtctccgcacatttccctaaaagtacaatgtttagactgctatggtaatacatattttaaattctaaaagcatacacaatgtgtaactgaatggtttgtgaaaaatatattgatatatatactagttgctatgaaaatatcatggaataatagggattttagggtggatactttattttcttttatgtttctatatgttgcgttgtgatgacattatcttttaaattaaaaagagatttggctagttgtgtgtgtaatgttactttacagtccgactctcctgatgtacctcttttcatgatctttttctttccttcccaagaaactgaggaatgtttaatatgaaaacatacatcggatatgtgaaaagcacaacaaaattcttaatgtacacagtaaaaaagtaaatatataaatgtagatggcatttaggaccacagcttgctggatttgtgttagctatgggaataacttgattttgtataagctatttagagtgaggctggaggtggcagcttcacagaactggagaaccaggccaagtcccctccccaacctaattaggtcattcaggacagctaagtcagtatatttagagcaatactagcatacgtttttcttaattgttatcagcattgaccaagtggtttggaaggaggcatgctttaatatcacaataattttgatttgtaaaccaagaaattaatcctgtgtttatctaacttcataatagcaattattgcccgaagctatagtggcatatttacaaaagttcttattactgggcggactgataacatttaaaaaataattgtgtttgaccccaaatgactttatacccaattctacataaaaatatagaagatctatctttttttgttaccttcagatgttcactaaataactcagtttttaagcagaagttttcagggcattaaatatatgttgtgtatgaagtatctcaaactggaacataaatttagtgatcaaactgccattcacagtgtaaggcagcacttaaatttcgaacctaaagtttagatgcattgtataaaaaaacctaaaagcagtatctgttatttagctgtaaaccaagttggaagctattcggataatttcttaaatattgatgaactttggagtactgtttcttccttcaaactgaatgtaattaattcatgaataaatgcaccttatatgtttaaacaatctttgtatacttttgggatttttggtgcttatatgctaaatcacattcagcatgtgtattttgacatttaaaatacttccctcaattctgtaaattaaaagaatagttattttacagttccagggattgtgaaataaatgttgcagttttttaaaataatgaaaataaatactcttggttttgctttgtgaaaaaaaaaaaa

SEQ ID NO: 922 - protein, 227 aa, Homo sapiens; identical to SEQ ID NO: 920

SEQ ID NO: 923 - DNA, 471 bp, Homo sapiens
atgctagaaacaggatatttagggcactttaaaaaaagtaatagtgctgaagaggttgtttatgagtgcaccaaccagccacctctgtccctttcccggatgatcccgaaaatgaagcttcctggccaggaaaacaaaacggccgtggttgtgggaaccataacagatgacgtgtgggttcaggaggtgcccaaactgaaggtgtgtgcactgggcgtgaccagccgggcccgcagccacatcttcagggtggggggcaagaacctcactttcgaccagctggccctggactcccccaaggtctgcggcaccgtcctgctctcaggtcctcgcaagggtcgagaggtgtactggcatttcgacaaggccctgggaaccccacacagccacaccaaaccctacgtccgctccaagggccggaagttcgagtatgccagaggccaaggggccagccaaggctacaaaaactaa

SEQ ID NO: 924 - protein, 156 aa, Homo sapiens
MLETGYLGHFKKSNSAEEVVYECTNQPPLSLSRMIPKMKLPGQENKTAVVVGTITDDVWVQEVPKLKVCALGVTSRARSHIFRVGGKNLTFDQLALDSPKVCGTVLLSGPRKGREVYWHFDKALGTPHSHTKPYVRSKGRKFEYARGQGASQGYKN

SEQ ID NO: 925 - DNA, 792 bp, Homo sapiens
agctctttctgctgctccccagctctcggatacagccgacaccatgggtttcggagacctgaaaagccccaccggcctccaggtgctcaacgattacctggcggacaagagctacatcaaggggtatggtgccatcacaagcagatgtggcagtatttgaagccgtgtccggcccaccacctgccgacttgtgtcatgccctacgttggtataatcacatcaagtcttacgaaaaggaaaaggccggcctgccaggagtgaagaaagctttgagcaagtatggtcctgccgatgtggaagacactacaggaagtggagctacagacagtaaagatgatgatgacattgatctctttggatccgattatgaggaggaaagtgaagaagcaaagaggctaagggaagaacatcttgcacaatatgaatcaaagaaagccaaaaaacctgcacttgttgccaagtcttccatcttactagatgtgaaaccttgggatgatgagacagatatggcgaaattagaggagtgtgtcagaagcattcaagcagacggcttagtctggggctcatctaaactagttccagtgggatacggaattaagaaacttcaaatacagtgtgtagttgaagatgataaagttggaacagatatgctggaggagcagatcactgcttttgaggactatgtgcagtccatggatgtggctgctttcaacaagatctaaaaatccatcctggatcatggcatttaaataaaagcttgaaagattaaagaaaaaagaaagaaagaaagaa

SEQ ID NO: 926 - DNA, 207 bp, Homo sapiens
atgaaggagcaggctgaccaagatgaatcctccccatgtactgccatgttgactgctcaggatgtggtccagaggtgcaaggagctgggcatcactgccctacacatcaagctcctggccacaggaggaaataggaccaagacccctggacctggggtgcggttggtcccccgagcccttgcctgctcaggtatgaagagccggtag

SEQ ID NO: 927 - protein, 68 aa, Homo sapiens [sequence omitted]

SEQ ID NO: 928 - DNA, 9890 bp, Homo sapiens
acaagctctccatgtgagctgacaggcgagtggaaacccctcgagtcacgctgcccggcggcggagggagcgctcgcccgcagtggcaacagctgcaccaccgtccccgtcgctctgccttcctcttctgcagcctctgctcttctgattacctccctcccccgtcctttggtgatttttttttttcaagaaggagagggcggggtaggtgtccgttccctcccctcttccccctcctttgccttcttggtttgaatttcctcccccggcgttgcactggcacacagtgcaagaggcaatacccgcacggagggagaacgaaggctgagactcccctgccgctccaagcccggaagaactggagcctggaggggggtgaggggagaagaggaagcgggaggggcttggcttcctcgcgtatttgaggacagcccatctcccttcaagaaccctacggagagtcggactgcatctccgcagcgagctcttggagcgccgccggccgggaggcgaaggatgcaggcggctccgcgcgccggctgcggggcagcgctcctgctgtggattgtcagcagctgcctctgcagagcctggacggctccctccacgtcccaaaaatgtgatgagccacttgtctctggactcccccatgtggctttcagcagctcctcctccatctctggtagctattctcccggctatgccaagataaacaagagaggaggtgctgggggatggtctccatcagacagcgaccattatcaatggcttcaggttgactttggcaatcggaagcagatcagtgccattgcaacccaaggaaggtatagcagctcagattgggtgacccaataccggatgctctacagcgacacagggagaaactggaaaccctatcatcaagatgggaatatctgggcatttcccggaaacattaactctgacggtgtggtccggcacgaattacagcatccgattattgcccgctatgtgcgcatagtgcctctggattggaatggagaaggtcgcattggactcagaattgaagtttatggctgttcttactgggctgatgttatcaactttgatggccatgttgtattaccatatagattcagaaacaagaagatgaaaacactgaaagatgtcattgccttgaactttaagacgtctgaaagtgaaggagtaatcctgcacggagaaggacagcaaggagattacattaccttggaactgaaaaaagccaagctggtcctcagtttaaacttaggaagcaaccagcttggccccatatatggccacacatcagtgatgacaggaagtttgctggatgaccaccactggcactctgtggtcattgagcgccaggggcggagcattaacctcactctggacaggagcatgcagcacttccgtaccaatggagagtttgactacctggacttggactatgagataacctttggaggcatccctttctctggcaagcccagctccagcagtagaaagaatttcaaaggctgcatggaaagcatcaactacaatggcgtcaacattactgatcttgccagaaggaagaaattagagccctcaaatgtgggaaatttgagcttttcttgtgtggaaccctatacggtgcctgtctttttcaacgctacaagttacctggaggtgcccggacggcttaaccaggacctgttctcagtcagtttccagtttaggacatggaaccccaatggtctcctggtcttcagtcactttgcggataatttgggcaatgtggagattgacctcactgaaagcaaagtgggtgttcacatcaacatcacacagaccaagatgagccaaatcgatatttcctcaggttctgggttgaatgatggacagtggcacgaggttcgcttcctagccaaggaaaattttgctattctcaccatcgatggagatgaagcatcagcagttcgaactaatagtccccttcaagttaaaactggcgagaagtacttttttggaggttttctgaaccagatgaataactcaagtcactctgtccttcagccttcattccaaggatgcatgcagctcattcaagtggacgatcaacttgtaaatttatacgaagtggcacaaaggaagccgggaagtttcgcgaatgtcagcattgacatgtgtgcgatcatagacagatgtgtgcccaatcactgtgagcatggtggaaagtgctcgcaaacatgggacagcttcaaatgcacttgtgatgagacaggatacagtggggccacctgccacaactctatctacgagccttcctgtgaagcctacaaacacctaggacagacatcaaattattactggatagatcctgatggcagcggacctctggggcctctgaaagtttactgcaacatgacagaggacaaagtgtggaccatagtgtctcatgacttgcagatgcagacgcctgtggtcggctacaacccagaaaaatactcagtgacacagctcgtttacagcgcctccatggaccagataagtgccatcactgacagtgccgagtactgcgagcagtatgtctcctatttctgcaagatgtcaagattgttgaacaccccagatggaagcccttacacttggtgggttggcaaagccaacgagaagcactactactggggaggctctgggcctggaatccagaaatgtgcctgcggcatcgaacgcaactgcacagatcccaagtactactgtaactgcgacgcggactacaagcaatggaggaaggatgctggtttcttatcatacaaagatcacctgccagtgagccaagtggtggttggagatactgaccgtcaaggctcagaagccaaattgagcgtaggtcctctgcgctgccaaggagacaggaattattggaatgccgcctctttcccaaacccatcctcctacctgcacttctctactttccaaggggaaactagcgctgacatttctttctacttcaaaacattaaccccctggggagtgtttcttgaaaatatgggaaaggaagatttcatcaagctggagctgaagtctgccacagaagtgtccttttcatttgatgtgggaaatgggccagtagagattgtagtgaggtcaccaacccctctcaacgatgaccagtggcaccgggtcactgcagagaggaatgtcaagcaggccagcctacaggtggaccggctaccgcagcagatccgcaaggccccaacagaaggccacacccgcctggagctctacagccagttatttgtgggtggtgctgggggccagcagggcttcctgggctgcatccgctccttgaggatgaatggggtgacacttgacctggaggaaagagcaaaggtcacatctgggttcatatccggatgctcgggccattgcaccagctatggaacaaactgtgaaaatggaggcaaatgcctagagagataccacggttactcctgcgattgctctaatactgcatatgatggaacattttgcaacaaagatgttggtgcattttttgaagaagggatgtggctacgatataactttcaggcaccagcaacaaatgccagagactccagcagcagagtagacaacgctcccgaccagcagaactcccacccggacctggcacaggaggagatccgcttcagcttcagcaccaccaaggcgccctgcattctcctctacatcagctccttcaccacagacttcttggcagtcctcgtcaaacccactggaagcttacagattcgatacaacctgggtggcacccgagagccatacaatattgacgtagaccacaggaacatggccaatggacagccccacagtgtcaacatcacccgccacgagaagaccatctttctcaagctcgatcattatccttctgtgagttaccatctgccaagttcatccgacaccctcttcaattctcccaagtcgctctttctgggaaaagttatagaaacagggaaaattgaccaagagattcacaaatacaacaccccaggattcactggttgcctctccagagtccagttcaaccagatcgcccctctcaaggccgccttgaggcagacaaacgcctcggctcacgtccacatccagggcgagctggtggagtccaactgcggggcctcgccgctgaccctctcccccatgtcgtccgccaccgacccctggcacctggatcacctggattcagccagtgcggattttccatataatccaggacaaggccaagctataagaaatggagtcaacagaaactcggctatcattggaggcgtcattgctgtggtgattttcaccatcctgtgcaccctggtcttcctgatccggtacatgttccgccacaagggcacctaccataccaacgaagcaaagggggcggagtcggcagagagcgcggacgccgccatcatgaacaacgaccccaacttcacagagaccattgatgaaagcaaaaaggaatggctcatttgaggggtggctacttggctatgggatagggaggagggaattactagggaggagagaaagggacaaaagcaccctgcttcatactcttgagcacatccttaaaatatcagcacaagttgggggaggcaggcaatggaatataatggaatattcttgagactgatcacaaaaaaaaaaacctttttaatatttctttatagctgagttttcccttctgtatcaaaacaaaataatacaaaaaatgcttttagagtttaagcaatggttgaaatttgtaggtactatctgtcttattttgtgtgtgtttagaggtgttctaaagacccgtggtaacagggcaagttttctacgtttttaagagcccttagaacgtgggtattttttttcttgagaaaagctaatgcacctacagatggcccccaacattctcttccttttgcttctagtcaaccttaatgggctgttacagaaactagttcgtgtttatatactatttcctttgatgtcctataagtcggaaaagaaaggggcaaagagaacctattatttgccagtttttaagcagagctcaatctatgccagctctctggcatctggggttcctgactgataccagcagttgaaggaagagagtgcatggcacctggtgtgtaacgacacaatcagcacaactggagagaggcattaaagaaccagggaaggtagtttgatttttcattgaattctacaagctaatattgttccacgtatgtagtcttagaccaatagctgtaactatcagctgcaataccatggtgaccagctgttacaaaagattttttcctgttttatctgaaacatactggatttatatatgtataagcgcctcaatggggaattagagccagatgttatgatttgtttgctctttttcttttatagtttagttatagcaaaaatatggataatttctagtgaatgcataaattaggttgcgtttcttattttgctttaaatctctggtagtttttccacccctgtgacacaatcctaatagacagtgtcctgtaaatggacacaacacaataaagtcaagttattattgctgttactctggatgatatggaaaacactgccatattttaaatcaactactccacgtgtttttccatccaatcacactgctgtgattcagggatctttcttctaagacggacacatttgaacctcaggttcatcacaaacctggtacctgttgcttcccagaggatggagaagtgtagttaatcacacctcttagtttaatctgaaatcttgacccagttatttaacaaataaatacctcattgattatatttaaaagtaatacacttcctgtaaacaaatggggacaatgcatccaaaaaatctttttaaacagattacacaaaaattatttccagaaaggctaccatttatcatcattatatttcaagcctcttatacttaataagcactttctaaaaagtcttgagatcccaccattctgaggaattcaatatgatcactttttccttctttgcctgggagaggttaagaggaggtttcgaaggtatagatgctattgttctgatggcccggctgaataaaatggaaattctagtttgttagaattatgcattctttttcaagattctcagtgtgcctaacttattggagcacatcagtttcttgggtaatggaaaacattacctagagttgccagtggcacattacaccagtacagagcacattccaaaggagacattggaccagttaattcccatacaagtcaaggtaacagaacaaaagggaatcctgatgcccttttaccattgctggttgagctcaggcactgtcatggacacccttaattttaaaaggttttaatcattcttctataaaatacatttaaaatggaaaaatacttaatatcactaaatatcagaacaatgtaacatttacaaatgacatattgaaagcaaaggctgttttatttagccaagatgattaccattaggagttactttatgtattgttgaaagcaaattttaaacatgatgttttagaagtgtttctgatttttaaacctggtttacaggtattacttctgcacttaccaaataatgccagatggaaatttattatttcttgcaattcccatgatagctctgttctttatgcattgtctcaacactttcccttttttcccaaaatgagtagagaattaaagccacccaaaacagcttctgctactaaaatgttctcatcctttctcctccctctccttttcctgccacaaaaggtgaaaaatgagatccaatcctctcaccaaaatttcaaacctaggacactggaatgactgcagggatcagtggttctcccatatcaccatcaattaagacatataggacactgtcttccttcaagagggttacaatgtggccatcagacaggaaaccaaacggtggataaagtattaagtaactaagtgccaaataaatgctggaaatcttgacctctccttgggattatgggtgtaacaaaaatccctacatctgtttatgaaggccatattcagtacattttaaatggtaaataatctgtttatgtgaagaaaaagaattaagtctttcttccaactctctccttggatagcctagcacagtgcagcctccataaccatgacattcccgcccaagctctcagtgcctaatcctgctttgtcattcacatctcacaaaatcttgacatcttacattccaatacattatcaagcaagcacaagtatgctggtagtagcctctttaaataatatgtatagacaacaacaacgacaaaaaatagactgttttaaagtttcagggaaagttggtggctgatttaaagttgtgcaggaaacatcttctgtgtatgaagcaaatgtcgatgttttgaaaaaagctaggagatgactttgaatgaatgcaaggttagtgagatcctaagctctcaaaatagcatattccctagagctcaagaaagctggtccaggaggttgaaaaagctattttgttgttaaattattttctggcccttcttaatatttaaaaatgtatttccccttgtggctttcaaccacctgctcaaaaaaagagacttgttacatgaaagttttcattaaagagctgaaaacaagaatttagagagccattcctagaaaatgtcctactgccctgcatttgacaaacaagcatcctttactaacaagagcaggaattcagaggcacaagaaaaagcattggcatgagccaaagagtctgtcttaatgttacttttgaaaatctgctgagcggccaccatatgcaggctgagagctgggcacaggcgaagccattggaagcacttcaggaacaagcacacagctgtgggacttgaacatgcaagtgttcaggttgtgtcaagaagcttttctttccttctatgatggaatctgttcttttctatcctacttttttctctcttcctctcctcaccacattataccctgctcttacgcagtaaacgttttaatggcccgtttatgtctcatgcctccaaacaacactgaatttgaaaccccccattttttcttttcaccaccctgttgagcaattttcccaaaaaaagggcagcaattattaaattgaattcaagtaagccagccaaagataggtcctaaattgctagtcccagtagaaccacctgatcctaaaccagtgcgaaacaaacagtaacaatgtccccagctgacttcagctaagaaccaatggctcctacccccgccccgcttttttttgttgttttttgttttgttttgagacggagtcttgctctgtcccccaggctggagtgcactggcgcaatctcgggctcactgcaacctcctcctcctcccacattgaggcgattctcctgcctcagcctcccaagtagctgggattacaggcacccgccatcacacccagctaatttttttttttttttgtattattagtagaagccaggtttcaccatgttggccagggtggtctcgaactcctgacctcaagtgatccgtccacctcggccttgcaaattgctgggattacaggtgtgagccaccgtgccgagccagccccattttttaaatgatgttttggttaagagtggaccatgagaattagctgacagcatcccctttctctctccctgccttggtgggaccctccctgtgtgaccttggtcaagtcctcgaacttttgtcccgtatttaagatggagctgttttacctacttcataagacagttgcgaggtgccattgattcttgactgcaaaataccttgaaacccttatataaagactgaagtcaacggagcctagtgaaagacttactttgtggcttgtggttgaaagtcacatcaaaagacaaatgtggccacgttcaggaattggagacttactggcatggctctacagctgctcagttattaatcatgcagactaacctgtcaacactgggagatgcaacatagcaaaaggacagagaaattagaattttttgtgcagaaagccctaaattcccacctgaatgtaacttacagctcccttacctactctcacacatgccctcaaacatgctagattggcttatacataggccaacacaaaatacaaacgtgacgtgttcatgtagcctagtggctatatgcctattctccatgtaccctgcatggtagtgctgcaaactttaaagtacatttctttcacagcagtattttttttcataagtggcatataaatgtcattcaatgaaatggggaaatcacgttgagaagttggtctgtcatctcccattgagcaaagactggcaggagataataaaaataaatatgggcacacatgtattaatatacagcacgcatttacaagtttattttccagataaaattgtgctataagaacagctctaccaagacagtctgcaccatttccaagtctcagttaatttacagcaactgctgctttcggagatggctgtgaaaatatggaagttcctctcaagtaggccaagaaacagttctagattttactaagttttattttgtcaggttttttaaattttttcagtgagcgtggtgactgcagaggttagtgctgtgaaaagctgggctaaatattctttctgtaaagtcaaacaggattccatcccctgtgaaataacacaaaatttcactctctaaaagcaacagcatgtaaactagaatgaaagaaggaaattatgtacgtatgcctaatattctttgtgaatgtctttcatttaactaaaattatattagaaaccagattgataaataaaaaattcaaagtagttttaattatcct

SEQ ID NO: 929 - protein, 1331 aa, Homo sapiens
MQAAPRAGCGAALLLWIVSSCLCRAWTAPSTSQKCDEPLVSGLPHVAFSSSSSISGSYSPGYAKINKRGGAGGWSPSDSDHYQWLQVDFGNRKQISAIATQGRYSSSDWVTQYRMLYSDTGRNWKPYHQDGNIWAFPGNINSDGVVRHELQHPIIARYVRIVPLDWNGEGRIGLRIEVYGCSYWADVINFDGHVVLPYRFRNKKMKTLKDVIALNFKTSESEGVILHGEGQQGDYITLELKKAKLVLSLNLGSNQLGPIYGHTSVMTGSLLDDHHWHSVVIERQGRSINLTLDRSMQHFRTNGEFDYLDLDYEITFGGIPFSGKPSSSSRKNFKGCMESINYNGVNITDLARRKKLEPSNVGNLSFSCVEPYTVPVFFNATSYLEVPGRLNQDLFSVSFQFRTWNPNGLLVFSHFADNLGNVEIDLTESKVGVHINITQTKMSQIDISSGSGLNDGQWHEVRFLAKENFAILTIDGDEASAVRTNSPLQVKTGEKYFFGGFLNQMNNSSHSVLQPSFQGCMQLIQVDDQLVNLYEVAQRKPGSFANVSIDMCAIIDRCVPNHCEHGGKCSQTWDSFKCTCDETGYSGATCHNSIYEPSCEAYKHLGQTSNYYWIDPDGSGPLGPLKVYCNMTEDKVWTIVSHDLQMQTPVVGYNPEKYSVTQLVYSASMDQISAITDSAEYCEQYVSYFCKMSRLLNTPDGSPYTWWVGKANEKHYYWGGSGPGIQKCACGIERNCTDPKYYCNCDADYKQWRKDAGFLSYKDHLPVSQVVVGDTDRQGSEAKLSVGPLRCQGDRNYWNAASFPNPSSYLHFSTFQGETSADISFYFKTLTPWGVFLENMGKEDFIKLELKSATEVSFSFDVGNGPVEIVVRSPTPLNDDQWHRVTAERNVKQASLQVDRLPQQIRKAPTEGHTRLELYSQLFVGGAGGQQGFLGCIRSLRMNGVTLDLEERAKVTSGFISGCSGHCTSYGTNCENGGKCLERYHGYSCDCSNTAYDGTFCNKDVGAFFEEGMWLRYNFQAPATNARDSSSRVDNAPDQQNSHPDLAQEEIRFSFSTTKAPCILLYISSFTTDFLAVLVKPTGSLQIRYNLGGTREPYNIDVDHRNMANGQPHSVNITRHEKTIFLKLDHYPSVSYHLPSSSDTLFNSPKSLFLGKVIETGKIDQEIHKYNTPGFTGCLSRVQFNQIAPLKAALRQTNASAHVHIQGELVESNCGASPLTLSPMSSATDPWHLDHLDSASADFPYNPGQGQAIRNGVNRNSAIIGGVIAVVIFTILCTLVFLIRYMFRHKGTYHTNEAKGAESAESADAAIMNNDPNFTETIDESKKEWLI

SEQ ID NO: 930 - DNA, 2262 bp, Homo sapiens
tgagccggccgcacgcggaggatcctaaggagcagctctgttgcgacataggccgagcagcgaggcccagctccctgaaacaacagtaacctacccctgtgggtcatcatcatgccctccgacctggccaagaagaaggcagccaaaaagaaggaggctgccaaagctcgacagcggcccagaaaaggacatgaagaaaatggagatgttgtcacagaaccacaggtggcagagaagaatgaggccaatggcagagagaccacagaagtagatttgctgaccaaggagctagaggactttgagatgaagaaagctgctgctcgagctgtcactggcgtcctggcctctcaccccaacagtactgatgttcacatcatcaacctctcacttacctttcatggtcaagagctgctcagtgacaccaaactggaattaaactcaggccgtcgttatggcctcattggtttaaatggaattggaaagtccatgctgctctctgctattgggaagcgtgaagtgcccatccctgagcacatcgacatctaccatctgactcgagagatgccccctagtgacaagacacccttgcattgtgtgatggaagtcgacacagagcgggccatgctggagaaagaggcagagcggctggctcatgaggatgcggagtgtgagaagctcatggagctctacgagcgcctggaggagctggatgccgacaaggcagagatgagggcctcgcggatcttgcatggactgggtttcacacctgccatgcagcgcaagaagctaaaagacttcagtgggggctggaggatgagggttgcccttgccagagccctctttattcggcccttcatgctgctcctggatgagcctaccaaccacctggacctagatgcttgcgtgtggttggaagaagaactaaaaacttttaagcgcatcttggtcctcgtctcccattcccaggattttctgaatggtgtctgtaccaatatcattcacatgcacaacaagaaactgaagtattatacgggtaattatgatcagtacgtgaagacgcggctagagctggaggagaaccagatgaagaggtttcactgggagcaagatcagattgcacacatgaagaactacattgcgaggtttggtcatggcagtgccaagctggcccggcaggcccagagcaaggagaagacgctacagaaaatgatggcatcaggactgacagagagggtcgtgagcgataagacactgtcattttatttcccaccatgtggcaagatccctccacctgtcattatggtgcaaaatgtgagcttcaagtatacaaaagatgggccttgcatctacaataatctagaatttggaattgaccttgacacacgagtggctctggtagggcccaatggagcagggaagtcaactcttctgaagctgctaactggagagctactacccacagatggcatgatccgaaaacactctcatgtcaagatagggcgttaccatcagcatttacaagagcagctggacttagatctctcacctttggagtacatgatgaagtgctacccagagatcaaggagaaggaagaaatgaggaagatcattgggcgatacggtctcactgggaaacaacaggtgagcccaatccggaacttgtcagacgggcagaagtgccgagtgtgtctggcctggctggcctggcagaacccccacatgctcttcctggatgaacccaccaatcacctggatatcgagaccatcgacgccctggcagatgccatcaatgagtttgagggtggtatgatgctggtcagccatgacttcagactcattcagcaggttgcacaggaaatttgggtctgtgagaagcagacaatcaccaagtggcctggagacatcctggcttacaaggagcacctcaagtccaagctggtggatgaggagccccagctcaccaagaggacccacaacgtgtgcaccctgacattggcatctctgccaaggccatgagcatcatgaactcgtttgtaaacgacgtgtttgagcagctggcgtgtgaggctgcccggctggcccagtactcgggccggaccaccctgacatcccgagaagtccagacggctgtgcgtctgctgctgcctggggagctggccaagcacgctgtgtctgagggcaccaaggctgtcaccaagtacaccagctccaagtgacccagggcctgacaaaaataaagggtgaactgttaaaaaaaaaaaa

SEQ ID NO: 931 - protein, 634 aa, Homo sapiens
MPSDLAKKKAAKKKEAAKARQRPRKGHEENGDVVTEPQVAEKNEANGRETTEVDLLTKELEDFEMKKAAARAVTGVLASHPNSTDVHIINLSLTFHGQELLSDTKLELNSGRRYGLIGLNGIGKSMLLSAIGKREVPIPEHIDIYHLTREMPPSDKTPLHCVMEVDTERAMLEKEAERLAHEDAECEKLMELYERLEELDADKAEMRASRILHGLGFTPAMQRKKLKDFSGGWRMRVALARALFIRPFMLLLDEPTNHLDLDACVWLEEELKTFKRILVLVSHSQDFLNGVCTNIIHMHNKKLKYYTGNYDQYVKTRLELEENQMKRFHWEQDQIAHMKNYIARFGHGSAKLARQAQSKEKTLQKMMASGLTERVVSDKTLSFYFPPCGKIPPPVIMVQNVSFKYTKDGPCIYNNLEFGIDLDTRVALVGPNGAGKSTLLKLLTGELLPTDGMIRKHSHVKIGRYHQHLQEQLDLDLSPLEYMMKCYPEIKEKEEMRKIIGRYGLTGKQQVSPIRNLSDGQKCRVCLAWLAWQNPHMLFLDEPTNHLDIETIDALADAINEFEGGMMLVSHDFRLIQQVAQEIWVCEKQTITKWPGDILAYKEHLKSKLVDEEPQLTKRTHNVCTLTLASLPRP

SEQ ID NO: 932 - DNA, 3552 bp, Homo sapiens
tgagccggccgcacgcggaggatcctaaggagcagctctgttgcgacataggccgagcagcgaggcccagctccctgaaacaacagtaacctacccctgtgggtcatcatcatgccctccgacctggccaagaagaaggcagccaaaaagaaggaggctgccaaagctcgacagcggcccagaaaaggacatgaagaaaatggagatgttgtcacagaaccacaggtggcagagaagaatgaggccaatggcagagagaccacagaagtagatttgctgaccaaggagctagaggactttgagatgaagaaagctgctgctcgagctgtcactggcgtcctggcctctcaccccaacagtactgatgttcacatcatcaacctctcacttacctttcatggtcaagagctgctcagtgacaccaaactggaattaaactcaggccgtcgttatggcctcattggtttaaatggaattggaaagtccatgctgctctctgctattgggaagcgtgaagtgcccatccctgagcacatcgacatctaccatctgactcgagagatgccccctagtgacaagacacccttgcattgtgtgatggaagtcgacacagagcgggccatgctggagaaagaggcagagcggctggctcatgaggatgcggagtgtgagaagctcatggagctctacgagcgcctggaggagctggatgccgacaaggcagagatgagggcctcgcggatcttgcatggactgggtttcacacctgccatgcagcgcaagaagctaaaagacttcagtgggggctggaggatgagggttgcccttgccagagccctctttattcggcccttcatgctgctcctggatgagcctaccaaccacctggacctagatgcttgcgtgtggttggaagaagaactaaaaacttttaagcgcatcttggtcctcgtctcccattcccaggattttctgaatggtgtctgtaccaatatcattcacatgcacaacaagaaactgaagtattatacgggtaattatgatcagtacgtgaagacgcggctagagctggaggagaaccagatgaagaggtttcactgggagcaagatcagattgcacacatgaagaactacattgcgaggtttggtcatggcagtgccaagctggcccggcaggcccagagcaaggagaagacgctacagaaaatgatggcatcaggactgacagagagggtcgtgagcgataagacactgtcattttatttcccaccatgtggcaagatccctccacctgtcattatggtgcaaaatgtgagcttcaagtatacaaaagatgggccttgcatctacaataatctagaatttggaattgaccttgacacacgagtggctctggtagggcccaatggagcagggaagtcaactcttctgaagctgctaactggagagctactacccacagatggcatgatccgaaaacactctcatgtcaagatagggcgttaccatcagcatttacaagagcagctggacttagatctctcacctttggagtacatgatgaagtgctacccagagatcaaggagaaggaagaaatgaggaagatcattgggcgatacggtctcactgggaaacaacaggtgagcccaatccggaacttgtcagacgggcagaagtgccgagtgtgtctggcctggctggcctggcagaacccccacatgctcttcctggatgaacccaccaatcacctggatatcgagaccatcgacgccctggcagatgccatcaatgagtttgagggtggtatgatgctggtcagccatgacttcagactcattcagcaggttgcacaggaaatttgggtctgtgagaagcagacaatcaccaagtggcctggagacatcctggcttacaaggagcacctcaagtccaagctggtggatgaggagccccagctcaccaagaggacccacaacgtgtgagccctctacctgggttcgggtcaggagctccatctgggaactaacagctgctaacctgaccagccgctcaggacaggaccctggggctacactcctgcattgctgcaatactgctcccccagcctctcccctgcccctcaacctgccttagctgcactctcttacctacagctggacagtacctgtctgtttcctgtcctccttccagttacatctgtccatgtctggactcggctggccgttccctccagccccttgctggttatcttactctgagtgtgatgcagtcagaggcacctgcgggttagcccaggggcccaagccctggatttggcctgcggaggagcttaggatcctcgttttctgggttttggtgatgttggaggagtaccccccagcccaccgccccgattcctttttgcttctggtttggagctccggaccaggaccttcgtcctggtcagtttttaaataattatttagcagtgtaacttttagacctgcgtgacatctacaaagcgcccaataaagaaagaggaagccacggtccctaccttccttctcgggtctctggggccttctcctccctgcagtgccaacatgcactgcccacagcaggagctggatccagcgtcagtgtgtcgatgggaactgaagactagtccataggagctggaagaactttgtccctttacttctgatttgaaattgtaccttttctcaggcctgtgattcacagactttaacatgaatcagaatcacctggagggctcatgcaatcagattgccagatctcgcctcagcgtttctggttcaataggttttgggggagaccaagaacgttaacatttctagcaagtttccaggtgatgctgttgttgctggtctagagactattttgagaaccactgtccaggagcgtggttttctgattgtgatctgaggttctgccccaactgcacagcagttgggctgcttgttaaaaatgcaggccaggtgcggtggctcacacctgtaatcccagcgctttgggaggctgaggcaggtggatcacttgagctcaggagttcaagaccagcttgggaaacatggcaaaacccgtctttatgtgcctggaatcccacctgctcaggtggctagggtggatggatcgcttgagcccaggaggtggaggttgcagtgagctgagattgcaccactgcattccagcctggatgacagagcaaaaccctgtctcaaaaaaatgcagactggccaggcacagtggctcacacctgtaatccgactgtaagctcatcaccttgggaggccactgtaggaggatcaattgagcctagaagttcaagaccagcctgggcaaagtagggagaccccttctctacaaatagtaataaaatgaaccgggcatagtagcatgtgcctgcggtcccagctgctctgataagaggaggctcacttgagcccaggaggttgaggctgcagtgagcagagcgtgccgctacactccagcctgatgacagaccgagacactgtctcaaaaaaataaaaaaattcagattgctgaaaaaa

SEQ ID NO: 933 - protein, 623 aa, Homo sapiens
MPSDLAKKKAAKKKEAAKARQRPRKGHEENGDVVTEPQVAEKNEANGRETTEVDLLTKELEDFEMKKAAARAVTGVLASHPNSTDVHIINLSLTFHGQELLSDTKLELNSGRRYGLIGLNGIGKSMLLSAIGKREVPIPEHIDIYHLTREMPPSDKTPLHCVMEVDTERAMLEKEAERLAHEDAECEKLMELYERLEELDADKAEMRASRILHGLGFTPAMQRKKLKDFSGGWRMRVALARALFIRPFMLLLDEPTNHLDLDACVWLEEELKTFKRILVLVSHSQDFLNGVCTNIIHMHNKKLKYYTGNYDQYVKTRLELEENQMKRFHWEQDQIAHMKNYIARFGHGSAKLARQAQSKEKTLQKMMASGLTERVVSDKTLSFYFPPCGKIPPPVIMVQNVSFKYTKDGPCIYNNLEFGIDLDTRVALVGPNGAGKSTLLKLLTGELLPTDGMIRKHSHVKIGRYHQHLQEQLDLDLSPLEYMMKCYPEIKEKEEMRKIIGRYGLTGKQQVSPIRNLSDGQKCRVCLAWLAWQNPHMLFLDEPTNHLDIETIDALADAINEFEGGMMLVSHDFRLIQQVAQEIWVCEKQTITKWPGDILAYKEHLKSKLVDEEPQLTKRTHNV

SEQ ID NO: 934 - DNA, 3970 bp, Homo sapiens
aggggctgtgaggtggcagcggctgcagcggcggagccggcgcctcagcgggcactggggtctgttcccccttccccgtccctgctccctgccaggcgcgtgcgggacgccgctcttggtccccacgcctccgccccgccccctcccgggacgccgggagaccccggccgtcctttatccggtgtccgccggcccccggccctgaaacccgggcctcctccccgagggccttgggcgtccctcctggtcctgcgctcgcggcctcgatgctgtctctggcgcggcctccgctcccgccgactggcctgagaacgaggtctgtgccccagtctcccagccgcgacctccgaccccgcctcgcagaacgacccgagctggtctcccgagcccccttctcagcagcccggtgacgtggccagtttatttctgttttgagacgaacggcgaagactcgcgtcgggtcttcgttctagggctagacttggtctctgatcgccgagaggtagcgcaggggctgtgggcccccggcaggggtcctgtcggaagctggccgcgcttctgtttgcgttcccaggaccctggcattgtctctagttgctgcttgtgctctctctttgcttttggtttgcttcatttggcccctggggccctggtaaaaccaggcaccgaatcgctcgcacacagagttccagtccccgcctgctgtctcctcagcagctggggttccgaggagaatgccctgcaagatggctccatcggccatggcgctcctgagaggctgtcagtgctgagtcaccgatctacctcattcgggtgggcagaacttatgtgtgccatgcgagtggctccagaccgctcctgagtgggaggaggggttcctgtagccgttgcgtcttctcaaacacggggagcagagtagaaagaggctctggccccttcccttgtgcccaccgggcctgccgcagtggctcagcagccccttcagtagcccgcctgaggaccgatgccagaggcaggcattcttccggaaaggcccactgaggcaggctccggctcctctggttggggctgttgttttgatggatcgtgtgcttttcccttacctcttatcacttgctgtcatctgttgacttaggcccagtctgcagatgtgtgtagtgttcctttttgggttagctttggcagtattgagttttacttcctcctctttttagtggaagacagaccataatcccagtgtgagtgaaattgattgtttcatttattaccgttttggctgggggttagttccgacaccttcacagttgaagagcaggcagaaggagttgtgaagacaggacaatcttcttggggatgctggtcctggaagccagcgggcctcgctctgtctttggcctcattgaccccaggttctctggttaaaactgaaagcctactactggcctggtgcccatcaatccattgatccttgaggctgtgcccctggggcacccacctggcagggcctaccaccatgcgactgagctccctgttggctctgctgcggccagcgcttcccctcatcttagggctgtctctggggtgcagcctgagcctcctgcgggtttcctggatccagggggagggagaagatccctgtgtcgaggctgtaggggagcgaggagggccacagaatccagattccagagctcggctagaccaaagtgatgaagacttcaaaccccggattgtcccctactacagggaccccaacaagccctacaagaaggtgctcaggactcggtacatccagacagagctgggctcccgtgagcggttgctggtggctgtcctgacctcccgagctacactgtccactttggccgtggctgtgaaccgtacggtggcccatcacttccctcggttactctacttcactgggcagcggggggcccgggctccagcagggatgcaggtggtgtctcatggggatgagcggcccgcctggctcatgtcagagaccctgcgccaccttcacacacactttggggccgactacgactggttcttcatcatgcaggatgacacatatgtgcaggccccccgcctggcagcccttgctggccacctcagcatcaaccaagacctgtacttaggccgggcagaggagttcattggcgcaggcgagcaggcccggtactgtcatgggggctttggctacctgttgtcacggagtctcctgcttcgtctgcggccacatctggatggctgccgaggagacattctcagtgcccgtcctgacgagtggcttggacgctgcctcattgactctctgggcgtcggctgtgtctcacagcaccaggggcagcagtatcgctcatttgaactggccaaaaatagggaccctgagaaggaagggagctcggctttcctgagtgccttcgccgtgcaccctgtctccgaaggtaccctcatgtaccggctccacaaacgcttcagcgctctggagttggagcgggcttacagtgaaatagaacaactgcaggctcagatccggaacctgaccgtgctgacccccgaaggggaggcagggctgagctggcccgttgggctccctgctcctttcacaccacactctcgctttgaggtgctgggctgggactacttcacagagcagcacaccttctcctgtgcagatggggctcccaagtgcccactacagggggctagcagggcggacgtgggtgatgcgttggagactgccctggagcagctcaatcggcgctatcagccccgcctgcgcttccagaagcagcgactgctcaacggctatcggcgcttcgacccagcacggggcatggagtacaccctggacctgctgttggaatgtgtgacacagcgtgggcaccggcgggccctggctcgcagggtcagcctgctgcggccactgagccgggtggaaatcctacctatgccctatgtcactgaggccacccgagtgcagctggtgctgccactcctggtggctgaagctgctgcagccccggctttcctcgaggcctttgcagccaatgtcctggagccacgagaacatgcattgctcaccctgttgctggtctacgggccacgagaaggtggccgtggagctccagacccatttcttggggtgaaggctgcagcagcggagttagagcgacggtaccctgggacgaggctggcctggctcgctgtgcgagcagaggccccttcccaggtgcgactcatggacgtggtctcgaagaagcaccctgtggacactctcttcttccttaccaccgtgtggacaaggcctgggcccgaagtcctcaaccgctgtcgcatgaatgccatctctggctggcaggccttctttccagtccatttccaggagttcaatcctgccctgtcaccacagagatcacccccagggcccccgggggctggccctgaccccccctcccctcctggtgctgacccctcccggggggctcctataggggggagatttgaccggcaggcttctgcggagggctgcttctacaacgctgactacctggcggcccgagcccggctggcaggtgaactggcaggccaggaagaggaggaagccctggaggggctggaggtgatggatgttttcctccggttctcagggctccacctctttcgggccgtagagccagggctggtgcagaagttctccctgcgagactgcagcccacggctcagtgaagaactctaccaccgctgccgcctcagcaacctggaggggctagggggccgtgcccagctggctatggctctctttgagcaggagcaggccaatagcacttagcccgcctgggggccctaacctcattacctttcctttgtctgcctcagccccaggaagggcaaggcaagatggtggacagatagagaattgttgctgtattttttaaatatgaaaatgttattaaacatgtcttctgcc

SEQ ID NO: 935 - protein, 772 aa, Homo sapiens
MRLSSLLALLRPALPLILGLSLGCSLSLLRVSWIQGEGEDPCVEAVGERGGPQNPDSRARLDQSDEDFKPRIVPYYRDPNKPYKKVLRTRYIQTELGSRERLLVAVLTSRATLSTLAVAVNRTVAHHFPRLLYFTGQRGARAPAGMQVVSHGDERPAWLMSETLRHLHTHFGADYDWFFIMQDDTYVQAPRLAALAGHLSINQDLYLGRAEEFIGAGEQARYCHGGFGYLLSRSLLLRLRPHLDGCRGDILSARPDEWLGRCLIDSLGVGCVSQHQGQQYRSFELAKNRDPEKEGSSAFLSAFAVHPVSEGTLMYRLHKRFSALELERAYSEIEQLQAQIRNLTVLTPEGEAGLSWPVGLPAPFTPHSRFEVLGWDYFTEQHTFSCADGAPKCPLQGASRADVGDALETALEQLNRRYQPRLRFQKQRLLNGYRRFDPARGMEYTLDLLLECVTQRGHRRALARRVSLLRPLSRVEILPMPYVTEATRVQLVLPLLVAEAAAAPAFLEAFAANVLEPREHALLTLLLVYGPREGGRGAPDPFLGVKAAAAELERRYPGTRLAWLAVRAEAPSQVRLMDVVSKKHPVDTLFFLTTVWTRPGPEVLNRCRMNAISGWQAFFPVHFQEFNPALSPQRSPPGPPGAGPDPPSPPGADPSRGAPIGGRFDRQASAEGCFYNADYLAARARLAGELAGQEEEEALEGLEVMDVFLRFSGLHLFRAVEPGLVQKFSLRDCSPRLSEELYHRCRLSNLEGLGGRAQLAMALFEQEQANST

SEQ ID NO: 936 - DNA, 1700 bp, Homo sapiens
agcaggactcagaggggagagttggaggaaaaaaaaaggcagaaaagggaaagaaagaggaagagagagagagagtgagaggagccgctgagcccaccccgatggccgcggacgaagttgccggaggggcgcgcaaagccacgaaaagcaaactttttgagtttctggtccatggggtgcgccccgggatgccgtctggagcccggatgccccaccagggggcgcccatgggccccccgggctccccgtacatgggcagccccgccgtgcgacccggcctggcccccgcgggcatggagcccgcccgcaagcgagcagcgcccccgcccgggcagagccaggcacagagccagggccagccggtgcccaccgcccccgcgcggagccgcagtgccaagaggaggaagatggctgacaaaatcctccctcaaaggattcgggagctggtccccgagtcccaggcttacatggacctcttggcatttgagaggaaactggatcaaaccatcatgcggaagcgggtggacatccaggaggctctgaagaggcccatgaagcaaaagcggaagctgcgactctatatctccaacacttttaaccctgcgaagcctgatgctgaggattccgacggcagcattgcctcctgggagctacgggtggaggggaagctcctggatgatcccagcaaacagaagcggaagttctcttctttcttcaagagtttggtcatcgagctggacaaagatctttatggccctgacaaccacctcgttgagtggcatcggacacccacgacccaggagacggacggcttccaggtgaaacggcctggggacctgagtgtgcgctgcacgctgctcctcatgctggactaccagcctccccagttcaaactggatccccgcctagcccggctgctggggctgcacacacagagccgctcagccattgtccaggccctgtggcagtatgtgaagaccaacaggctgcaggactcccatgacaaggaatacatcaatggggacaagtatttccagcagatttttgattgtccccggctgaagttttctgagattccccagcgcctcacagccctgctattgccccctgacccaattgtcatcaaccatgtcatcagcgtggacccttcagaccagaagaagacggcgtgctatgacattgacgtggaggtggaggagccattaaaggggcagatgagcagcttcctcctatccacggccaaccagcaggagatcagtgctctggacagtaagatccatgagacgattgagtccataaaccagctcaagatccagagggacttcatgctaagcttctccagagaccccaaaggctatgtccaagacctgctccgctcccagagccgggacctcaaggtgatgacagatgtagccggcaaccctgaagaggagcgccgggctgagttctaccaccagccctggtcccaggaggccgtcagtcgctacttctactgcaagatccagcagcgcaggcaggagctggagcagtcgctggttgtgcgcaacacctaggagcccaaaaataagcagcacgacggaactttcagccgtgtcccgggccccagcattttgccccgggctccagcatcactcctctgccaccttggggtgtggggctggattaaaagtcattcatctgacaaaaaaaaaaaaaaaaaa

SEQ ID NO: 937 - protein, 483 aa, Homo sapiens
MAADEVAGGARKATKSKLFEFLVHGVRPGMPSGARMPHQGAPMGPPGSPYMGSPAVRPGLAPAGMEPARKRAAPPPGQSQAQSQGQPVPTAPARSRSAKRRKMADKILPQRIRELVPESQAYMDLLAFERKLDQTIMRKRVDIQEALKRPMKQKRKLRLYISNTFNPAKPDAEDSDGSIASWELRVEGKLLDDPSKQKRKFSSFFKSLVIELDKDLYGPDNHLVEWHRTPTTQETDGFQVKRPGDLSVRCTLLLMLDYQPPQFKLDPRLARLLGLHTQSRSAIVQALWQYVKTNRLQDSHDKEYINGDKYFQQIFDCPRLKFSEIPQRLTALLLPPDPIVINHVISVDPSDQKKTACYDIDVEVEEPLKGQMSSFLLSTANQQEISALDSKIHETIESINQLKIQRDFMLSFSRDPKGYVQDLLRSQSRDLKVMTDVAGNPEEERRAEFYHQPWSQEAVSRYFYCKIQQRRQELEQSLVVRNT

SEQ ID NO: 938 - DNA, 1689 bp, Homo sapiens
ctggcatcttcctcccctcctcctttccagatcctcagaatggcccttggtgctgcaggcgcggtgggctccgggcccaggcaccgagggggcactggatgactctccaggtgcaggaccctgccatctatgactccaggtcttcagcacccacccaccgtggtacagcgccccgggatgccgtctggagcccggatgccccaccagggggcgcccatgggccccccgggctccccgtacatgggcagccccgccgtgcgacccggcctggcccccgcgggcatggagcccgcccgcaagcgagcagcgcccccgcccgggcagagccaggcacagagccagggccagccggtgcccaccgcccccgcgcggagccgcagtgccaagaggaggaagatggctgacaaaatcctccctcaaaggattcgggagctggtccccgagtcccaggcttacatggacctcttggcatttgagaggaaactggatcaaaccatcatgcggaagcgggtggacatccaggaggctctgaagaggcccatgaagcaaaagcggaagctgcgactctatatctccaacacttttaaccctgcgaagcctgatgctgaggattccgacggcagcattgcctcctgggagctacgggtggaggggaagctcctggatgatcccagcaaacagaagcggaagttctcttctttcttcaagagtttggtcatcgagctggacaaagatctttatggccctgacaaccacctcgttgagtggcatcggacacccacgacccaggagacggacggcttccaggtgaaacggcctggggacctgagtgtgcgctgcacgctgctcctcatgctggactaccagcctccccagttcaaactggatccccgcctagcccggctgctggggctgcacacacagagccgctcagccattgtccaggccctgtggcagtatgtgaagaccaacaggctgcaggactcccatgacaaggaatacatcaatggggacaagtatttccagcagatttttgattgtccccggctgaagttttctgagattccccagcgcctcacagccctgctattgccccctgacccaattgtcatcaaccatgtcatcagcgtggacccttcagaccagaagaagacggcgtgctatgacattgacgtggaggtggaggagccattaaaggggcagatgagcagcttcctcctatccacggccaaccagcaggagatcagtgctctggacagtaagatccatgagacgattgagtccataaaccagctcaagatccagagggacttcatgctaagcttctccagagaccccaaaggctatgtccaagacctgctccgctcccagagccgggacctcaaggtgatgacagatgtagccggcaaccctgaagaggagcgccgggctgagttctaccaccagccctggtcccaggaggccgtcagtcgctacttctactgcaagatccagcagcgcaggcaggagctggagcagtcgctggttgtgcgcaacacctaggagcccaaaaataagcagcacgacggaactttcagccgtgtcccgggccccagcattttgccccgggctccagcatcactcctctgccaccttggggtgtggggctggattaaaagtcattcatctgacaaaaaaaaaaaaaaaaaa

SEQ ID NO: 939 - protein, 470 aa, Homo sapiens
MTPGLQHPPTVVQRPGMPSGARMPHQGAPMGPPGSPYMGSPAVRPGLAPAGMEPARKRAAPPPGQSQAQSQGQPVPTAPARSRSAKRRKMADKILPQRIRELVPESQAYMDLLAFERKLDQTIMRKRVDIQEALKRPMKQKRKLRLYISNTFNPAKPDAEDSDGSIASWELRVEGKLLDDPSKQKRKFSSFFKSLVIELDKDLYGPDNHLVEWHRTPTTQETDGFQVKRPGDLSVRCTLLLMLDYQPPQFKLDPRLARLLGLHTQSRSAIVQALWQYVKTNRLQDSHDKEYINGDKYFQQIFDCPRLKFSEIPQRLTALLLPPDPIVINHVISVDPSDQKKTACYDIDVEVEEPLKGQMSSFLLSTANQQEISALDSKIHETIESINQLKIQRDFMLSFSRDPKGYVQDLLRSQSRDLKVMTDVAGNPEEERRAEFYHQPWSQEAVSRYFYCKIQQRRQELEQSLVVRNT

SEQ ID NO: 940 - DNA, 1728 bp, Homo sapiens
gccgggccgagccgagcgccgagcagggagcgggcggccgcgctccgggccggggtcccgggggagcagatcctcagaatggcccttggtgctgcaggcgcggtgggctccgggcccaggcaccgagggggcactggatgactctccaggtgcaggaccctgccatctatgactccaggtcttcagcacccacccaccgtggtacagcgccccgggatgccgtctggagcccggatgccccaccagggggcgcccatgggccccccgggctccccgtacatgggcagccccgccgtgcgacccggcctggcccccgcgggcatggagcccgcccgcaagcgagcagcgcccccgcccgggcagagccaggcacagagccagggccagccggtgcccaccgcccccgcgcggagccgcagtgccaagaggaggaagatggctgacaaaatcctccctcaaaggattcgggagctggtccccgagtcccaggcttacatggacctcttggcatttgagaggaaactggatcaaaccatcatgcggaagcgggtggacatccaggaggctctgaagaggcccatgaagcaaaagcggaagctgcgactctatatctccaacacttttaaccctgcgaagcctgatgctgaggattccgacggcagcattgcctcctgggagctacgggtggaggggaagctcctggatgatcccagcaaacagaagcggaagttctcttctttcttcaagagtttggtcatcgagctggacaaagatctttatggccctgacaaccacctcgttgagtggcatcggacacccacgacccaggagacggacggcttccaggtgaaacggcctggggacctgagtgtgcgctgcacgctgctcctcatgctggactaccagcctccccagttcaaactggatccccgcctagcccggctgctggggctgcacacacagagccgctcagccattgtccaggccctgtggcagtatgtgaagaccaacaggctgcaggactcccatgacaaggaatacatcaatggggacaagtatttccagcagatttttgattgtccccggctgaagttttctgagattccccagcgcctcacagccctgctattgccccctgacccaattgtcatcaaccatgtcatcagcgtggacccttcagaccagaagaagacggcgtgctatgacattgacgtggaggtggaggagccattaaaggggcagatgagcagcttcctcctatccacggccaaccagcaggagatcagtgctctggacagtaagatccatgagacgattgagtccataaaccagctcaagatccagagggacttcatgctaagcttctccagagaccccaaaggctatgtccaagacctgctccgctcccagagccgggacctcaaggtgatgacagatgtagccggcaaccctgaagaggagcgccgggctgagttctaccaccagccctggtcccaggaggccgtcagtcgctacttctactgcaagatccagcagcgcaggcaggagctggagcagtcgctggttgtgcgcaacacctaggagcccaaaaataagcagcacgacggaactttcagccgtgtcccgggccccagcattttgccccgggctccagcatcactcctctgccaccttggggtgtggggctggattaaaagtcattcatctgacaaaaaaaaaaaaaaaaaa

SEQ ID NO: 941 - protein, 470 aa, Homo sapiens; identical to SEQ ID NO: 939

SEQ ID NO: 942 - DNA, 2749 bp, Homo sapiens
cacacacacacatacacagaatcctcagataacaggaggcaataaatccaacagcacatccacgttcagagaacagtgtccctgctgtcttgctaacagctgccaatacctcactgagtgcctcacaccaacatgggctccaagtgagtttccttcgtctgggcagactccctcccctcttccataaaggctgcaggagacctgtagctgtcacaggaccttccctaagagcccgcagggaaagactgccccagtccggccatcaccatgctccggaccattctggatgctccccagcggttgctgaaggaggggagagcgtcccggcagctggtgctggtggtggtattcgtcgctttgctcctggacaacatgctgtttactgtggtggtgccaattgtgcccaccttcctatatgacatggagttcaaagaagtcaactcttctctgcacctcggccatgccggaagttccccacatgccctcgcctctcctgccttttccaccatcttctccttcttcaacaacaacaccgtggctgttgaagaaagcgtacctagtggaatagcatggatgaatgacactgccagcaccatcccacctccagccactgaagccatctcagctcataaaaacaactgcttgcaaggcacaggtttcttggaggaagagattacccgggtcggggttctgtttgcttcaaaggctgtgatgcaacttctggtcaacccattcgtgggccctctcaccaacaggattggatatcatatccccatgtttgctggctttgttatcatgtttctctccacagttatgtttgctttttctgggacctatactctactctttgtggcccgaacccttcaaggcattggatcttcattttcatctgttgcaggtcttggaatgctggccagtgtctacactgatgaccatgagagaggacgagccatgggaactgctctggggggcctggccttggggttgctggtgggagctccctttggaagtgtaatgtacgagtttgttgggaagtctgcacccttcctcatcctggccttcctggcactactggatggagcactccagctttgcatcctacagccttccaaagtctctcctgagagtgccaaggggactcccctctttatgcttctcaaagacccttacatcctggtggctgcagggtccatctgctttgccaacatgggggtggccatcctggagcccacactgcccatctggatgatgcagaccatgtgctcccccaagtggcagctgggtctagctttcttgcctgccagtgtgtcctacctcattggcaccaacctctttggtgtgttggccaacaagatgggtcggtggctgtgttccctaatcgggatgctggtagtaggtaccagcttgctctgtgttcctctggctcacaatatttttggtctcattggccccaatgcagggcttggccttgccataggcatggtggattcttctatgatgcccatcatggggcacctggtggatctacgccacacctcggtgtatgggagtgtctacgccatcgctgatgtggctttttgcatgggctttgctataggtccatccaccggtggtgccattgtaaaggccatcggttttccctggctcatggtcatcactggggtcatcaacatcgtctatgctccactctgctactacctgcggagccccccggcaaaggaagagaagcttgctattctgagtcaggactgccccatggagacccggatgtatgcaacccagaagcccacgaaggaatttcctctgggggaggacagtgatgaggagcctgaccatgaggagtagcagcagaaggtgctccttgaattcatgatgcctcagtgaccacctctttccctgggaccagatcaccatggctgagcccacggctcagtgggcttcacatacctctgcctgggaatcttctttcctcccctcccatggacactgtccctgatactcttctcacctgtgtaacttgtagctcttcctctatgccttggtgccgcagtggcccatcttttatgggaagacagagtgatgcaccttcccgctgctgtgaggttgattaaacttgagctgtgacgggttctgcaaggggtgactcattgcatagaggtggtagtgagtaatgtgcccctgaaaccagtggggtgactgacaagcctctttaatctgttgcctgattttctctggcatagtcccaacagatcggaagagtgttaccctcttttcctcaacgtgttctttcccgggttttcccagccgagttgagaaaatgttctcagcattgtcttgctgccaaatgccagcttgaagagttttgttttgttttttttccatttattttttttttttaataaagtgagtgatttttctgtggctaaatctagagctgctaaaagggctttaccctcagtgaaaagtgtcttctattttcattatctttcagaaacaggagcccatttctcttctgctggagttattgacattctcctgacctcccctgtgtgttcctaccttttctgaacctcttagactcttagaaataaaagtagaagaaagacagaaaaaataactgattagacccaagatttcatgggaagaagttaaaagaaactgccttgaaatccctcctgattgtagatttcctaataggaggggtgtaatgtgacattgttcatacttgctaataaatacattattgcct

SEQ ID NO: 943 - protein, 525 aa, Homo sapiens
MLRTILDAPQRLLKEGRASRQLVLVVVFVALLLDNMLFTVVVPIVPTFLYDMEFKEVNSSLHLGHAGSSPHALASPAFSTIFSFFNNNTVAVEESVPSGIAWMNDTASTIPPPATEAISAHKNNCLQGTGFLEEEITRVGVLFASKAVMQLLVNPFVGPLTNRIGYHIPMFAGFVIMFLSTVMFAFSGTYTLLFVARTLQGIGSSFSSVAGLGMLASVYTDDHERGRAMGTALGGLALGLLVGAPFGSVMYEFVGKSAPFLILAFLALLDGALQLCILQPSKVSPESAKGTPLFMLLKDPYILVAAGSICFANMGVAILEPTLPIWMMQTMCSPKWQLGLAFLPASVSYLIGTNLFGVLANKMGRWLCSLIGMLVVGTSLLCVPLAHNIFGLIGPNAGLGLAIGMVDSSMMPIMGHLVDLRHTSVYGSVYAIADVAFCMGFAIGPSTGGAIVKAIGFPWLMVITGVINIVYAPLCYYLRSPPAKEEKLAILSQDCPMETRMYATQKPTKEFPLGEDSDEEPDHEE

SEQ ID NO: 944 - DNA, 3054 bp, Homo sapiens
gcctcccagcacgctggtcagctcctcttgctcgcaagcaggtctggccccagcggcgcgaagtcacgaggctgggggcggccggcggcgaagggggcggggcgaggccggggcgccgcagcgcgcataggcggagcctcgggccgcgggccgccttggtatatctgcgcgtgcgcggcgtcgctgctgggccagtcgggacagaggagacaagatggcgctgcgggcgatgcgggggattgtcaacggggccgcacccgagctacccgtgcccaccggtgggccggcggtgggagctcgggagcaggcgctggcagtcagtcggaactacctctcccagcctcgcctcacatacaagacagtatctggagtcaatggtccactagtgatcttagatcatgttaagtttcccaggtatgctgaaattgtccatttgaccttaccggatggcacaaagagaagtgggcaagttctggaagttagtggttccaaggcagtagttcaggtatttgaagggacttcaggtatagatgctaagaaaacgtcctgtgagtttactggggatattctccgaacaccggtgtctgaggatatgcttggtcgggtattcaatggatcgggaaaacccattgacagaggtcctgttgtactggccgaagacttccttgatatcatgggtcagccaatcaaccctcaatgtcgaatctacccagaggaaatgattcagactggcatttcggccatcgatgggatgaacagtattgctagggggcagaaaattcctatcttctctgctgctgggctaccacacaatgagattgcagctcagatctgtcgccaggctggtttggtaaagaaatccaaagatgtagtagactacagtgaggaaaattttgcaattgtatttgctgctatgggtgtaaacatggaaactgcccggttcttcaaatctgactttgaagaaaatggctcaatggacaatgtctgcctctttttgaacttggctaatgacccaaccattgagcgaattatcactcctcgcctggctctaaccacagctgaatttctggcgtaccaatgtgagaaacatgtattggttattctaacagacatgagttcttatgctgaagcacttcgagaggtttcagcagccagggaagaggtacctggtcgacgaggttttccaggttacatgtatacagatttagccacgatatatgaacgcgctgggcgagtggaagggagaaacggctcgattactcaaatccctattctaaccatgcctaatgatgatatcactcaccccatcccagacttgactggctacattacagaggggcagatctatgtggacagacagctgcacaacagacagatttatccacctatcaatgtgctgccctcactatcacggttaatgaagtctgctattggagaagggatgaccaggaaggatcatgccgatgtatctaaccagctatatgcgtgctatgctattggaaaggatgtgcaagccatgaaagctgtcgttggagaagaagcccttacctcagatgatcttctctacttggaatttctgcagaagtttgagaggaacttcattgctcagggtccttacgaaaatcgcactgtctttgagactttggacattggctggcagctactccgaatcttccccaaagaaatgctgaagagaatccctcagagcaccctcagcgaattttaccctcgagactctgcaaagcattagctgctgcttctgcattgctccgcgctcttgtgaaatactggttctgttttctttattccttttgcactctcggttcccacctttgtgttggagtttaccatgttaccctgtaattaaaaacaaagaataggtaacatattgtgccagtgttgcaacgttttaaactgctaacagaccttaaaatatccccctacctgggtcctcagtgctatgtttaaagtgctgcagggatggagtggcgttttcttattgctgtatgtattgtacatagtggagtagttagttacctgataacagtcttgttatttgggtctcttagaccttacctctcaactccctcaagagtaccagtctctgaagttataatgctttggtctctacattaggggcaagatccagtctgagagaagtctcctttgagaagggccaagaggctctttcctgagtgtttgctttcggtttgttggtatgcctgtattgctgggctgtgctgctgctcgaagcagatggttttgactgtctttttgctctttcctatataatgaatagatgagtgaaaggagttttctttttctctttagtacttacgtattgggattcctgtgtcttacagctctccctctccaaataatacacagaatcctgcaactttttgcacagctggtatctgtctggtagcagtgagaccccttgtcttggtgatccttactgggtttccaagcagaggagtcacatgattacaattgccagtagagttgttgtttggggtacaagatgagaagaaagaaaaacctacagcctttctacattctgacatgctaacagtggtttaagtttctaaagtgtttaccagatgctgaaggcaaggggagggagcagaagcacttatgtttacggatattttaaactctgttagagagcagcctttgaaaatccccaatttggttctgctttttgacctctctctaccttttcagggtaatctttgtggcacaaacgatagcatttccaagctttagagttttctgaattcctgcgccttcctgacgtgagccctgagcgatcttctatgcagttctgccatgcgtcctgttggtctctctgtgttctttgttacttgggtgcaatagcaacttccctaccccgtgcattccatctttcatgttgtgtaaagttcttcacttttttctctgagggctgggggttgggggagtcagcatgattatattttaatgtagaaaatgtgacatctggatataaaatgaaaataaatgttaaattaaatggaccttaaaaaaaaaaaa

SEQ ID NO: 945 - protein, 511 aa, Homo sapiens
MALRAMRGIVNGAAPELPVPTGGPAVGAREQALAVSRNYLSQPRLTYKTVSGVNGPLVILDHVKFPRYAEIVHLTLPDGTKRSGQVLEVSGSKAVVQVFEGTSGIDAKKTSCEFTGDILRTPVSEDMLGRVFNGSGKPIDRGPVVLAEDFLDIMGQPINPQCRIYPEEMIQTGISAIDGMNSIARGQKIPIFSAAGLPHNEIAAQICRQAGLVKKSKDVVDYSEENFAIVFAAMGVNMETARFFKSDFEENGSMDNVCLFLNLANDPTIERIITPRLALTTAEFLAYQCEKHVLVILTDMSSYAEALREVSAAREEVPGRRGFPGYMYTDLATIYERAGRVEGRNGSITQIPILTMPNDDITHPIPDLTGYITEGQIYVDRQLHNRQIYPPINVLPSLSRLMKSAIGEGMTRKDHADVSNQLYACYAIGKDVQAMKAVVGEEALTSDDLLYLEFLQKFERNFIAQGPYENRTVFETLDIGWQLLRIFPKEMLKRIPQSTLSEFYPRDSAKH

SEQ ID NO: 946 - DNA, 1101 bp, Homo sapiens
  MISC_FEATURE (303)..(322), (351)..(489), (504)..(555), (572)..(821): n is a, c, g, or t
gcggtggctcacgcctgtaatcccagcactctgggaggctgaggcaggcagatcatctgaggtcaggagtttgagaccagcctggccaacatagtgaaaccctgtctctattaaaaatacaaaaaatttgagtgcagtggcatgtgcctgtagtcccagctgctcaggaggctgaggtgggaggatcgcttgagcccaggaggtcgagactgcagtgagacaagatcatgtcactgcaatctagcctgggggacagagtgagaccctgtctcagaaaaaaaaaaaaaaaaaaaaaaaccacannnnnnnnnnnnnnnnnnnntttattttcagagttgaggtctgcagctnnnnnnnnnnnnnnnnnnnnnnnnnnnnnnnnnnnnnnnnnnnnnnnnnnnnnnnnnnnnnnnnnnnnnnnnnnnnnnnnnnnnnnnnnnnnnnnnnnnnnnnnnnnnnnnnnnnnnnnnnnnnnnnnnnnnnnnnnnnagaaaggggcttagnnnnnnnnnnnnnnnnnnnnnnnnnnnnnnnnnnnnnnnnnnnnnnnnnnnncaaaggagaaataagannnnnnnnnnnnnnnnnnnnnnnnnnnnnnnnnnnnnnnnnnnnnnnnnnnnnnnnnnnnnnnnnnnnnnnnnnnnnnnnnnnnnnnnnnnnnnnnnnnnnnnnnnnnnnnnnnnnnnnnnnnnnnnnnnnnnnnnnnnnnnnnnnnnnnnnnnnnnnnnnnnnnnnnnnnnnnnnnnnnnnnnnnnnnnnnnnnnnnnnnnnnnnnnnnnnnnnnnnnnnnnnnnnnnnnnnnnnnnnnnnnnnnnnnntcaaaaaaccaatgaatccaggagatggttttttgaaaagatcaacaaaattgatagaccactagcaaaactaataaagaagaaaagagagaagaatcaaattgctggaattacagatgtgctgggtgtggtggcacacacctgtaatcccattgccctggtgtggtggctcacacctgtaatcccaaggtgggcggatcatttgagcctaggagttcaagaccagccttagcaatgtggcaaaaccccatctccaaaaaaaaaaaaaaaaaaaaaaaaa

SEQ ID NO: 947 - protein, 91 aa, Homo sapiens
  MISC_FEATURE (26)..(32), (42)..(88): Xaa is unknown amino acid
MSLQSSLGDRVRPCLRKKKKKKKTTXXXXXXXLFSELRSAAXXXXXXXXXXXXXXXXXXXXXXXXXXXXXXXXXXXXXXXXXXXXXXXKGA

SEQ ID NO: 948 - DNA, 9153 bp, Homo sapiens
actgtctccaagatggcggccgtgtcagtttggggcatctccgcggtccggcccggggccccgggatctcggctgtccttcctcccggcataagatgcacatttttctgctctggagccgggaatgaaatattcttgagttcttacaactttatgacgagacccatgtgtggtgctattgagaaattcattgggaagttggaagacatttcaatcaacaggttgttttggtttctatagtacaattggggtggcattctgttttgtgaaaggaggaaggacttaggccagaaaactcatatgctatggttaactggttcccagcctccgagaatcttgttttccatggtgtaaaacttactcagcatcaggataagggataacgactctatggatatacagaatccttcaccatggtaaaactcgcaaacccgctttatactgagtggattttggaggccatcaaaaaagtgaaaaagcagaaacagcgtccttcagaagaaaggatatgcaatgctgtgtcttcatcccatggcttggatcgtaaaactgttttagaacaattggagttgagtgttaaagatggaacaattttaaaagtctcaaataaaggactcaattcctataaagatcctgataatcctgggcgaatagcacttcctaagcctcggaaccatggaaaattggataataaacaaaatgtggattggaataaactgataaagcgggcagttgagggcttggcagagtctggtggctcaactttgaaaagcattgaacgttttttgaaaggtcagaaggatgtgtctgcattattcggaggcagtgctgcctctggctttcaccagcagttacgattggctatcaaacgtgccattggccacggcagactccttaaagatggacctctttatcggctcaacactaaagcaaccaacgtggatgggaaagagagttgtgagtctctttcctgtttacctccagtgtcccttcttccacatgaaaaggataagccggttgctgaaccaatccccatctgtagtttctgtcttggtacaaaagaacaaaaccgagaaaagaagccagaggaactcatctcctgtgccgactgtggcaacagtggccatccatcctgtttaaagttttcccctgaactaacggttcgagtgaaggccttacggtggcagtgcatcgagtgtaaaacatgcagctcctgtcgagatcaaggcaaaaatgcggataacatgctcttttgtgattcatgtgaccgaggttttcacatggagtgttgtgatccgccactcacccgtatgccaaaaggcatgtggatatgtcaaatatgtcgacctaggaaaaaaggacgaaaacttctacaaaagaaggcagcacagataaaacggcgctatactaatccaataggacgtccaaaaaacaggttaaagaaacaaaacacggtatcaaaaggtcccttcagcaaagttcgaactggccctggaaggggtaggaaacgaaaaatcactctttccagccaatcagcatcatcatcatcagaagaaggatatttagagcggatagatggcttggacttctgcagagatagcaatgtctccttgaagttcaacaagaaaaccaaagggctcattgatggccttaccaaattttttaccccttcccctgatgggcggaaagctcggggggaagtggtggactactctgagcaatatcgaatcagaaagaggggcaacaggaaatcaagcacttcagattggcccacagacaatcaggatggctgggatggcaaacaagaaaatgaggagcgactttttgggagccaggaaatcatgactgagaaagatatggaattatttcgtgatatccaagaacaagcactgcagaaagttggagtgactggtccccctgatccacaagtccgctgtccctctgtcattgagtttgggaagtatgaaattcacacctggtactcctccccatatcctcaagaatactcaaggctgcccaaattgtatctttgtgaattttgtctaaaatatatgaaaagtagaactattctgcagcagcacatgaagaaatgtggttggttccatcctcctgccaatgagatttacagaaagaataatatttctgtctttgaggttgatgggaatgtgagtaccatttattgtcaaaacctgtgtcttttggcaaagttgtttcttgaccacaaaaccctctattacgatgtggagccatttcttttttatgtactaacacagaatgatgtcaagggctgccaccttgttggctacttttctaaggaaaagcactgccaacagaagtacaatgtttcctgtataatgattcttcctcaataccagcgtaagggctatggcaggtttctcatcgatttcagttatttgttatcaaagcgtgaaggccaagcagggtctccagagaaaccgttatctgatctgggtcgtctttcctacatggcatattggaaaagtgtaatattggagtgcctttatcaccaaaatgacaagcagatcagcattaagaagttaagcaagttgactggaatctgccctcaagacatcacttccacactccaccacctacgaatgctggacttccgtagtgaccaatttgtgattatccgccgggaaaaacttatccaggatcacatggcaaagcttcagctgaatttgcgacctgtagatgtagatccagaatgtttgcgctggactccagtcatagtgtccaactctgtggtctcagaggaggaagaagaggaggctgaggaaggagaaaacgaagagccacagtgccaggaaagagaattagagatcagtgtgggaaagtctgtgtctcatgagaacaaagaacaagattcttattcagtagaaagtgaaaagaaaccagaagttatggctccagtcagttctacacgtttgagcaaacaagtccttcctcatgatagtcttcctgcaaatagccagccatctcggaggggccgctgggggaggaagaacagaaaaacccaggaacgttttggtgataaagattctaaactgctcttggaagagacgtcttcagctcctcaggaacaatatggagaatgtggggagaaatcagaagccacccaggaacaatacactgaaagtgaagaacagctggtggcttctgaggagcagccaagccaggacgggaaacctgaccttcccaagagaagactcagtgagggggttgagccctggcgaggacagctcaagaaaagccctgaggctctgaagtgcagattaacagaaggaagtgagaggctgccccgtcgctacagtgagggtgacagggctgtcctcaggggcttcagtgagagcagcgaggaggaggaggagccggaaagccctcggtcaagctcgccaccaattctcacaaagcccacgctgaagcgaaagaaaccatttctccaccgaaggaggagagtccgaaagcgcaaacaccacaatagcagtgtagtcacagaaactatttctgagaccactgaagtgttagatgaaccttttgaagattctgactccgagaggccaatgccaagattagaacccacgtttgagatcgatgaagaagaggaggaagaggatgaaaatgaacttttccctagagaatacttccgtcgtttgtcttcgcaggatgtactcaggtgtcagtcctcttctaagaggaagtctaaagatgaagaagaagatgaagagtcagatgatgctgatgacactcctatcttaaagccagtatctcttttgcgaaaacgtgatgtgaagaattctcctcttgagccagatacatccacacctttgaaaaagaaaaagggatggcccaaaggcaagagccgcaaaccaatccactggaagaaaagacctggtcgaaaaccaggatttaagttgagtcgggaaatcatgccagtttctactcaagcatgcgtcattgagcccatcgtttccattcctaaagctggacgtaaacccaagatccaggagagtgaagaaactgttgagccaaaagaagacatgcccctacccgaggagaggaaggaggaggaggagatgcaagcagaggcagaagaggctgaagagggtgaggaagaggatgcagccagcagtgaagtcccagcagcctctccagcagacagcagcaatagtcctgagaccgaaaccaaggagcctgaggtggaggaggaagaagagaagccccgtgtctcagaggagcagaggcagtcagaggaggagcagcaggaattagaggagccagagccagaggaggaggaagatgcagctgcagagactgcccagaatgacgaccacgacgctgatgatgaggatgatggccacctggagtccacaaagaaaaaggagctagaggaacagcccacgagggaagatgtcaaggaggagcctggtgttcaagagtcttttttagatgctaatatgcagaagagtagggaaaagataaaggataaagaggaaaccgagctggattccgaagaggagcagccttcccatgacacgtccgtggtgtcagagcagatggctgggtctgaggacgaccacgaagaagactcccacactaaggaagagttaatcgaattaaaagaggaggaagagattcctcatagtgagctggatctggaaactgtacaggcagtgcagtctttgactcaagaagaaagcagtgagcatgagggcgcctaccaggactgtgaggaaactcttgcggcgtgtcagaccctgcagagttacacccaggctgacgaggaccctcagatgtccatggttgaagactgtcatgcgtcagaacataatagccctatctcctccgttcagtctcaccccagccagtcagtccgttcggtcagcagtcccaacgtgcctgcccttgagagtggctacacccagatcagcccagaacaaggatccctgtccgcaccctctatgcagaacatggagaccagccccatgatggatgtgccttccgtatcagaccactctcagcaggtggtggacagcggcttcagtgacctgggcagcattgagagcaccactgaaaactatgagaacccaagcagttacgactccacgatgggcggcagcatctgtgggaacagctcttcccagagcagctgctcctacggtgggctgtcgtcctccagcagcctcacccagagcagctgtgtggtcactcagcagatggccagcatgggcagcagctgcagcatgatgcagcagagcagcgtccagcctgctgccaactgcagcatcaagtcacctcagagctgcgtggtggagaggcctcccagtaaccagcagcagcagccgccaccaccgcctccacagcagccacagccgccgccgccacaaccacaaccagcaccacagcctccaccaccccagcagcagccgcaacagcagccgcagcctcagccccagcagcctccacccccaccccctccccagcagcagcccccgctgtcacagtgtagtatgaataacagtttcaccccagctcctatgatcatggagataccagaatctggaagcactgggaacataagtatctatgagaggattccaggggattttggtgccggcagctactctcaaccatcagccaccttcagcctagccaagctgcagcagctgaccaacaccattatggaccctcatgccatgccttatagccattctcctgctgtgacttcctatgcaaccagtgtttctctgtccaatacaggactggctcagctggctccatctcatcccttagctgggactcctcaagcacaagccaccatgacgccacccccaaacttggcatccactaccatgaacctcacatctcctctgcttcagtgcaacatgtctgccaccaacattggcattcctcacacgcagagattgcaagggcaaatgccagtgaaggggcacatttccatccgctccaagtctgcgccactgccctctgcggctgctcaccagcagcagctgtatggccgtagcccatcggcagttgccatgcaggctggccctcgcgcactggctgttcagcgtggcatgaacatgggggttaatctgatgcctactcccgcctataatgtcaattccatgaatatgaacaccttgaatgccatgaacagctatcgaatgacacagcccatgatgaacagcagttaccatagtaaccctgcctacatgaaccagacagcacagtatcctatgcagatgcagatgggaatgatggggagccaggcctatacccagcagcctatgcagcctaaccctcatgggaacatgatgtacacaggcccctcccatcacagctacatgaacgctgctggcgtgcccaagcagtcactcaacggaccttacatgagaagatgagcaagatgaacttgcaatcaaaaacttaaatatatataaataaaggaaccttttatactgacaaaccagagaaaaatggacctttttccagttaaaatattgctgtagatttagaggaatttttctttggtttattttattttttagaaaacctgatcttctctttttttgggttcattttgttctgggttttggttttcttcacaatcttgaacattttacagtagaactcatctaaaaatggatttggggatggggaaacatgcacaaaatcttttcataattaaaaagagccttactttctttacataccacatggacagaatttgtgtaaaagtgaattatctttattttaaaatgtatgtttcccctcactgtttgcagctcccaatgttgtcatttttaaatgttatatacatctcaagggttaaccagaccctttcctccaaacccaacctttcatttcctacttcattccagcaggaggcacttaggggagactcggatggggacatggagaacaacccaagctccttaaacttattattattgttaatattattattattattattaataaagtgaggcaggaaaatgcttctccttttaaaatcccctccactcctcacacacacacacctcttgaaacccttccccaagaatgtttctttatagacggacttcattgaaatctttgttgttcttgaatcaagtgtaatataatttttttcttcttttttaaaatattcccactcagcactcagagacacaaaaatactgtaagtctcaattaacagcagaatctcagagaaaagctgtttgcaatccaaatccagcctttggaggaatagagatggtcaattaacaatcaaaaagaggagattaacctcttgtttttttaccacctggtgaatcagccataacgcacacacacgccacccagcctcttgtttctagtatgtactttgaaatgctaactgagggtcttgatgcttgagcctttgactgataaaactcaaatagcagtccccagtgatttgcctcttaggttctttcttaaattgttggtggatgactgtacattttagtgatttgaaaaataactgacaaaccattgaaacagtttattttatgttggaagagatggcgcagatgtgtgtcagaagggagatcacggtgtgagtttcgtagctatttaagtgatacatacctctagtttttgtatgtcttttgagatcctgagttcatcccctgtgaatcagagtgcacaagcacctctcctgtgagtggctaatgagaagagggacagaccgaccaccagcacagtagggcagatctggacagcagaatgttataacgcaagttcatgtgttgctcccaactccattctcttttctctcgtgcaaccagtttgcccattctcttcctattacttgctccagggataggtaaaaaaaaaaaaaaaaaaaaaaaaaatatatatatatatatatacacacacacacacacacacacacacacatatatatatatatatattccatcattagaagatggaaactattataccacttggtatgtgcagtcaaatatccaaaagggggaagtactgcttagagaaatatctgtaagcattaaattctctcctttatttgtacattttatatagataaatttttaaagtactaattaggcattaacttttttcaaatgcacaggtttgttggtttttttaatacactttaattgactttctcaagcgtgctaggtagaaacgcagaattccacatcttcccgctctcagctctgagcatgtgcaaggctgtgtaggacccagtttctctgtatatactattccagttcccagtcatctatgtagaaagtgcactgtgctgccatcgccctacatcttcagctgtgtcattgcttcctggttggggtggggacggggtgggtcgggagggaggtatattgggaggagggtgggtcaaggcagaaggagaagctgttgaaatgagggccgtgaaatcagtttctgttggtttgcggttgtgtttggttttgtttgtttctttataaaaaattcaatcgggcagctcccttttccacaagcctctttgtgactgtagaactattgtagaaaaaaaaagttcttttctatattataaaagaaattatccaacacagtaatattggtacctgtcattttttcacttctgtttaaaaaaaatgtatttttagcaagataacttgggtaatcttctaaaaaagaaatttaaaaactcactgttagtgactttgatgccttttaaaataagagctttttcatttcattccatctttaaaattttttatctttgttgtagaatattaaaaactattttaagaaagataaattctctttaaagagatctctagcgtgtgtgaatagagctccagatgcctctaaaagccgcatgtacaaaggaagccacgtctatcctgtctgtttatatttgcttttcctgttttgtaacctctttgtactttgttcatggtgacttgtaagctaaggggaaggggtgcctagatgcctttgtatctctccatgtcacgcgctcctgggccagccggcctcccttcctctccttgtatgtaatacctttttttcccctttctagcaagtactttcaaaagaactctgtacattttaacataaaaaataaattatgttgagccattttgga

SEQ ID NO: 949 - protein, 2004 aa, Homo sapiens
MVKLANPLYTEWILEAIKKVKKQKQRPSEERICNAVSSSHGLDRKTVLEQLELSVKDGTILKVSNKGLNSYKDPDNPGRIALPKPRNHGKLDNKQNVDWNKLIKRAVEGLAESGGSTLKSIERFLKGQKDVSALFGGSAASGFHQQLRLAIKRAIGHGRLLKDGPLYRLNTKATNVDGKESCESLSCLPPVSLLPHEKDKPVAEPIPICSFCLGTKEQNREKKPEELISCADCGNSGHPSCLKFSPELTVRVKALRWQCIECKTCSSCRDQGKNADNMLFCDSCDRGFHMECCDPPLTRMPKGMWICQICRPRKKGRKLLQKKAAQIKRRYTNPIGRPKNRLKKQNTVSKGPFSKVRTGPGRGRKRKITLSSQSASSSSEEGYLERIDGLDFCRDSNVSLKFNKKTKGLIDGLTKFFTPSPDGRKARGEVVDYSEQYRIRKRGNRKSSTSDWPTDNQDGWDGKQENEERLFGSQEIMTEKDMELFRDIQEQALQKVGVTGPPDPQVRCPSVIEFGKYEIHTWYSSPYPQEYSRLPKLYLCEFCLKYMKSRTILQQHMKKCGWFHPPANEIYRKNNISVFEVDGNVSTIYCQNLCLLAKLFLDHKTLYYDVEPFLFYVLTQNDVKGCHLVGYFSKEKHCQQKYNVSCIMILPQYQRKGYGRFLIDFSYLLSKREGQAGSPEKPLSDLGRLSYMAYWKSVILECLYHQNDKQISIKKLSKLTGICPQDITSTLHHLRMLDFRSDQFVIIRREKLIQDHMAKLQLNLRPVDVDPECLRWTPVIVSNSVVSEEEEEEAEEGENEEPQCQERELEISVGKSVSHENKEQDSYSVESEKKPEVMAPVSSTRLSKQVLPHDSLPANSQPSRRGRWGRKNRKTQERFGDKDSKLLLEETSSAPQEQYGECGEKSEATQEQYTESEEQLVASEEQPSQDGKPDLPKRRLSEGVEPWRGQLKKSPEALKCRLTEGSERLPRRYSEGDRAVLRGFSESSEEEEEPESPRSSSPPILTKPTLKRKKPFLHRRRRVRKRKHHNSSVVTETISETTEVLDEPFEDSDSERPMPRLEPTFEIDEEEEEEDENELFPREYFRRLSSQDVLRCQSSSKRKSKDEEEDEESDDADDTPILKPVSLLRKRDVKNSPLEPDTSTPLKKKKGWPKGKSRKPIHWKKRPGRKPGFKLSREIMPVSTQACVIEPIVSIPKAGRKPKIQESEETVEPKEDMPLPEERKEEEEMQAEAEEAEEGEEEDAASSEVPAASPADSSNSPETETKEPEVEEEEEKPRVSEEQRQSEEEQQELEEPEPEEEEDAAAETAQNDDHDADDEDDGHLESTKKKELEEQPTREDVKEEPGVQESFLDANMQKSREKIKDKEETELDSEEEQPSHDTSVVSEQMAGSEDDHEEDSHTKEELIELKEEEEIPHSELDLETVQAVQSLTQEESSEHEGAYQDCEETLAACQTLQSYTQADEDPQMSMVEDCHASEHNSPISSVQSHPSQSVRSVSSPNVPALESGYTQISPEQGSLSAPSMQNMETSPMMDVPSVSDHSQQVVDSGFSDLGSIESTTENYENPSSYDSTMGGSICGNSSSQSSCSYGGLSSSSSLTQSSCVVTQQMASMGSSCSMMQQSSVQPAANCSIKSPQSCVVERPPSNQQQQPPPPPPQQPQPPPPQPQPAPQPPPPQQQPQQQPQPQPQQPPPPPPPQQQPPLSQCSMNNSFTPAPMIMEIPESGSTGNISIYERIPGDFGAGSYSQPSATFSLAKLQQLTNTIMDPHAMPYSHSPAVTSYATSVSLSNTGLAQLAPSHPLAGTPQAQATMTPPPNLASTTMNLTSPLLQCNMSATNIGIPHTQRLQGQMPVKGHISIRSKSAPLPSAAAHQQQLYGRSPSAVAMQAGPRALAVQRGMNMGVNLMPTPAYNVNSMNMNTLNAMNSYRMTQPMMNSSYHSNPAYMNQTAQYPMQMQMGMMGSQAYTQQPMQPNPHGNMMYTGPSHHSYMNAAGVPKQSLNGPYMRR

SEQ ID NO: 950 - DNA, 1357 bp, Homo sapiens
atgtggccattccgcgaaccggcgcgggtggtcaaaacgcagaggcctgcggtgcccagcgccgcctggaggagacagcaggagggagagacagccaggcagcccggggtgcgagggagaggcagcggcctaggcaggcggtccctgcgcaggccccggcccagagccggcggcgacggaggccgcggggcgcaggcgggcaggggcctggctgaaggggcacgcgcgttccggggtgaagagcgcaggggtgccgggccgcgccagcgagcgcacgtgcgctgccatggcaacactccgagaccccgagtcctgattggaggtcgaagacagtgcgtgctgctcggccccactcatccagtcacaaagggctggggcggtcgccgcgctcgcgtgtttgcggagtgcgcctggagggggcgctggagtatgtgtgtgccggggcggggtggcttccgggcacgagttgctgacagcgcctcgcggttgataaatcctgagggcggcggctaccctgcactccatcggtgcctttgggaagcgccgccttctctgttgtacccggccgtgggtcaggtcggcgcggctggcggtggagtctcggacaccgagccctggaccccgactctggaagcccccagccccactgggccgcggcagggcgcccaccctccacaatctcagttcccagccggggagtgaggggctgggcgggtctctccaccgctttggagacctcaggacttggatacgcttttgagtggtcccagtcgtcctgatccacgaaggcgtggagtggaagtcaggaccaggggtcgccccagtgacgcaggaagtcaagcccagatgcggtgaggcgtcgccagccttggacccagcagtgggcgctggtgacagtggcgacctcgccgatgagaggttcgccctccctagcattagttgtcactttggtgaaatggagcgtgggtggcagctcctccacacacaagccctttgctgaggtggtgcggggggttctctccacgcttgctaagggcaggtagttggctgactttgaactatgaagaaaagccagaaacaaaatggcagaatggtatgactctgggtgggcttagggacgctggtgccagaggacttggcttgaacccgctccaacacttacaacctgagtgaccgtgagaaagaactgtaactcctctaaacttcaagttcctcacttctcaaataagaacgtgaatagtacctccctcctagagttgtgaggattgagttagaaaatgctagcaattgttatgccctaaggaacagcacaagatacaataacacgtgataatgtgtgtcgaaggtgcagaaatgc

SEQ ID NO: 951 - protein, 233 aa, Homo sapiens [sequence omitted]

SEQ ID NO: 952 - DNA, 3472 bp, Homo sapiens
gctgagagcagcaaggccagagttgaaaacttacagagtcctgaggctttcagactgaaaaaggctttcttctgtcactgacaatcgccaccatgatccatagtcttttcttgatcaactcctctggagacattttcctggagaaacattggaaaagtgtggtcagccgttctgtttgtgattacttttttgaggcgcaagagagagctactgaggcagaaaatgtgcctccggttatccctacccctcaccactatctcttaagtgtttaccgccacaagatcttttttgtggccgtgatccagacggaggtcccccctctgtttgtcattgagtttcttcaccgagtggtggacacatttcaggattattttggagtctgttcagagccagtgatcaaagacaatgtagttgtggtttatgaggtattggaagagatgcttgacaatggttttccattggctaccgagtcgaacattcttaaagaactcataaagcctcctaccatccttcgaacggttgtcaacaccatcacaggaagcacgaatgtgggtgaccagcttcccactgggcagctgtcagtggtgccttggcgacggactggggtgaaatataccaacaatgaggcctattttgatgtgattgaagagattgatgcaattattgataaatcaggctccacaattactgctgagatccagggggtgattgatgcctgtgtcaagctgactggcatgccagaccttacactttccttcatgaaccctaggttgttggatgatgtcagcttccatccttgtgttcgtttcaaacgctgggaatctgagcgcatcctctccttcatccctcctgatggaaacttccgcctgctgtcttaccatgtcagtgcacagaatctggttgcaatcccagtgtatgtcaaacataacatcagtttccgggacagtagttcccttggacgctttgaaataacggtgggacccaagcagacgatggggaagaccattgagggagtgactgtcaccagccagatgcccaagggggtcctgaacatgagccttactccatcacaggggacacacacattcgacccagtcacaaagatgctgtcttgggatgtaggaaaaataaatccacaaaagctaccaagtttgaaggggaccatgagtcttcaggctggagcttccaaaccagatgaaaaccccacaattaacctgcagtttaagatccagcagctggccatttctggactcaaggtgaatcgtctggatatgtatggagaaaagtacaaaccctttaagggcataaaatacatgaccaaagctgggaagttccaagttcgaacctgaagggagcatttgctgagggaatagtcttgcacattttttcatttcttacttgtctaaaagtaaaaaaaaatatcagcctgtctcctaggtcagtcccctcctggacccacccgctcccttttttccttagccttcagtgccatggaactaatcaagggaggaaaaggtcaccagggagaactggacagaactgaaacacagcaacaccagttctcaaggacaaggtgtgtgatgggggtaggaagcttggtgcttatgtaaccattttaaacgtggtttctataggaaagaccaacatttgtttagcttgcttggctttaattatctaaagccaatgaaagacttctttgttgattttttaagatagaaagattaaaaagaaagaaagatgggaagaaaatgaatgtcagtcaaggaaaggccacttaaggatctgctctatgaaggagaagaaagaggaaaaagaagtaaaggagttaggaggagacacttaaatgaaagattggcaagaaaagcagtcggactctaccttaaggagggatgggaaggaaagagttgtgttggtttctttctgattcctctactcatgtagaaaacacttgtacttctggaaatggactggagactttttaaatttgagtccactattgacatggaaaccccagtggaatcagattttccctcaaagaccatgatggtatcggactagttttcagacactgcctgttgctgtccatcagcacttggtctcttatcttcagtgagaaggtgacccgccttcttcccatggtggctgcctaaagtgcttcttttctaacccaaaacagttctactcacttccttttacagaattcaccggccattttcctgttacctgatccttctacaggatttttaaaaagtaagagagtttcagagaagccgatcccataatccccagtgcagccagggcccgtgtgtcatcgtactggagtagagggccgactcttcccatgaaggtgagcacagctgtgagtgagtgagctcatatctccatttgtcagtgctggactggtaccagatcgtaaccttcccgttggtcggaaacttttccatctgtcgccctagaaaaagagaaagcttaccatcgagggtgtggttgatccttgaagctgcttggtaaagttatcatttcctcagtcttttcttttgtactcctatcatgtattcattaatatctaccagtcccttttcattctaagacaaaacatttctcctaaatctctgaataaaatcagtgctgtaggaagatggactgtgttgatcatgggtgtaagcaacccagtttaagaaacatggcaactaaagggatacctcaggctttctttcccagtgggtcatttttgtcctagttcagtgtgtctgttactatttaaatatttatacaaaagggtttttgtttatagcttaaggaatgatactgtgctctgcttggtgcatggagaaaaaggaagacccgtactctccacaccctagagcttttctctaaatattgtgcaaagtttttgctagttttatcttctgactttgggactagtttttgctgcagagttgtgttgctttgtgattttcctctgggatagtgtactgtacacaaccagatgtgttccacactccgtgactccgcagtttgtcctggagtgacatacacatccaccatggaaagggaagcatctctgcctgtggattctcaagtacttggaagcacctctcctgaggaacctacaggattctaaggtttcctaggtcactgaacaactaatcttggtccctgaatatttctaggtttgtaagtgcagcagttttatttcctctagaactcatcctgtttcaagggaagtacctaagaagatatagagtgtttctagggtaagggacctgcaggtgtaagcatagatgaaataactgtcctgtcacatgtgcagcaggccatggagtgtagcgggcatcgctgccgccattcctgcagcatcaccataagcagtgcagggtgtctccatcgagctgtttggttccatgtgtgtttaacatgtgcagaagtagcttctctgtttaagtttaataaagttgagtttcaaccagtc

SEQ ID NO: 953 - protein, 418 aa, Homo sapiens
MIHSLFLINSSGDIFLEKHWKSVVSRSVCDYFFEAQERATEAENVPPVIPTPHHYLLSVYRHKIFFVAVIQTEVPPLFVIEFLHRVVDTFQDYFGVCSEPVIKDNVVVVYEVLEEMLDNGFPLATESNILKELIKPPTILRTVVNTITGSTNVGDQLPTGQLSVVPWRRTGVKYTNNEAYFDVIEEIDAIIDKSGSTITAEIQGVIDACVKLTGMPDLTLSFMNPRLLDDVSFHPCVRFKRWESERILSFIPPDGNFRLLSYHVSAQNLVAIPVYVKHNISFRDSSSLGRFEITVGPKQTMGKTIEGVTVTSQMPKGVLNMSLTPSQGTHTFDPVTKMLSWDVGKINPQKLPSLKGTMSLQAGASKPDENPTINLQFKIQQLAISGLKVNRLDMYGEKYKPFKGIKYMTKAGKFQVRT

SEQ ID NO: 954 - DNA, 3173 bp, Homo sapiens
atggccctgtccactgagcatcctcccgccacacagaaacccgcccagccggggccaccgaccccaccccctgcctggaaacttaaaggaggccggagctgtggggagctcagagctgagatcctacaggagtccagggctggagagaaaacctctgcgaggaaagggaaggagcaagccgtgaatttaagggacgctgtgaagcaatcatggatgcaatgaagagagggctctgctgtgtgctgctgctgtgtggagcagtcttcgtttcgcccagccaggaaatccatgcccgattcagaagaggagccagatcttaccaagtgatctgcagagatgaaaaaacgcagatgatataccagcaacatcagtcatggctgcgccctgtgctcagaagcaaccgggtggaatattgctggtgcaacagtggcagggcacagtgccactcagtgcctgtcaaaagttgcagcgagccaaggtgtttcaacgggggcacctgccagcaggccctgtacttctcagatttcgtgtgccagtgccccgaaggatttgctgggaagtgctgtgaaatagataccagggccacgtgctacgaggaccagggcatcagctacaggggcacgtggagcacagcggagagtggcgccgagtgcaccaactggaacagcagcgcgttggcccagaagccctacagcgggcggaggccagacgccatcaggctgggcctggggaaccacaactactgcagaaacccagatcgagactcaaagccctggtgctacgtctttaaggcggggaagtacagctcagagttctgcagcacccctgcctgctctgagggaaacagtgactgctactttgggaatgggtcagcctaccgtggcacgcacagcctcaccgagtcgggtgcctcctgcctcccgtggaattccatgatcctgataggcaaggtttacacagcacagaaccccagtgcccaggcactgggcctgggcaaacataattactgccggaatcctgatggggatgccaagccctggtgccacgtgctgaagaaccgcaggctgacgtgggagtactgtgatgtgccctcctgctccacctgcggcctgagacagtacagccagcctcagtttcgcatcaaaggagggctcttcgccgacatcgcctcccacccctggcaggctgccatctttgccaagcacaggaggtcgcccggagagcggttcctgtgcgggggcatactcatcagctcctgctggattctctctgccgcccactgcttccaggagaggtttccgccccaccacctgacggtgatcttgggcagaacataccgggtggtccctggcgaggaggagcagaaatttgaagtcgaaaaatacattgtccataaggaattcgatgatgacacttacgacaatgacattgcgctgctgcagctgaaatcggattcgtcccgctgtgcccaggagagcagcgtggtccgcactgtgtgccttcccccggcggacctgcagctgccggactggacggagtgtgagctctccggctacggcaagcatgaggccttgtctcctttctattcggagcggctgaaggaggctcatgtcagactgtacccatccagccgctgcacatcacaacatttacttaacagaacagtcaccgacaacatgctgtgtgctggagacactcggagcggcgggccccaggcaaacttgcacgacgcctgccagggcgattcgggaggccccctggtgtgtctgaacgatggccgcatgactttggtgggcatcatcagctggggcctgggctgtggacagaaggatgtcccgggtgtgtacaccaaggttaccaactacctagactggattcgtgacaacatgcgaccgtgaccaggaacacccgactcctcaaaagcaaatgagatcccgcctcttcttcttcagaagacactgcaaaggcgcagtgcttctctacagacttctccagacccaccacaccgcagaagcgggacgagaccctacaggagagggaagagtgcattttcccagatacttcccattttggaagttttcaggacttggtctgatttcaggatactctgtcagatgggaagacatgaatgcacactagcctctccaggaatgcctcctccctgggcagaaagtggccatgccaccctgttttcagctaaagcccaacctcctgacctgtcaccgtgagcagctttggaaacaggaccacaaaaatgaaagcatgtctcaatagtaaaagataacaagatctttcaggaaagacggattgcattagaaatagacagtatatttatagtcacaagagcccagcagggcctcaaagttggggcaggctggctggcccgtcatgttcctcaaaagcacccttgacgtcaagtctccttcccctttccccactccctggctctcagaaggtattccttttgtgtacagtgtgtaaagtgtaaatcctttttctttataaactttagagtagcatgagagaattgtatcatttgaacaactaggcttcagcatatttatagcaatccatgttagtttttactttctgttgccacaaccctgttttatactgtacttaataaattcagatatatttttcacagtttttccaaaatcagagtggaatggttttgttatagatgctgtatcccactctttattcatgttcacattttaaaatcatttggaattctgcttcactcgcttaacatatacacaacacctgtaacatacaaggcaatgggctaggtgctccagaccgggaaaaggagggacaggaatgcttggtctgatgggctaatatggcatttagagaagtaccaaggtacagtggagccggtcacaaaagggcagacttgtagtagaattcagttgcaagagggattggggaatcttaaggaaaaaatagaatcttaaggaaaaaataactgggtgagacgtggactgtggacaggtgtggaaaaggcactctccatggaggtatgaatatgtagagggccaagagaggggagtacagggagaaatgagttgagcttgtctgaagtgaacttcaggaagaggaacataggctggaatttagattatgggggctctgaacaccaaactgagtttggacttaattgacttctg

SEQ ID NO: 955 - protein, 562 aa, Homo sapiens
MDAMKRGLCCVLLLCGAVFVSPSQEIHARFRRGARSYQVICRDEKTQMIYQQHQSWLRPVLRSNRVEYCWCNSGRAQCHSVPVKSCSEPRCFNGGTCQQALYFSDFVCQCPEGFAGKCCEIDTRATCYEDQGISYRGTWSTAESGAECTNWNSSALAQKPYSGRRPDAIRLGLGNHNYCRNPDRDSKPWCYVFKAGKYSSEFCSTPACSEGNSDCYFGNGSAYRGTHSLTESGASCLPWNSMILIGKVYTAQNPSAQALGLGKHNYCRNPDGDAKPWCHVLKNRRLTWEYCDVPSCSTCGLRQYSQPQFRIKGGLFADIASHPWQAAIFAKHRRSPGERFLCGGILISSCWILSAAHCFQERFPPHHLTVILGRTYRVVPGEEEQKFEVEKYIVHKEFDDDTYDNDIALLQLKSDSSRCAQESSVVRTVCLPPADLQLPDWTECELSGYGKHEALSPFYSERLKEAHVRLYPSSRCTSQHLLNRTVTDNMLCAGDTRSGGPQANLHDACQGDSGGPLVCLNDGRMTLVGIISWGLGCGQKDVPGVYTKVTNYLDWIRDNMRP

SEQ ID NO: 956 - DNA, 3035 bp, Homo sapiens
atggccctgtccactgagcatcctcccgccacacagaaacccgcccagccggggccaccgaccccaccccctgcctggaaacttaaaggaggccggagctgtggggagctcagagctgagatcctacaggagtccagggctggagagaaaacctctgcgaggaaagggaaggagcaagccgtgaatttaagggacgctgtgaagcaatcatggatgcaatgaagagagggctctgctgtgtgctgctgctgtgtggagcagtcttcgtttcgcccagccaggaaatccatgcccgattcagaagaggagccagatcttaccaaggttgcagcgagccaaggtgtttcaacgggggcacctgccagcaggccctgtacttctcagatttcgtgtgccagtgccccgaaggatttgctgggaagtgctgtgaaatagataccagggccacgtgctacgaggaccagggcatcagctacaggggcacgtggagcacagcggagagtggcgccgagtgcaccaactggaacagcagcgcgttggcccagaagccctacagcgggcggaggccagacgccatcaggctgggcctggggaaccacaactactgcagaaacccagatcgagactcaaagccctggtgctacgtctttaaggcggggaagtacagctcagagttctgcagcacccctgcctgctctgagggaaacagtgactgctactttgggaatgggtcagcctaccgtggcacgcacagcctcaccgagtcgggtgcctcctgcctcccgtggaattccatgatcctgataggcaaggtttacacagcacagaaccccagtgcccaggcactgggcctgggcaaacataattactgccggaatcctgatggggatgccaagccctggtgccacgtgctgaagaaccgcaggctgacgtgggagtactgtgatgtgccctcctgctccacctgcggcctgagacagtacagccagcctcagtttcgcatcaaaggagggctcttcgccgacatcgcctcccacccctggcaggctgccatctttgccaagcacaggaggtcgcccggagagcggttcctgtgcgggggcatactcatcagctcctgctggattctctctgccgcccactgcttccaggagaggtttccgccccaccacctgacggtgatcttgggcagaacataccgggtggtccctggcgaggaggagcagaaatttgaagtcgaaaaatacattgtccataaggaattcgatgatgacacttacgacaatgacattgcgctgctgcagctgaaatcggattcgtcccgctgtgcccaggagagcagcgtggtccgcactgtgtgccttcccccggcggacctgcagctgccggactggacggagtgtgagctctccggctacggcaagcatgaggccttgtctcctttctattcggagcggctgaaggaggctcatgtcagactgtacccatccagccgctgcacatcacaacatttacttaacagaacagtcaccgacaacatgctgtgtgctggagacactcggagcggcgggccccaggcaaacttgcacgacgcctgccagggcgattcgggaggccccctggtgtgtctgaacgatggccgcatgactttggtgggcatcatcagctggggcctgggctgtggacagaaggatgtcccgggtgtgtacaccaaggttaccaactacctagactggattcgtgacaacatgcgaccgtgaccaggaacacccgactcctcaaaagcaaatgagatcccgcctcttcttcttcagaagacactgcaaaggcgcagtgcttctctacagacttctccagacccaccacaccgcagaagcgggacgagaccctacaggagagggaagagtgcattttcccagatacttcccattttggaagttttcaggacttggtctgatttcaggatactctgtcagatgggaagacatgaatgcacactagcctctccaggaatgcctcctccctgggcagaaagtggccatgccaccctgttttcagctaaagcccaacctcctgacctgtcaccgtgagcagctttggaaacaggaccacaaaaatgaaagcatgtctcaatagtaaaagataacaagatctttcaggaaagacggattgcattagaaatagacagtatatttatagtcacaagagcccagcagggcctcaaagttggggcaggctggctggcccgtcatgttcctcaaaagcacccttgacgtcaagtctccttcccctttccccactccctggctctcagaaggtattccttttgtgtacagtgtgtaaagtgtaaatcctttttctttataaactttagagtagcatgagagaattgtatcatttgaacaactaggcttcagcatatttatagcaatccatgttagtttttactttctgttgccacaaccctgttttatactgtacttaataaattcagatatatttttcacagtttttccaaaatcagagtggaatggttttgttatagatgctgtatcccactctttattcatgttcacattttaaaatcatttggaattctgcttcactcgcttaacatatacacaacacctgtaacatacaaggcaatgggctaggtgctccagaccgggaaaaggagggacaggaatgcttggtctgatgggctaatatggcatttagagaagtaccaaggtacagtggagccggtcacaaaagggcagacttgtagtagaattcagttgcaagagggattggggaatcttaaggaaaaaatagaatcttaaggaaaaaataactgggtgagacgtggactgtggacaggtgtggaaaaggcactctccatggaggtatgaatatgtagagggccaagagaggggagtacagggagaaatgagttgagcttgtctgaagtgaacttcaggaagaggaacataggctggaatttagattatgggggctctgaacaccaaactgagtttggacttaattgacttctg

SEQ ID NO: 957 - protein, 516 aa, Homo sapiens
MDAMKRGLCCVLLLCGAVFVSPSQEIHARFRRGARSYQGCSEPRCFNGGTCQQALYFSDFVCQCPEGFAGKCCEIDTRATCYEDQGISYRGTWSTAESGAECTNWNSSALAQKPYSGRRPDAIRLGLGNHNYCRNPDRDSKPWCYVFKAGKYSSEFCSTPACSEGNSDCYFGNGSAYRGTHSLTESGASCLPWNSMILIGKVYTAQNPSAQALGLGKHNYCRNPDGDAKPWCHVLKNRRLTWEYCDVPSCSTCGLRQYSQPQFRIKGGLFADIASHPWQAAIFAKHRRSPGERFLCGGILISSCWILSAAHCFQERFPPHHLTVILGRTYRVVPGEEEQKFEVEKYIVHKEFDDDTYDNDIALLQLKSDSSRCAQESSVVRTVCLPPADLQLPDWTECELSGYGKHEALSPFYSERLKEAHVRLYPSSRCTSQHLLNRTVTDNMLCAGDTRSGGPQANLHDACQGDSGGPLVCLNDGRMTLVGIISWGLGCGQKDVPGVYTKVTNYLDWIRDNMRP

SEQ ID NO: 958 - DNA, 3916 bp, Homo sapiens
gagcaggaagtgtttgaggaagtcgcgccgcgctgcccgcgttaagattcccgcattttaatgttttcaggggggtgtcatagccccgggtttggccgccccagccccgccttccccgccccggggagcccgccccctgccccgcgtccctgccgacagagttagcacgacatcagtatgagctggtcaccttccctgacaacgcagacatgtggggcctgggaaatgaaagagcgccttgggacagggggatttggaaatgtcatccgatggcacaatcaggaaacaggtgagcagattgccatcaagcagtgccggcaggagctcagcccccggaaccgagagcggtggtgcctggagatccagatcatgagaaggctgacccaccccaatgtggtggctgcccgagatgtccctgaggggatgcagaacttggcgcccaatgacctgcccctgctggccatggagtactgccaaggaggagatctccggaagtacctgaaccagtttgagaactgctgtggtctgcgggaaggtgccatcctcaccttgctgagtgacattgcctctgcgcttagataccttcatgaaaacagaatcatccatcgggatctaaagccagaaaacatcgtcctgcagcaaggagaacagaggttaatacacaaaattattgacctaggatatgccaaggagctggatcagggcagtctttgcacatcattcgtggggaccctgcagtacctggccccagagctactggagcagcagaagtacacagtgaccgtcgactactggagcttcggcaccctggcctttgagtgcatcacgggcttccggcccttcctccccaactggcagcccgtgcagtggcattcaaaagtgcggcagaagagtgaggtggacattgttgttagcgaagacttgaatggaacggtgaagttttcaagctctttaccctaccccaataatcttaacagtgtcctggctgagcgactggagaagtggctgcaactgatgctgatgtggcacccccgacagaggggcacggatcccacgtatgggcccaatggctgcttcaaggccctggatgacatcttaaacttaaagctggttcatatcttgaacatggtcacgggcaccatccacacctaccctgtgacagaggatgagagtctgcagagcttgaaggccagaatccaacaggacacgggcatcccagaggaggaccaggagctgctgcaggaagcgggcctggcgttgatccccgataagcctgccactcagtgtatttcagacggcaagttaaatgagggccacacattggacatggatcttgtttttctctttgacaacagtaaaatcacctatgagactcagatctccccacggccccaacctgaaagtgtcagctgtatccttcaagagcccaagaggaatctcgccttcttccagctgaggaaggtgtggggccaggtctggcacagcatccagaccctgaaggaagattgcaaccggctgcagcagggacagcgagccgccatgatgaatctcctccgaaacaacagctgcctctccaaaatgaagaattccatggcttccatgtctcagcagctcaaggccaagttggatttcttcaaaaccagcatccagattgacctggagaagtacagcgagcaaaccgagtttgggatcacatcagataaactgctgctggcctggagggaaatggagcaggctgtggagctctgtgggcgggagaacgaagtgaaactcctggtagaacggatgatggctctgcagaccgacattgtggacttacagaggagccccatgggccggaagcaggggggaacgctggacgacctagaggagcaagcaagggagctgtacaggagactaagggaaaaacctcgagaccagcgaactgagggtgacagtcaggaaatggtacggctgctgcttcaggcaattcagagcttcgagaagaaagtgcgagtgatctatacgcagctcagtaaaactgtggtttgcaagcagaaggcgctggaactgttgcccaaggtggaagaggtggtgagcttaatgaatgaggatgagaagactgttgtccggctgcaggagaagcggcagaaggagctctggaatctcctgaagattgcttgtagcaaggtccgtggtcctgtcagtggaagcccggatagcatgaatgcctctcgacttagccagcctgggcagctgatgtctcagccctccacggcctccaacagcttacctgagccagccaagaagagtgaagaactggtggctgaagcacataacctctgcaccctgctagaaaatgccatacaggacactgtgagggaacaagaccagagtttcacggccctagactggagctggttacagacggaagaagaagagcacagctgcctggagcaggcctcatgatgtggggggactcgaccccctgacatggggcagcccatagcaggccttgtgcagtggggggactcgaccccctgacatggggctgcctggagcaggccgcgtgacgtggggctgcctggccgcggctctcacatggtggttcctgctgcactgatggcccaggggtctctggtatccagatggagctctcgcttcctcagcagctgtgactttcacccaggacccaggacgcagccctccgtgggcactgccggcgccttgtctgcacactggaggtcctccattacagaggcccagcgcacatcgctggccccacaaacgttcaggggtacagccatggcagctccttcctctgccgtgagaaaagtgcttggagtacggtttgccacacacgtgactggacagtgtccaattcaaatctttcagggcagagtccgagcagcgcttggtgacagcctgtcctctcctgctctccaaaggccctgctccctgtcctctctcactttacagcttgtgtttcttctggattcagcttctcctaaacagacagtttaattatagttgcggcctggccccatcctcacttcctctttttatttcactgctgctaaaattgtgtttttacctactactttggtggttgtcctcttttcggcaaagttggagcgagtgccaagctctccatctgtggtcctttctgccaagagcgactcatagtaaccaggatgggagagcagctgccttattctgaatcccaaaaattacttgggggtgattgtcacagaggagggacagaaagggtatctgctgaccaccagcctgcctacccatgcccatgtctccattcctgctcaagcgtgtgtgctgggccggggagtccctgtctctcacagcatctagcagtattattaaatggattcattttaaaaatagctcctatattttgtaacatgtctcaaacactcatactgggttccacaatccactgttagaatacctatggttagggcttctgaactaaaataatggaaaattttaacaatttgtatagtgcctggatcattactagtgccataaccctgcttcttcaacatttcacagaacttctcttttatataaaggcaagagcacaaaatgagttcagatgatcacaaacaggtgagttttgttggagaagaaagttggagtaggagactttcacaagtggtttccatggagatagaatgaagcattctgtggtcaagtaagtttagggagctattcatgtttcacttgctttgtggagattcacactatgcactgggaaagtatctgaaaagtcttataataaagaaacaggcttaactttgtgtaagaacactgtttatcaatgtcatttggctatagaaacattttctcctgctgattgtgtgtgtgaaacatgtattaacattccaatgaactagcatttaataaagcacaattttgg

SEQ ID NO: 959 - protein, 756 aa, Homo sapiens
MSWSPSLTTQTCGAWEMKERLGTGGFGNVIRWHNQETGEQIAIKQCRQELSPRNRERWCLEIQIMRRLTHPNVVAARDVPEGMQNLAPNDLPLLAMEYCQGGDLRKYLNQFENCCGLREGAILTLLSDIASALRYLHENRIIHRDLKPENIVLQQGEQRLIHKIIDLGYAKELDQGSLCTSFVGTLQYLAPELLEQQKYTVTVDYWSFGTLAFECITGFRPFLPNWQPVQWHSKVRQKSEVDIVVSEDLNGTVKFSSSLPYPNNLNSVLAERLEKWLQLMLMWHPRQRGTDPTYGPNGCFKALDDILNLKLVHILNMVTGTIHTYPVTEDESLQSLKARIQQDTGIPEEDQELLQEAGLALIPDKPATQCISDGKLNEGHTLDMDLVFLFDNSKITYETQISPRPQPESVSCILQEPKRNLAFFQLRKVWGQVWHSIQTLKEDCNRLQQGQRAAMMNLLRNNSCLSKMKNSMASMSQQLKAKLDFFKTSIQIDLEKYSEQTEFGITSDKLLLAWREMEQAVELCGRENEVKLLVERMMALQTDIVDLQRSPMGRKQGGTLDDLEEQARELYRRLREKPRDQRTEGDSQEMVRLLLQAIQSFEKKVRVIYTQLSKTVVCKQKALELLPKVEEVVSLMNEDEKTVVRLQEKRQKELWNLLKIACSKVRGPVSGSPDSMNASRLSQPGQLMSQPSTASNSLPEPAKKSEELVAEAHNLCTLLENAIQDTVREQDQSFTALDWSWLQTEEEEHSCLEQAS

SEQ ID NO: 960 - DNA, 1259 bp, Homo sapiens
ccggagctgggttgctcctgctcccgtctccaagtcctggtacctccttcaagctgggagagggctctagtccctggttctgaacactctggggttctcgggtgcaggccgccatgagcaaacggaaggcgccgcaggagactctcaacgggggaatcaccgacatgctcacagaactcgcaaactttgagaagaacgtgagccaagctatccacaagtacaatgcttacagaaaagcagcatctgttatagcaaaatacccacacaaaataaagagtggagctgaagctaagaaattgcctggagtaggaacaaaaattgctgaaaagattgatgagtttttagcaactggaaaattacgtaaactggaaaagattcggcaggatgatacgagttcatccatcaatttcctgactcgagttagtggcattggtccatctgctgcaaggaagtttgtagatgaaggaattaaaacactagaagatctcagaaaaaatgaagataaattgaaccatcatcagcgaattgggctgaaatattttggggactttgaaaaaagaattcctcgtgaagagatgttacaaatgcaagatattgtactaaatgaagttaaaaaagtggattctgaatacattgctacagtctgtggcagtttcagaagaggtgcagagtccagtggtgacatggatgttctcctgacccatcccagcttcacttcagaatcaaccaaacagccaaaactgttacatcaggttgtggagcagttacaaaaggttcattttatcacagataccctgtcaaagggtgagacaaagttcatgggtgtttgccagcttcccagtaaaaatgatgaaaaagaatatccacacagaagaattgatatcaggttgatacccaaagatcagtattactgtggtgttctctatttcactgggagtgatattttcaataagaatatgagggctcatgccctagaaaagggtttcacaatcaatgagtacaccatccgtcccttgggagtcactggagttgcaggagaacccctgccagtggatagtgaaaaagacatctttgattacatccagtggaaataccgggaacccaaggaccggagcgaatgaggcctgtatcctccctggcagacacaacccaataggagtcttaatttatttcttaacctttgctatgtaagggtctttggtgtttttaaatgattgtttcttcttcatgcttttgcttgcaatgtagtcaataaaacc

SEQ ID NO: 961 - protein, 335 aa, Homo sapiens
MSKRKAPQETLNGGITDMLTELANFEKNVSQAIHKYNAYRKAASVIAKYPHKIKSGAEAKKLPGVGTKIAEKIDEFLATGKLRKLEKIRQDDTSSSINFLTRVSGIGPSAARKFVDEGIKTLEDLRKNEDKLNHHQRIGLKYFGDFEKRIPREEMLQMQDIVLNEVKKVDSEYIATVCGSFRRGAESSGDMDVLLTHPSFTSESTKQPKLLHQVVEQLQKVHFITDTLSKGETKFMGVCQLPSKNDEKEYPHRRIDIRLIPKDQYYCGVLYFTGSDIFNKNMRAHALEKGFTINEYTIRPLGVTGVAGEPLPVDSEKDIFDYIQWKYREPKDRSE

SEQ ID NO: 962 - DNA, 835 bp, Homo sapiens
cagacgacgtgctgagctgccagcttagtggaagctctgctctgggtggagagcagcctcgctttggtgacgcacagtgctgggaccctccaggagccccgggattgaaggatggtggcggccgtcctgctggggctgagctggctctgctctcccctgggagctctggtcctggacttcaacaacatcaggagctctgctgacctgcatggggcccggaagggctcacagtgcctgtctgacacggactgcaataccagaaagttctgcctccagccccgcgatgagaagccgttctgtgctacatgtcgtgggttgcggaggaggtgccagcgagatgccatgtgctgccctgggacactctgtgtgaacgatgtttgtactacgatggaagatgcaaccccaatattagaaaggcagcttgatgagcaagatggcacacatgcagaaggaacaactgggcacccagtccaggaaaaccaacccaaaaggaagccaagtattaagaaatcacaaggcaggaagggacaagagggagaaagttgtctgagaacttttgactgtggccctggactttgctgtgctcgtcatttttggacgaaaatttgtaagccagtccttttggagggacaggtctgctccagaagagggcataaagacactgctcaagctccagaaatcttccagcgttgcgactgtggccctggactactgtgtcgaagccaattgaccagcaatcggcagcatgctcgattaagagtatgccaaaaaatagaaaagctataaatatttcaaaataaagaagaatccacattgcaaaaaaaaaaaaaaaaaa

SEQ ID NO: 963 - protein, 224 aa, Homo sapiens
MVAAVLLGLSWLCSPLGALVLDFNNIRSSADLHGARKGSQCLSDTDCNTRKFCLQPRDEKPFCATCRGLRRRCQRDAMCCPGTLCVNDVCTTMEDATPILERQLDEQDGTHAEGTTGHPVQENQPKRKPSIKKSQGRKGQEGESCLRTFDCGPGLCCARHFWTKICKPVLLEGQVCSRRGHKDTAQAPEIFQRCDCGPGLLCRSQLTSNRQHARLRVCQKIEKL

SEQ ID NO: 964 - DNA, 639 bp, Homo sapiens
atgcaggaccccaacgcagacacaattctttcagactttccttggcagtcagtggtaaaaacatatgaagatatgactttgaagagctggagggttgtgaagacgaatgtaatgagaagaatgaacatgctattgaaatgtacagaaagcagagactgggtgagtggaaagtaattaaactgaagaataaatgtggagaagtcttcgaggtctcaggaaaggattatgttcaagaagttacctggtgagggtttgtgggtcatcttgcacctttacaaacaaggacttcccctctgtgccttgatcaaacagcacctcagtggacttgccaggaagtttcctgatgtcaaattaatcaaagccatttcaacaacaacctgcacacccaattatcctgataggaatctgcccacgaaatttgtttacctggaaggagatatcaagcctcagtttatccgtcctctggtgtttggcggcatgaacctgacaagagatgagttggagtggaaactgtctcaatctggagaaattaacacagacttggaggaaaaccctaagaaaccaactgaagatgtgttgctgtccttagtgtggtgctctgtcctcatgaagagggacagtgattccaagggtgactga

SEQ ID NO: 965 - DNA, 1148 bp, Homo sapiens
gctcggtcgggcgctgtctccctcggctctgcgggtgtcagttcgtccggcttcctcacagcccctcactcccggcggctgacagcagcagcggcggcggcgggcggcgcctggcgtttcgaggctgagcggcaccggggttggggcgcggaggaggagcagcagcgggaggaggagccgtgtgccctggcactgagcggccgcggccatggcgtacgcctatctcttcaagtacatcataatcggcgacacaggtgttggtaaatcatgcttattgctacagtttacagacaagaggtttcagccagtgcatgaccttactattggtgtagagttcggtgctcgaatgataactattgatgggaaacagataaaacttcagatatgggatacggcagggcaagaatcctttcgttccatcacaaggtcgtattacagaggtgcagcaggagctttactagtttacgatattacacggagagatacattcaaccacttgacaacctggttagaagatgcccgccagcattccaattccaacatggtcattatgcttattggaaataaaagtgatttagaatctagaagagaagtaaaaaaagaagaaggtgaagcttttgcacgagaacatggactcatcttcatggaaacgtctgctaagactgcttccaatgtagaagaggcatttattaatacagcaaaagaaatttatgaaaaaattcaagaaggagtctttgacattaataatgaggcaaatggcattaaaattggccctcagcatgctgctaccaatgcaacacatgcaggcaatcagggaggacagcaggctgggggcggctgctgttgagtctgtttttactgtctagctgcccaacggggcctactcacttattctttcaccccctctcctcctgctcagctgagacatgaaactatttgaaatggctttatgtcacagaagactttaatccgtcaaattcttgtataactttgaataaatggttaatgttcacttaaaagacagattttggagattgtattcatatctatttgcatttgatttctaggtcaattgatgtgattatttttgttaaatgttgtcttgtgcccttaactacgaactgaattgtattaaacactacaaagtc

SEQ ID NO: 966 - protein, 212 aa, Homo sapiens
MAYAYLFKYIIIGDTGVGKSCLLLQFTDKRFQPVHDLTIGVEFGARMITIDGKQIKLQIWDTAGQESFRSITRSYYRGAAGALLVYDITRRDTFNHLTTWLEDARQHSNSNMVIMLIGNKSDLESRREVKKEEGEAFAREHGLIFMETSAKTASNVEEAFINTAKEIYEKIQEGVFDINNEANGIKIGPQHAATNATHAGNQGGQQAGGGCC

SEQ ID NO: 967 - DNA, 10469 bp, Homo sapiens
gcggcggcggcagcggcggcggcggcggcggcgcgggggttgagtcgtggtggtgcggacgcgctcgtgctcgggaactatcggattaaacttgaatcgagtgaaattacacaaaggagcgccgcggaggaggcggcccggggacccggacaccctgaaactcaccagagacccgttcgcccccggccaactccgtgcccgtggattcagccccctggccgcagctgccgagccaactccggagcccgctctgcgttttgttttcccctcggcactaggcagcggaggagcccgaccgacccggacctatatccagactttgcctgacactgcagggtccaagagaattaaagaaatatggaatgacatgaagaagattagttaaggattataggctttgagggcaaacacctcagtgaagtgaagcacaggcaagctcctgagctgtggtttggaggagccgtgtgttggaagaagatggcagatccaggaatgatgagtctttttggcgaggatgggaatattttcagtgaaggtcttgaaggcctcggagaatgtggttacccggaaaatccagtaaatcctatgggtcagcaaatgccaatagaccaaggctttgcctctttacagccatcccttcatcatccttcaactaatcaaaatcaaacaaagctgacacattttgatcactataatcagtatgaacaacaaaagatgcatctgatggatcagccgaacagaatgatgagcaacacccctgggaacggactcgcgtctccgcactcgcagtatcacacccctcccgttcctcaggtgccccatggtggcagtggtggcggtcagatgggtgtctaccctggcatgcagaatgagaggcatgggcaatcctttgtggacagcagctccatgtggggccccagggctgttcaggtaccagaccagatacgagccccctaccagcagcagcagccacagccgcagccaccgcagccggctccgtcggggccccctgcacagggccaccctcagcacatgcagcagatgggcagctatatggcacgtggggatttttccatgcagcagcatggtcagccacagcagaggatgagccagttttcccaaggccaagagggcctcaatcagggaaatccttttattgccacctcaggacctggccacttgtcccacgtgccccagcagagtcccagcatggcaccttccttgcgtcactcggtgcagcagttccatcaccacccctctactgctctccatggagaatccgttgcccacagtcccagattctccccgaatcctccccaacaaggggctgttaggccgcaaacccttaactttagttctcggagccagacagtcccctctcctactataaacaactcagggcagtattctcgatatccttacagtaacctaaatcagggattagttaacaatacagggatgaatcaaaatttaggccttacaaataatactccaatgaatcagtccgtaccaagataccccaatgctgtaggattcccatcaaacagtggtcaaggactaatgcaccagcagcccatccaccccagtggctcacttaaccaaatgaacacacaaactatgcatccttcacagcctcagggaacttatgcctctccacctcccatgtcacccatgaaagcaatgagtaatccagcaggcactcctcctccacaagtcaggccgggaagtgctgggataccaatggaagttggcagttatccaaatatgccccatcctcagccatctcaccagccccctggtgccatgggaatcggacagaggaatatgggccccagaaacatgcagcagtctcgtccatttataggcatgtcctcggcaccaagggaattgactgggcacatgaggccaaatggttgtcctggtgttggccttggagacccacaagcaatccaggaacgactgatacctggccaacaacatcctggtcaacagccatcttttcagcagttgccaacctgtcctccactgcagcctcacccgggcttgcaccaccagtcttcacctccacaccctcatcaccagccttgggcacagctccacccatcaccccagaacaccccgcagaaagtgcctgtgcatcagcattccccgtcggagccctttctagagaaaccagtgccggatatgactcaggttagtggaccgaatgctcagctagtgaagagtgatgattacctgccatcaatagaacagcagccacaacaaaagaagaagaaaaagaaaaacaaccacattgtagcagaggatcccagtaaaggttttggtaaagatgacttccctggtggggtagataaccaagaactaaataggaactcactggatgggtcccaagaagaaaaaaagaaaaagaaaaggtcaaaggcaaaaaaagacccgaaggaaccgaaagaacccaaggagaaaaaagagcccaaggaacccaagaccccgaaagcccctaagattcccaaagagccaaaggaaaagaaagcaaaaactgccacgccaaaacccaaatccagcaaaaagtcaagtaataagaaacctgactcagaagcaagtgctttgaagaaaaaggtcaacaagggaaaaacagaaggttctgaaaattcagacttagacaaaacacccccaccatctcctcctcctgaagaagatgaggacccaggtgttcagaagagacggtccagcagacaggtgaagagaaagcgctacactgaagacctggagttcaagatttctgatgaggaggcagatgatgcagatgctgctgggagggattccccctccaacacctcccagtcagaacagcaggaatctgttgatgcagaaggcccagtggtagaaaaaattatgagcagtcgttcagtaaaaaagcagaaggaatctggagaggaggtagaaattgaggaattctatgtgaaatacaaaaacttctcttatcttcattgtcagtgggcatctatagaagatctggaaaaagataagagaattcagcaaaaaattaaacgatttaaggcaaagcagggccagaacaagttcctttcagagattgaggatgagctttttaatccagattatgtggaggttgaccggataatggactttgcacgtagcacagatgaccggggagagcctgtgactcactatctggtgaagtggtgttcacttccttatgaagacagcacgtgggagcggaggcaggacatagatcaagcaaagatcgaggagtttgagaaactaatgtccagggagccggaaacagagcgtgtggagcgacctcctgctgatgattggaagaaatcggagagttccagggagtataaaaacaataacaaactcagggaataccagttggagggagtaaactggctacttttcaattggtacaacatgcgaaactgcattttagcagatgaaatgggtttgggaaaaactatccagtccattacatttctctatgagatatatttgaaaggaatccatggcccttttttagtaattgccccattgtccacaatccccaactgggaaagggaattccgaacctggacagagttgaacgtggttgtgtatcatgggagtcaagctagtcgtcggaccattcagttgtatgaaatgtacttcaaagatccccagggtcgagtgataaaggggtcctataagtttcatgccatcatcactacatttgagatgattttgactgattgtcctgagctgcggaatattccatggcgctgtgtagtcattgatgaagcccacaggctgaagaacaggaactgcaagctgttggagggactcaagatgatggacttggaacacaaagtgctgctgacgggaaccccactccagaacactgtggaagaactcttcagcttgcttcatttcttggaaccaagtcgcttcccttcagaaaccacatttatgcaagaatttggtgatctaaaaacagaagagcaggtgcaaaaacttcaagctattctaaagccaatgatgttgagacgtctcaaagaggatgtagaaaagaacttggcccccaaagaagaaactattattgaagttgagctaacaaacattcagaagaaatattaccgagccatccttgagaagaatttcacatttctttccaaaggcggtggtcaagctaacgtacctaacctattaaacactatgatggaattgcggaagtgctgcaatcatccgtaccttatcaatggtgctgaagagaaaattttggaagagtttaaagaaacacacaatgcagagtctccagattttcagctccaggcaatgatccaggctgctggcaagctagtgctgattgacaagctgctgccaaaactgaaggctggtggccacagggtgcttatcttttcccagatggtgcgctgcttggacatactggaagactacctcattcaaagacggtacccatatgaaaggatcgacggccgagtaagaggcaacctccgccaggcagctatcgacagattctccaaacctgattctgataggtttgttttcctcctgtgtacaagggcaggaggtttaggcattaacctcactgctgctgatacctgcatcatctttgattcagactggaatccccaaaatgacctccaggctcaggctagatgtcatagaataggacagagcaaatctgtgaaaatctacaggctgattacaagaaattcctatgaaagggaaatgttcgacaaggctagtttgaaactgggcctggataaagctgtgctacagtctatgagtggaagagaaaatgctaccaatggggtacaacagctttccaagaaagaaatagaggatcttctacgaaaaggggcctatggtgcactcatggatgaggaggatgaagggtctaaattctgtgaagaagatattgatcagatcctcctacgtcgaacccacaccattaccattgagtcagaagggaaaggttccacatttgctaaggccagttttgttgcatctggaaataggacagatatttccttggatgatccaaatttctggcaaaagtgggctaagaaggctgaattggatattgatgccttaaatgggaggaacaacctggttattgatactccaagagtgagaaagcagaccaggctctacagtgcagtgaaggaagatgagctgatggagttctcagacttggaaagtgattctgaagaaaagccctgtgcaaagccacggcgtccccaggataagtcacagggctatgcaaggagtgaatgtttcagggtggagaagaatctgcttgtctatggttggggacggtggacagacattctttcccacggacgctataaacgccaactcactgagcaagatgtagaaaccatctgcagaaccatcctggtgtactgtcttaatcattacaaaggggatgagaatatcaaaagcttcatctgggatctgatcacacccacagcggatggccagactcgagccttggtcaaccattccggtttgtcagctcctgtgccaaggggaaggaagggaaagaaggtgaaagcccagagcacacagccggtggtgcaggatgccgactggctggccagctgcaacccagatgccctgttccaggaggacagctacaagaaacacctgaagcatcactgtaacaaggtcctgctgcgtgtccgcatgctgtactacctaagacaagaagtgataggagaccaggcggataagatcttagagggtgctgactcaagtgaagccgatgtgtggatccctgaacctttccatgctgaagttcctgcagattggtgggataaggaagcagacaaatccctcttaattggagtgttcaaacatggctatgagaagtacaactccatgcgagctgaccccgcgctgtgctttctggaacgagtcggtatgcctgatgccaaggccatagctgccgagcaaagaggaacagacatgctagcagatggtggtgacgggggagaatttgatagagaagatgaagacccagaatataaaccaaccagaacaccgttcaaagatgaaatagatgaatttgcaaattctccttcagaggataaggaagaatccatggaaatacatgccacaggcaagcacagtgagagtaatgctgagttaggccaactttactggcctaacacttcaaccctgactacacgtctgcgccggctcattactgcctatcagcgcagctataaaaggcaacagatgaggcaagaggccctaatgaagactgaccggcgcagacggcggcctcgagaggaagtgagagctctggaagcggaaagggaagctattatatctgagaagcggcaaaagtggacaagaagagaagaggctgatttttaccgtgtggtatccacctttggggttatttttgaccctgtgaaacagcaatttgactggaaccaatttagagcctttgccaggcttgacaaaaaatctgatgagagtttggagaaatacttcagttgttttgtggccatgtgtaggcgagtatgtcgaatgcccgtcaagccagatgatgaaccgcccgacctctcctccataattgagccgatcacagaggagcgagcctctcgaactctgtaccgcattgagctgctacggaagatccgcgagcaggttctccatcacccccagctgggagagaggcttaagctctgccagccaagcttggatctgccagagtggtgggagtgtggacggcatgaccgagacttgctggttggtgctgctaaacacggggtcagtcggacggattatcacatcctcaatgaccctgagttatccttcttggatgcacataaaaactttgctcaaaacagaggggcaggtaatacatcttccttgaacccactggcagttggatttgtccagactcctccagtcatctcatctgctcatattcaagatgagagggtactggaacaagccgaaggcaaagtggaggagcctgaaaacccagctgccaaggagaaatgtgagggcaaagaagaggaagaagaaaccgatggcagcgggaaggagagcaagcaggaatgtgaggcagaggccagctctgtgaaaaatgaactgaaaggtgttgaggtcggcgcagacactgggtccaaatctatttcagagaaaggttccgaagaggatgaagaggaaaagctggaggatgacgataagtcggaagagtcttcccagcccgaagcaggagctgtctctagagggaagaattttgatgaagaaagcaatgcttccatgagcactgctagagatgaaacccgagatggattctacatggaggacggagatccttcagtagctcagctccttcatgaaagaacatttgccttctcgttttggcctaaggatagagtaatgataaaccgcttagacaacatctgtgaagcagtgttgaaaggcaaatggccagtaaataggcgccagatgtttgatttccaaggcctcatcccaggttacacacccaccacagtggacagccccttgcagaagaggagctttgctgagctctccatggtcggccaagccagcattagtgggagtgaggacatcactacgtctcctcagttgtcaaaggaagatgccctcaacctctctgtccctcgccagcggaggaggaggaggagaaaaatcgaaattgaggccgaaagagctgccaagaggcgaaatctcatggagatggttgcccagcttcgagagtctcaggtggtctcagaaaatggacaagaaaaagttgtagatttatcaaaggcctcaagagaggcaacaagctctacctcaaatttttcatctctttcttcaaagtttatcttgcctaatgtctcaacaccagtgtctgatgcctttaagactcaaatggaactgctccaagcaggcctttcgcgcacacccacaaggcatctccttaatggctccctagtggatggagagcctcccatgaagaggaggcggggaaggaggaaaaatgtggagggacttgatctgcttttcatgagccacaaacggacgtcattgagtgcagaggatgctgaggtgaccaaagcttttgaagaagatatagagaccccaccaacaagaaacattccttctcccggacagctggacccagacacacggatccctgttatcaatcttgaagatgggactaggctggtgggggaagatgctcctaaaaataaggatttagttgaatggctgaagctgcaccctacttacactgttgatatgccaagttatgtaccaaagaatgcagatgtgctgttttcctcatttcagaaaccgaaacagaaacgacatagatgtcgaaaccctaataaattggatataaacactttgacaggagaagaaagggtgcctgttgtcaataaacgaaatgggaagaagatgggtggagctatggcgcctccaatgaaggatctacccaggtggctggaagaaaatcctgaatttgcagttgctccagactggactgatatagttaagcagtctggttttgttcctgagtcgatgtttgaccgccttctcactgggcctgtagtgcggggagagggagcgagcagaagaggaagaaggcccaaaagtgagatcgccagagcagccgcggccgccgctgctgtggcctccacgtcagggatcaaccctttgctggtgaacagcctgtttgctggaatggacctgacgagccttcagaatctccagaatctccagtcgctccagctggcaggcctcatgggcttccctccaggactggcaacagctgccaccgccggaggcgatgcgaagaaccctgctgctgtgctgcccctgatgctgccaggaatggcgggcctgcccaacgtgtttggcttgggcgggctgttgaataaccctctgtcagctgctactggaaacaccactactgcttctagtcaaggagaaccggaagacagcacttcaaaaggagaggagaaaggaaatgagaatgaagacgagaacaaagactctgagaaaagcacagatgctgtttcggctgctgactctgcgaatggatctgttggtgctgctactgccccggctggattgccctcaaacccgctagccttcaaccctttcctcctgtccacaatggccccgggcctcttctacccatccatgtttctacctccaggactggggggattgacgctgcctgggttcccagcattggcaggacttcagaatgccgtgggctccagcgaagaaaaggctgctgacaaggctgagggaggaccctttaaagatggagagacccttgaaggcagcgatgccgaggagagcctggataagactgcagagtcctccctcttagaagacgaaatagcacagggtgaagagctagactcacttgatgggggggatgaaatagaaaacaatgaaaatgatgaataaccagtaccagttccagttcaagtgtttaaaacttttgacaagtggtagtcctactgtttacactcacagttaatgttcatacctagttttataagctgttctgtaacatagtgtagcaaaaaaaaaagttcaagtcatgttatacaggtgtgtcaaaaggtatcttggtcattaagtattgtgcagtgcattatttattatccctaggagagatgaaatttgagaggtgatcatgtctttttaaggaaacttacataatgctctgctttttttttttctcttggtaccattggtattataataaagagcaatttgtaactgagtggcactaatggaagaaagtgctgctcaaaggaagtatgaagttatatatttaattttttaattttaatttttaatttttttgctgtgaaggtcaagctgaaatttaccatacatatcatacttgctcatttgtttccctttttgactgtatgggggttcccacactcgtgcatacacacacatccatacactctgacaatctccacgctagtgtgaacgcctctgtcccgaggcgcagcaataataaggcagctgttgaatgtgaagggtccctttggaaaattaacctactgggagggttcttgccagacagaactacagttccattgtctcgtggtcttgtaatgcactggtaaaaacaaaataaatagatgaataaataaagagtgagagaagagagaatcaggtaccttttttaaattaaaggactttgttactttagccacaaagctaaaacagcattacctcagctctaaactagccttgaagtttacagacatgactttgtaaatgtattgtttttctttgttgtgatgtccttttatttttttctttgaaaactgctatcatgtaagataaaatgtaaattgctgccaactgtagtaatgatgcttttaataaaagtgacccatgatatgcagagatgtaaaaaaaaaaaaaaaaaaaaaaaaaaa

SEQ ID NO: 968 - protein, 2997 aa, Homo sapiens
MADPGMMSLFGEDGNIFSEGLEGLGECGYPENPVNPMGQQMPIDQGFASLQPSLHHPSTNQNQTKLTHFDHYNQYEQQKMHLMDQPNRMMSNTPGNGLASPHSQYHTPPVPQVPHGGSGGGQMGVYPGMQNERHGQSFVDSSSMWGPRAVQVPDQIRAPYQQQQPQPQPPQPAPSGPPAQGHPQHMQQMGSYMARGDFSMQQHGQPQQRMSQFSQGQEGLNQGNPFIATSGPGHLSHVPQQSPSMAPSLRHSVQQFHHHPSTALHGESVAHSPRFSPNPPQQGAVRPQTLNFSSRSQTVPSPTINNSGQYSRYPYSNLNQGLVNNTGMNQNLGLTNNTPMNQSVPRYPNAVGFPSNSGQGLMHQQPIHPSGSLNQMNTQTMHPSQPQGTYASPPPMSPMKAMSNPAGTPPPQVRPGSAGIPMEVGSYPNMPHPQPSHQPPGAMGIGQRNMGPRNMQQSRPFIGMSSAPRELTGHMRPNGCPGVGLGDPQAIQERLIPGQQHPGQQPSFQQLPTCPPLQPHPGLHHQSSPPHPHHQPWAQLHPSPQNTPQKVPVHQHSPSEPFLEKPVPDMTQVSGPNAQLVKSDDYLPSIEQQPQQKKKKKKNNHIVAEDPSKGFGKDDFPGGVDNQELNRNSLDGSQEEKKKKKRSKAKKDPKEPKEPKEKKEPKEPKTPKAPKIPKEPKEKKAKTATPKPKSSKKSSNKKPDSEASALKKKVNKGKTEGSENSDLDKTPPPSPPPEEDEDPGVQKRRSSRQVKRKRYTEDLEFKISDEEADDADAAGRDSPSNTSQSEQQESVDAEGPVVEKIMSSRSVKKQKESGEEVEIEEFYVKYKNFSYLHCQWASIEDLEKDKRIQQKIKRFKAKQGQNKFLSEIEDELFNPDYVEVDRIMDFARSTDDRGEPVTHYLVKWCSLPYEDSTWERRQDIDQAKIEEFEKLMSREPETERVERPPADDWKKSESSREYKNNNKLREYQLEGVNWLLFNWYNMRNCILADEMGLGKTIQSITFLYEIYLKGIHGPFLVIAPLSTIPNWEREFRTWTELNVVVYHGSQASRRTIQLYEMYFKDPQGRVIKGSYKFHAIITTFEMILTDCPELRNIPWRCVVIDEAHRLKNRNCKLLEGLKMMDLEHKVLLTGTPLQNTVEELFSLLHFLEPSRFPSETTFMQEFGDLKTEEQVQKLQAILKPMMLRRLKEDVEKNLAPKEETIIEVELTNIQKKYYRAILEKNFTFLSKGGGQANVPNLLNTMMELRKCCNHPYLINGAEEKILEEFKETHNAESPDFQLQAMIQAAGKLVLIDKLLPKLKAGGHRVLIFSQMVRCLDILEDYLIQRRYPYERIDGRVRGNLRQAAIDRFSKPDSDRFVFLLCTRAGGLGINLTAADTCIIFDSDWNPQNDLQAQARCHRIGQSKSVKIYRLITRNSYEREMFDKASLKLGLDKAVLQSMSGRENATNGVQQLSKKEIEDLLRKGAYGALMDEEDEGSKFCEEDIDQILLRRTHTITIESEGKGSTFAKASFVASGNRTDISLDDPNFWQKWAKKAELDIDALNGRNNLVIDTPRVRKQTRLYSAVKEDELMEFSDLESDSEEKPCAKPRRPQDKSQGYARSECFRVEKNLLVYGWGRWTDILSHGRYKRQLTEQDVETICRTILVYCLNHYKGDENIKSFIWDLITPTADGQTRALVNHSGLSAPVPRGRKGKKVKAQSTQPVVQDADWLASCNPDALFQEDSYKKHLKHHCNKVLLRVRMLYYLRQEVIGDQADKILEGADSSEADVWIPEPFHAEVPADWWDKEADKSLLIGVFKHGYEKYNSMRADPALCFLERVGMPDAKAIAAEQRGTDMLADGGDGGEFDREDEDPEYKPTRTPFKDEIDEFANSPSEDKEESMEIHATGKHSESNAELGQLYWPNTSTLTTRLRRLITAYQRSYKRQQMRQEALMKTDRRRRRPREEVRALEAEREAIISEKRQKWTRREEADFYRVVSTFGVIFDPVKQQFDWNQFRAFARLDKKSDESLEKYFSCFVAMCRRVCRMPVKPDDEPPDLSSIIEPITEERASRTLYRIELLRKIREQVLHHPQLGERLKLCQPSLDLPEWWECGRHDRDLLVGAAKHGVSRTDYHILNDPELSFLDAHKNFAQNRGAGNTSSLNPLAVGFVQTPPVISSAHIQDERVLEQAEGKVEEPENPAAKEKCEGKEEEEETDGSGKESKQECEAEASSVKNELKGVEVGADTGSKSISEKGSEEDEEEKLEDDDKSEESSQPEAGAVSRGKNFDEESNASMSTARDETRDGFYMEDGDPSVAQLLHERTFAFSFWPKDRVMINRLDNICEAVLKGKWPVNRRQMFDFQGLIPGYTPTTVDSPLQKRSFAELSMVGQASISGSEDITTSPQLSKEDALNLSVPRQRRRRRRKIEIEAERAAKRRNLMEMVAQLRESQVVSENGQEKVVDLSKASREATSSTSNFSSLSSKFILPNVSTPVSDAFKTQMELLQAGLSRTPTRHLLNGSLVDGEPPMKRRRGRRKNVEGLDLLFMSHKRTSLSAEDAEVTKAFEEDIETPPTRNIPSPGQLDPDTRIPVINLEDGTRLVGEDAPKNKDLVEWLKLHPTYTVDMPSYVPKNADVLFSSFQKPKQKRHRCRNPNKLDINTLTGEERVPVVNKRNGKKMGGAMAPPMKDLPRWLEENPEFAVAPDWTDIVKQSGFVPESMFDRLLTGPVVRGEGASRRGRRPKSEIARAAAAAAAVASTSGINPLLVNSLFAGMDLTSLQNLQNLQSLQLAGLMGFPPGLATAATAGGDAKNPAAVLPLMLPGMAGLPNVFGLGGLLNNPLSAATGNTTTASSQGEPEDSTSKGEEKGNENEDENKDSEKSTDAVSAADSANGSVGAATAPAGLPSNPLAFNPFLLSTMAPGLFYPSMFLPPGLGGLTLPGFPALAGLQNAVGSSEEKAADKAEGGPFKDGETLEGSDAEESLDKTAESSLLEDEIAQGEELDSLDGGDEIENNENDE

SEQ ID NO: 969 - DNA, 699 bp, Homo sapiens
atgctgggctggcgacccacgcttgcatgcgttgggggaaagcaaagacccttaggcccgaggcagctgtttcctcagaagctgtgggtccgctcgggtggtcccggggcgaggtccctgaagaggcgaggcggctggagcggcccaggcccaagcaggcctggtcgtctccctgcgacctcgcctcgccccgctgcccccaccggcaccccctgccccaagcccgtcctgcggaagtcggctcctctggccgaggcagaaactagaaagcctgccccgggccaggtgcaggaaagcaaagcagaagtaagtctcgggccgcagatgcggccctggcgggcagggcctcggcgcccattcccgccgcgacctcgcccggctgcgtacgccaaggagcgcaggatagaggcgctggtgtctgcggggccgccccgggctcggagagcggaggagcagggaaaggctcggggaaggaatgttaaagggggacactggcagcgacggcgcgctccgcccgcccgcggactagccggacccgccacttcccagccggccgcgaggagctgcgggccgggccggcagcccctcggccgcgaagcccgcgccaccccggtaaccccggcgaggaaacgcgctctttcctttttcttctcccctcccccctcccctttctccctagaggcagctcccgtcctctaa

SEQ ID NO: 970 - protein, 232 aa, Homo sapiens [sequence omitted]

SEQ ID NO: 971 - DNA, 261 bp, Homo sapiens
atgagtcctcctccccctgagctgccctcagttcgccgcccgccgccgcctcctcctctttgtgtccttcctcctcttcttcttctcgctgctccgagagctgtcaaggcttggtcggggagctctgggcggcaggctgggaccgggcaggcaggcgcagtgcacgcttcacgccgcccaccaggctccgcggcctgcgtggcgcccacgccctcgcccctcgcccctcgccccacgcccctcgctgggggctcagcctag

SEQ ID NO: 972 - protein, 86 aa, Homo sapiens
MSPPPPELPSVRRPPPPPPLCVLPPLLLLAAPRAVKAWSGSSGRQAGTGQAGAVHASRRPPGSAACVAPTPSPLAPRPTPLAGGSA

SEQ ID NO: 973 - DNA, 2230 bp, Homo sapiens
ggcggggagggggcagtccacgaacttttgtcattcagcctgggagaccacggtgacattcctgtctgcgctgcgggcaggccagcctctccggccctggactagggggcgccgccgagagaagccgccgcaggctgcagagtcgccgaccgcgctgttcgcaggcagaccccgggctgcccaccgcggcctagcgcgcgccggatggcaggagaagtgtccgcggccacgggccgcttttcgctggagcggttgggcctcccgggcctggccctcgccgcggccctgctgctcctggccctctgcttgcttgtccggcgcaccaggagacccggtgagcctccattgataaaaggttggcttccttatcttggagtggtcctgaacttacgaaaagaccccttaaggttcatgaaaacacttcaaaagcaacatggtgacactttcacagttcttcttggtggaaagtacataacatttatcctggaccccttccagtaccagctagtgataaaaaatcataaacaattaagctttcgagtattttctaataaattattagagaaagcatttagcatcagtcagttgcaaaaaaatcatgacatgaatgatgagcttcacctctgctatcaatttttgcaaggcaaatctttggacatactcttggaaagcatgatgcagaatctaaaacaagtttttgaaccccagctgttaaaaaccacaagttgggacacggcagaactgtatccattctgcagctcaataatatttgagatcacatttacaactatatatggaaaagttattgtttgtgacaacaacaaatttattagtgagctaagagatgattttttaaaatttgatgacaagtttgcatatttagtatccaacatacccattgagcttctaggaaatgtcaagtctattagagagaaaattataaaatgcttctcatcagaaaagttagccaagatgcaaggatggtcagaagtttttcaaagcaggcaagatgtcctggagaaatattatgtgcacgaggaccttgaaataggagcacatcatttaggctttctctgggcctctgtggcaaacactattccaactatgttctgggcaatgtattatcttctgcggcacccagaagctatggcagcagtgcgtgacgaaattgaccgtttgctgcagtcaacaggtcaaaagaaagggtctggatttcccatccacctcaccagagaacaattggacagcctaatctgcctagaaagcagcatttttgaagctttacgactgtcctcatattcaaccaccattcgttttgttgaggaggatttgactctcagttcagagaccggggactactgtgtgcgaaagggagacttggtagccatctttcctccagtcctacatggtgaccctgaaatctttgaagctccagaggagtttagatatgatcgttttatagaagatggtaagaagaaaaccacctttttcaaaagagggaaaaagctgaagtgttacctaatgccgtttggaactggaaccagcaaatgtccaggccgattttttgcacttatggaaataaaacaattgttggttatacttttaacttattttgatttagaaataattgatgataagcccataggactaaactacagccgcttgttgtttggtattcagtatccagattctgatgttttatttagatacaaagtgaaatcttagagaagctaaaaggaaagaaaataaatctatcaaaattaccctaaacatcctaagctcatctatttctttttaatttctgcaaagtaattgatttatttgtttaaaaagcgctaatttctatttgatctgatatcagtccagtttgtccttagtcacaaagcccatataatataaaacaggatggtggcaggaaaatggacatcaaaatcaacttaagggtaggctcaaaacagggttgttgttgtttttttagtttctccttgttgtgattttcacctgttataataaatgtaccttcacaccaatagattgggcactgtggaatttaaatcactcaaattgttctctaatatgtaaaattacactttgaactactagaaaattgtgctggaaatggacacagtctaacaaattccaaattctcacagaagaaggaaattgaatttccatgagttacactggatgaaaatgtttcccttaagcatatattaataatacctatatc

SEQ ID NO: 974 - protein, 506 aa, Homo sapiens
MAGEVSAATGRFSLERLGLPGLALAAALLLLALCLLVRRTRRPGEPPLIKGWLPYLGVVLNLRKDPLRFMKTLQKQHGDTFTVLLGGKYITFILDPFQYQLVIKNHKQLSFRVFSNKLLEKAFSISQLQKNHDMNDELHLCYQFLQGKSLDILLESMMQNLKQVFEPQLLKTTSWDTAELYPFCSSIIFEITFTTIYGKVIVCDNNKFISELRDDFLKFDDKFAYLVSNIPIELLGNVKSIREKIIKCFSSEKLAKMQGWSEVFQSRQDVLEKYYVHEDLEIGAHHLGFLWASVANTIPTMFWAMYYLLRHPEAMAAVRDEIDRLLQSTGQKKGSGFPIHLTREQLDSLICLESSIFEALRLSSYSTTIRFVEEDLTLSSETGDYCVRKGDLVAIFPPVLHGDPEIFEAPEEFRYDRFIEDGKKKTTFFKRGKKLKCYLMPFGTGTSKCPGRFFALMEIKQLLVILLTYFDLEIIDDKPIGLNYSRLLFGIQYPDSDVLFRYKVKS

SEQ ID NO: 975 - DNA, 2657 bp, Homo sapiens
gtcacctgggaagagtctgcagagcctttgcccgccagcgccttcgctctttggctccctgagttaatccggttgtttgcgatcgccgcggccggggctgcgaaccgaagggctcgctccgcgccgcctgggtctctacctcatccgtaggtgtggccctgatggtgtggcaggctctggactcctaaagctctggagcgaatttaagattttattcatgtgcatggcatagaagatgaattcttccacttccaccatgagtgaagagcctgacgctctatcggtagttaaccagttacgggatctagcagcagatccgttaaacagaagagccatcgtccaggatcagggatgtctgcctggccttattttatttatggaccatcccaaccctccagtcgtccactccgctttgcttgctcttcgatacttggcagaatgccgtgcaaacagagaaaagatgaaaggagaactgggtatgatgttgagcttacaaaatgttatacagaaaactacaactccaggagaaacaaaacttctggcctctgaaatctatgacattcttcagtcctccaatatggcagatggtgatagttttaatgagatgaattcacgtcgaaggaaagctcaattttttctgggaactacaaacaaacgtgccaaaacagtggttttgcatatagatggccttgatgatacgtctcggagaaatctatgtgaagaggctttgttaaaaattaaaggtgttattagctttacttttcaaatggctgttcaaaggtgtgtggtgcgaatccgttcagatttgaaagctgaggctttggcatcagcaatagcatcaaccaaggttatgaaagctcagcaagttgtgaaaagtgaaagtggagaagagatgttggtcccattccaagatactcctgtggaagttgaacagaacacagagctacctgactacctgcctgaggatgagagtcccacaaaggaacaggacaaagcggtgtcccgggtcggctcacacccagaaggtggagctagctggcttagcacagctgcaaactttttatccagatcattttattggtgacttcacttttgggctcaaggactgtgtgaaccaacaaggggccagttttccattgttgtggtgaactgtcaagtgcaatttgcaataagttatcatgaaaagtttttagattacacgatcgcatatgctgcatttcacattttattggacattttaccccactgagtggtaaaaaggacagaggctacagatggagttgctttgtttatgaaagtattttggtttgttttctttcatttaattgcctcatatttaaaaaccatgggtccactgttaaaaccacatgtgtatgtgcagctttacattttattttacgtgaagcatgtgattaggaaaactcattttcttttcaagcctcaggacctacctgaagagaagttttcttgtagctcaagttgtgcatgaattactgaatattttactgtgcttttcttcatgaagggtacatgctttgtactcttcactgaaagctgaaaacatttcttgttaccctcttttgtgcctttttattttgccaaccgtgtttatagaaaggacattactaatgacattttgcagattaaaaacattcatttgaacacagtagtcccctagaaaaacaactctacaaaaattttgcagccttattcattataattttgataaaattaacacaaaatcagtcaagaaggaaacatgtatattagtgaagtgtttttggagactgtttgaatgtgaccaaatgtggttctagttgacttcttttcactttggcttatatcaattcttgagagttaatgtgatcatgatattgcaaacaactataaatggtctctaggccttactttgtgattatacgttatctccggctagaaaaaaataatggtagtaaagaaactgacaaactgaaaataagaaaacaaaaatcaaatgcctataataccataatgccagtttggtatagagtccaactttaaaacatgaattgctcgacagagttctattcagtaggtgtttctttgtattgtcttttgtgaatttattatgaaaatgctgcgttgtgttgaatgaaaaagacccaaattactgcttatgaagaaataaagccagcattgatcacttaatcctgtttctcatgtccagccagaaaaaagaacttcagtgaaggtaagataaataaatacatacacatatgtttttttggtagataagtgctaattacatatatgtaatgctttattaaatttctgaaatatttggtaactaaaattttctttttggaaattaataaatccagatacatattaatgttgatatgagtaaaaacaaataggaagaaattgaaatttcttttcatcaacatgtagagctgctattttactatttggagaatatgatgtgaaaattggacctcaaagggtttccttgtgttttcattgtaaaataccatcatcagtgagagtcttgagttcactaacattgtcaccttctggagagagagttaatggggggcattgaggatgatatttttttacatgtgtttggtttctgattcaagtgacacgcacaaactgaaaaaaaaaaaaaaaaaaaa

SEQ ID NO: 976 - protein, 282 aa, Homo sapiens
MNSSTSTMSEEPDALSVVNQLRDLAADPLNRRAIVQDQGCLPGLILFMDHPNPPVVHSALLALRYLAECRANREKMKGELGMMLSLQNVIQKTTTPGETKLLASEIYDILQSSNMADGDSFNEMNSRRRKAQFFLGTTNKRAKTVVLHIDGLDDTSRRNLCEEALLKIKGVISFTFQMAVQRCVVRIRSDLKAEALASAIASTKVMKAQQVVKSESGEEMLVPFQDTPVEVEQNTELPDYLPEDESPTKEQDKAVSRVGSHPEGGASWLSTAANFLSRSFYW

SEQ ID NO: 977 - DNA, 2691 bp, Homo sapiens
agaagcctgaggagccggagagggtgctggctgccgcgcggccgagtgtgttttatggaccatgtgctgctatgtatgcctgaagaagtacttgaaatgcaaatttggggagactttgccatataaatgcttggctggattaagcgcctaattaggatggtttttcaacaagttggagtaagcatgcaatcggtactttggtctaggaagccatatggttcgtctcgaagtatcgtaaggaaaattggtactaatttgtctctgattcagtgtccaagagttcagtttcagattaacagccatgcaacagaatggagtcccagccacccaggagaggatgcagtggcgtcttttgctgatgttggatgggtagccaaagaagaaggagagtgttcagcaagactaaggacagaggtcagatcaaggccaccccttcaggatgaccttcttttctttgagaaggccccaagcagacagatttccttaccagacttgtctcaagaagagcctcagctgaagaccccagcgcgggcaaatgaggaagcactgcagaagatttgcgctctcgaaaatgaacttgctgctctcagagctcagattgccaaaattgtgacccagcaggagcagcaaaatctcactgcaggtgacttagattctaccacatttggtaccataccaccacaccctccacctcccccaccgcccctgcctccccctgcactggggctccaccaaagtacatctgctgttgatctgattaaagaacgaagagagaaaagagccaatgctggaaagactttggttaagaacaatccaaagaaacctgaaatgccaaatatgctagagatccttaaagagatgaacagtgtaaaacttcggtcagtgaagaggtcagagcaagatgtgaagcccaagccagtggatgctactgaccctgctgccctcatagcagaggctctgaaaaagaaatttgcttatcggtatcgaagtgatagccaagatgaagttgaaaaaggaattccaaagtctgaatcagaggccacctcagagagagtgttgtttgggccacacatgttgaagccaacaggaaaaatgaaggctttaattgaaaatgtatcagactcctaatagacaatgagctgcgaaaagactcctggttcccctgttgatttgtgagggccaagtttgctagtagaaatcgacactgtttagtaaatacctctttagtattcagtggtcttcttttcaggctaattagtggattaagcaataatgaaagcactaagtttggttttgcttttgtgagatggtcagctttggtgctctccacaacatgtgtgttctgacatgtttctaatatgtggccagggcgttcagatttccagttttgaaaacaattgtatagatttcacaacacaaaaaggacatttgtggatgttactgcacattttaaattcttaacactaatttatctgtataagtgttttatatgcatatttttggacataaacagtttatgtaaaattagtaatgaatgatggcaacgagggcactgttatcttcgtttgttttcaatgatcatttagcattcaatgatggaacagctggtataacataagttgttggcatgaaatatttgagattggaaacttcttgccttgaacagaacttatatcttagattctctctcacattttcttggagctggggtttgaataggaaccagatgatgttcactgctgaaattccataatgcttcccattgaagggaagttgagaaccaggaaagctgctttcacgtcattgccatccagtactgacagggaagaaagatgtagttttccagtagtgatgaatcaaattattgaattaaatttcttcttaagaagtaaaaactcagaatgtaccatcttgtttcctttcagtttattaaatggcatcataaagatgactttgctaagttaatagagttaaaaatttttttaatataagccaaaatattaactttaatgaaacattgacttggcaaatgaatttcctataaattatcattggtcagaatgctgttttgtttaataatattacgcaacataaaccataggtgttattagaagtggagaactgcctttttcatctggggcttttaaggacttgctataaatgattattttttaaatgctttataaatcttcatggtttttctatttctgatacactcagctatagttaataccagagtatcctaccaggagtaatatttggaatatttaaatctagtaaaagaagaaagttgtacttcctggctgggagtattaggagatgggagtagagattcacttttaagttcttgaaaatatatgcattctcctaaatattaacaaaaatgatttggggaaatgacatggcttgattgttctgtttaaatttgtactgtggcttatgttacacatgttcatgttcacctctcattcacctgttttatatggtttaaaattctctttaacaaaattcagaaaattcacctgaaacgtattttgacctaaaagaaacatatttttgtatcagtattgaattttggacagtgcccccatataaggaagttactgttttaaaataaagcaaactaactgttttaaaaaaaaaaaaaaaaaaaaaaaaaaaaaaaaaaaaaaaaccaaaaaaaaaaaaaaa

SEQ ID NO: 978 - protein, 333 aa, Homo sapiens
MLGWIKRLIRMVFQQVGVSMQSVLWSRKPYGSSRSIVRKIGTNLSLIQCPRVQFQINSHATEWSPSHPGEDAVASFADVGWVAKEEGECSARLRTEVRSRPPLQDDLLFFEKAPSRQISLPDLSQEEPQLKTPARANEEALQKICALENELAALRAQIAKIVTQQEQQNLTAGDLDSTTFGTIPPHPPPPPPPLPPPALGLHQSTSAVDLIKERREKRANAGKTLVKNNPKKPEMPNMLEILKEMNSVKLRSVKRSEQDVKPKPVDATDPAALIAEALKKKFAYRYRSDSQDEVEKGIPKSESEATSERVLFGPHMLKPTGKMKALIENVSDS

SEQ ID NO: 979 - DNA, 1739 bp, Homo sapiens
ggggatcactgttggaaggcagctgcttgaggtccaaggcagtcagtgtcccctctcttttgcctcgggacagctggtatttatcagactcctaagaagttttccttgctccctagtagaagagagagattatgcagcgggcttttgattgatccaatgggaattacattgatctggtgtctggccttggttcttatcaagtggatcacctctaagaggcgtggagctatttcctatgacagttctgatcagactgcattatacattcgtatgctaggagatgtacgtgtaaggagccgagcaggatttgaatcagaaagaagaggttctcacccatatattgattttcgtattttccactctcaatctgaaattgaagtgtctgtctctgcaaggaatatcagaaggctactaagtttccagcgatatcttagatcttcacgcttttttcgtggtactgcggtttcaaattccctaaacattttagatgatgattataatggacaagccaagtgtatgctggaaaaagttggaaattggaattttgatatctttctatttgatagactaacaaatggaaatagtctagtaagcttaacctttcatttatttagtcttcatggattaattgagtacttccatttagatatgatgaaacttcgtagatttttagttatgattcaagaagattaccacagtcaaaatccttaccataacgcagtccacgctgcggatgttactcaggccatgcactgttacttaaaggaacctaagcttgccaattctgtaactccttgggatatcttgctgagcttaattgcagctgccactcatgatctggatcatccaggtgttaatcaacctttccttattaaaactaaccattacttggcaactttatacaagaatacctcagtactggaaaatcaccactggagatctgcagtgggcttattgagagaatcaggcttattctcacatctgccattagaaagcaggcaacaaatggagacacagataggtgctctgatactagccacagacatcagtcgccagaatgagtatctgtctttgtttaggtcccatttggatagaggtgatttatgcctagaagacaccagacacagacatttggttttacagatggctttgaaatgtgctgatatttgtaacccatgtcggacgtgggaattaagcaagcagtggagtgaaaaagtaacggaggaattcttccatcaaggagatatagaaaaaaaatatcatttgggtgtgagtccactttgcgatcgtcacactgaatctattgccaacatccagattggttttatgacttacctagtggagcctttatttacagaatgggccaggttttccaatacaaggctatcccagacaatgcttggacacgtggggctgaataaagccagctggaagggactgcagagagaacagtcgagcagtgaggacactgatgctgcatttgagttgaactcacagttattacctcaggaaaatcggttatcataacccccagaaccagtgggacaaactgcctcctggaggtttttagaaatgtgaaatggggtcttgaggtgagagaacttaactcttgactgccaaggtttccaagtgagtgatgccagccagcattatttatttccaagatttcctctgttggatcatttgaacccacttgttaattgcaagacccgaacatacagcaatatgaatttggcttt

SEQ ID NO: 980 - protein, 456 aa, Homo sapiens
MGITLIWCLALVLIKWITSKRRGAISYDSSDQTALYIRMLGDVRVRSRAGFESERRGSHPYIDFRIFHSQSEIEVSVSARNIRRLLSFQRYLRSSRFFRGTAVSNSLNILDDDYNGQAKCMLEKVGNWNFDIFLFDRLTNGNSLVSLTFHLFSLHGLIEYFHLDMMKLRRFLVMIQEDYHSQNPYHNAVHAADVTQAMHCYLKEPKLANSVTPWDILLSLIAAATHDLDHPGVNQPFLIKTNHYLATLYKNTSVLENHHWRSAVGLLRESGLFSHLPLESRQQMETQIGALILATDISRQNEYLSLFRSHLDRGDLCLEDTRHRHLVLQMALKCADICNPCRTWELSKQWSEKVTEEFFHQGDIEKKYHLGVSPLCDRHTESIANIQIGFMTYLVEPLFTEWARFSNTRLSQTMLGHVGLNKASWKGLQREQSSSEDTDAAFELNSQLLPQENRLS

SEQ ID NO: 981 - DNA, 2990 bp, Homo sapiens
atggaagtgtgttaccagctgccggtactgcccctggacaggccggtcccccagcacgtcctcagccgccgaggagccatcagcttcagctccagctccgctctcttcggctgccccaatccccggcagctctctcagaggcgtggagctatttcctatgacagttctgatcagactgcattatacattcgtatgctaggagatgtacgtgtaaggagccgagcaggatttgaatcagaaagaagaggttctcacccatatattgattttcgtattttccactctcaatctgaaattgaagtgtctgtctctgcaaggaatatcagaaggctactaagtttccagcgatatcttagatcttcacgcttttttcgtggtactgcggtttcaaattccctaaacattttagatgatgattataatggacaagccaagtgtatgctggaaaaagttggaaattggaattttgatatctttctatttgatagactaacaaatggaaatagtctagtaagcttaacctttcatttatttagtcttcatggattaattgagtacttccatttagatatgatgaaacttcgtagatttttagttatgattcaagaagattaccacagtcaaaatccttaccataacgcagtccacgctgcggatgttactcaggccatgcactgttacttaaaggaacctaagcttgccaattctgtaactccttgggatatcttgctgagcttaattgcagctgccactcatgatctggatcatccaggtgttaatcaacctttccttattaaaactaaccattacttggcaactttatacaagaatacctcagtactggaaaatcaccactggagatctgcagtgggcttattgagagaatcaggcttattctcacatctgccattagaaagcaggcaacaaatggagacacagataggtgctctgatactagccacagacatcagtcgccagaatgagtatctgtctttgtttaggtcccatttggatagaggtgatttatgcctagaagacaccagacacagacatttggttttacagatggctttgaaatgtgctgatatttgtaacccatgtcggacgtgggaattaagcaagcagtggagtgaaaaagtaacggaggaattcttccatcaaggagatatagaaaaaaaatatcatttgggtgtgagtccactttgcgatcgtcacactgaatctattgccaacatccagattggtaactatacatatttagatatagctggttagaaaaatgccactgtttttatcaagaagggaaatatatttgaaatataaaatattaaaattatgctcatttctatttttaaaaataatttaagaaattttacccttgttttcccttgttatggctcttctaattctcatttaattttaggatgtaaaaagtatatttttgcagaacaggcagcagcaataacttgtttctgttcttatgtaaataagaatccattattcgctcatgtggaagcttcttttgcatcatttgggactgccatttaaaaaaggataggtaaacaaagaaatgacaaaaataaaataaataaaataaaaatggataggtggtgacccactgagcctgatcataatacgaagaccagcttctgccactgcctttccagactcttaccactgcctgttgattaaatctaactcttcaacatcctagacaggcccttataatcttgcttcaaatgctgtgcagccatcttgcctcaacttccctctcatttgcctacagcatctcgggacgcttctgtgtttcccaagtatacgctgttctttcgctctttgtgcttcgccagtgctttccatgtgcctcgtagagttatttttcttgaagaggcagctcaaatgtcaccttctccagaagctgctctccacttgctttaggcagagtcagtcacttttcttctagattccaaagtgcctgatccacttggttgtggattcctggagcctagcaccacaccagaagcacgaggcccttgagaactgtgtgttgagtgaactaataactgtattatagaaagcataatgaaaatgtcctgtgactgaagtatgtgtagcttgttgcaggagtcacaggaaagttgactaggattgagtgtgttgggctttgggtataaaggagggggattctacgggggcagtagctcaacaaggaatagagggaggagtgtaattttggtagctggtgttgaatagggcctttgagaatcagactgaacacagtgaaatatgtgcccaaagttcagaaagatgaagtttccagaaactaagaaggtagcacaatatgtggcatcatactcagaaaggaagaccatgccatggggccagaaattcagaaacgtaattcttacattgtgattgcaatggatactcatgaaagaaagtgggtagtggccgatttgccttcagagtgacaggtagagaagggaagagcgtgtagaactgtggccatactttaggagtgtgagggatgctgaatctcccagagagctcacactggccaggaatgctgagagtagcagatgcttttcttttgggaggatagtaaaacaatttagaaccagatatgctttgtcttgattctcaagtagaataatcttcaaatgcaaaagaatacattagaaatggacaaaagtggccaggagcggtagctcatacttgtaacccagcactttgggaagccgaggcgggctgatcgcttgaggtcaggagttcgagaccagcctggccaaaatagtgaaactcacgtttctactaaaaatacaaaaattagctgggtgtgatggccacttgggaggctgagataggagaatcgcttgaacctgggaggcagaggttgcagtgagccaatatcgtgccactgcattccagcctgggtgacagaatgaaactccatcactccatctcaaaaaaaaaaaaaaaaaaaaaaaaaa

SEQ ID NO: 982 - protein, 424 aa, Homo sapiens
MEVCYQLPVLPLDRPVPQHVLSRRGAISFSSSSALFGCPNPRQLSQRRGAISYDSSDQTALYIRMLGDVRVRSRAGFESERRGSHPYIDFRIFHSQSEIEVSVSARNIRRLLSFQRYLRSSRFFRGTAVSNSLNILDDDYNGQAKCMLEKVGNWNFDIFLFDRLTNGNSLVSLTFHLFSLHGLIEYFHLDMMKLRRFLVMIQEDYHSQNPYHNAVHAADVTQAMHCYLKEPKLANSVTPWDILLSLIAAATHDLDHPGVNQPFLIKTNHYLATLYKNTSVLENHHWRSAVGLLRESGLFSHLPLESRQQMETQIGALILATDISRQNEYLSLFRSHLDRGDLCLEDTRHRHLVLQMALKCADICNPCRTWELSKQWSEKVTEEFFHQGDIEKKYHLGVSPLCDRHTESIANIQIGNYTYLDIAG

SEQ ID NO: 983 - DNA, 5132 bp, Homo sapiens
gcgccgcgctgcgcaccgccgccgaccatgagcgaggacagccgcggagacagccgcgccgagagcgccaaggacctggagaagcagcttcgcctgcgcgtgtgcgtgctcagcgagctccagaagaccgagcgggactatgtgggcacgctggagttcctggtgtcggcattcttacacagaatgaaccagtgtgcagcatcaaaagttgacaaaaatgtgacagaagaaacagtgaagatgttgttctcaaacattgaagacatccttgcagtacataaagaattcttaaaagtcgtggaagaatgcttacaccccgaacctaatgctcaacaagaagtgggaacctgctttcttcactttaaagacaagtttcgtatctatgatgaatattgtagtaaccatgagaaggcacaaaaattacttcttgaactcaacaaaataagaacaatccggacatttcttttgaactgcatgctgcttggaggacggaagaacacagatgttcccttggaaggatatttagtaacaccaatacaaagaatatgcaagtaccctcttattttgaaggagttgctgaagcggactccacggaaacacagtgactatgcagcagtgatggaagccctccaagccatgaaagctgtctgttccaacataaacgaggccaagagacagatggagaagttagaagttttagaggaatggcagtctcacattgaaggctgggaggggtccaacatcactgacacctgcactgaaatgctaatgtgtggagtcttactgaaaatttcttctggaaatattcaagaacgggtgttttttcttttcgataatcttttggtgtactgcaaaagaaaacacagacggttgaagaacagcaaggcatctacagatggacatcggtacctttttcgtggccggatcaacacggaggtgatggaagtggagaatgtggatgatggcaccgctgatttccatagcagtggacacattgttgttaatggatggaagatacataacacagcaaaaaataaatggtttgtttgtatggcaaaaacacctgaagagaagcatgaatggtttgaagctattttgaaagaaagagaacggcggaaaggtttaaaattaggaatggagcaagatacctgggtcatgatctctgaacagggtgagaaactttataaaatgatgtgcagacaaggaaatctgatcaaagaccgaaagagaaaactgactacgttccctaaatgctttcttggaagcgaatttgtgtcatggctgttggaaattggagagattcacaggcctgaggaaggcgtgcacttgggacaagcattattagaaaatggaatcattcaccatgttactgataaacatcaattcaaaccagaacagatgttatatagatttcgctatgatgatggaacattttatccaagaaatgagatgcaggacgtgatttcaaagggtgtaagattatattgtcgtcttcatagcctttttactccagtgataagagataaagattaccatttaaggacctacaaatctgtggtcatggccaacaaactgatagactggttaattgcacagggagattgccgcaccagagaagaggcaatgatatttggcgttggactctgtgacaatggatttatgcaccatgtccttgaaaaaagcgaattcaaagatgaacccctacttttccgttttttttcggatgaggaaatggagggatcaaatatgaaacatcgacttatgaaacatgacttaaaagttgtggaaaatgttatagctaagtcattattgattaaatccaatgaaggcagctatggctttggattagaagacaaaaataaagttccaataataaagttggtagaaaagggatctaatgctgagatggctggcatggaagtcgggaaaaagatttttgctattaatggtgacctagtttttatgagacctttcaatgaagtggattgcttcctgaaatcgtgtttaaacagcagaaaacctctaagagttcttgtgagcacaaagccaagagagacagtgaaaattccagattcagctgatggacttggcttccagatccggggatttggcccttctgttgtgcatgctgtaggaagaggaactgtggctgcagcagctggtcttcaccctggacagtgcattatcaaggtgaatggaatcaatgtcagcaaagagacacatgccagtgtcattgcacacgttacagcctgcaggaagtacaggcggccaacgaagcaagattccatacaatgggtttataatagcattgagagtgctcaagaagaccttcaaaaatctcactccaagccccctggagatgaagcaggggatgcttttgactgtaaagtagaagaggttattgacaaattcaacactatggccatcattgatgggaagaaggagcatgtgagtctgacagtggacaatgtccacctggaatatggtgtcgtgtatgagtacgacagcacagctggcatcaagtgcaatgtggtggaaaagatgattgagcccaaaggtttcttcagcttaactgccaagattcttgaagccctggctaaaagtgatgagcattttgtacaaaactgtaccagcctaaattctctaaatgaagtgattcctactgaccttcagagtaaattcagtgccctttgcagtgaaagaattgaacacctatgtcagagaatatccagttataaaaagttttctcgtgtactgaagaatagggcctggcctacttttaaacaggccaaatctaaaatctccccactgcacagcagtgatttctgccctaccaactgccatgtcaatgtgatggaagtttcttatcccaaaacatcaacctctttgggaagtgcatttggtgttcagttggatagcaggaagcataattctcatgataaagaaaacaaatcttcggagcaagggaaactgagccctatggtgtacattcagcacaccatcacaaccatggcggccccttcaggtctgtctctgggacagcaggatggccatggtctcaggtatctgctaaaagaagaagacttagaaacccaagacatctatcagaaactgctgggcaaacttcagactgcactgaaagaggtggagatgtgtgtttgtcaaatagatgaccttctgtcttcaataacatattctcctaaattagaacgtaagacatcagagggcataataccaacagacagtgacaatgagaagggagaaagaaacagcaaacgggtatgttttaatgtagcaggagatgaacaggaagattctggtcatgacaccatcagcaacagagactcttacagtgactgcaacagcaataggaattccatcgcctccttcaccagcatctgcagcagccagtgcagctcgtatttccacagtgatgaaatggactcaggtgatgaacttcccttaagtgttcgcatatctcatgataaacaggacaagatacatagttgccttgagcatcttttcagccaggtggattcaattaccaatctcctaaaagggcaggctgttgtgagggcctttgaccaaaccaagtatctcactccaggccgaggattgcaagaatttcaacaggaaatggaaccaaagctgagttgtccaaaaaggctacggcttcatatcaagcaagatccttggaatcttcccagcagcgtccggactcttgctcagaacatcaggaaatttgttgaagaggtaaagtgtaggctactcctggctcttcttgaatattcagatagtgagacacagctccgtagagacatggttttctgccagactcttgtggccactgtctgtgccttctctgagcagctcatggcggccttgaaccagatgtttgacaacagcaaggaaaatgagatggaaacttgggaagccagcaggaggtggctggaccagatagcgaatgcaggtgttctttttcactttcagtcacttctgtcaccaaacttgacagatgaacaagccatgttagaagatacactggttgcactatttgatttggaaaaggtttccttttactttaaaccatcagaagaggaacctctggttgcaaatgttcctcttacatatcaagcagaaggaagtcggcaagctctgaaagtttacttctacattgatagttatcattttgaacaacttcctcaacggctgaaaaatggaggagggtttaaaattcatcctgttctttttgcacaagcactagagagcatggaaggatattattacagagacaatgtttctgtggaagaatttcaagctcagataaatgcagcctcactggaaaaggtcaaacagtacaaccagaagctcagggcattctacttggacaagtcaaattcaccaccaaactccacatccaaagctgcctatgtagataagctaatgaggcctctcaacgctttggatgaactttaccgactggtagcctcgtttatcagatccaagcgcacagctgcctgtgcaaacacagcttgcagtgcttctggggttggactgctgtcagtttcctcggagctgtgcaacaggctgggcgcctgccacatcatcatgtgcagcagcggtgtgcatcggtgcaccctgagcgtgacgctggagcaagccatcattctggccagaagccacggactgccacctcgttacatcatgcaggctacagatgtgatgcggaagcagggagcaagagttcagaacacagcgaagaatttgggagtcagagaccggactccacagtctgcaccaaggctgtacaagctgtgcgagccacctcccccagctggagaagaatgaaaagaactcccaagaaaccaggcaggcagaagctcctgaatgctggactagacaaactacatgctggctaaacattctccactgaagatacatcaatgcttttttttttttttttttctgtaaatctttcttcccattgcaaacaagtagtgatcagtttatactttgatatttatgctggaaatggatagaagttcaatcagacagttcagcttcacgaactgatgtctctctgtattgacattaagtattcacttttagagtaaaatccatccctgggacat

SEQ ID NO: 984 - protein, 1606 aa, Homo sapiens
MSEDSRGDSRAESAKDLEKQLRLRVCVLSELQKTERDYVGTLEFLVSAFLHRMNQCAASKVDKNVTEETVKMLFSNIEDILAVHKEFLKVVEECLHPEPNAQQEVGTCFLHFKDKFRIYDEYCSNHEKAQKLLLELNKIRTIRTFLLNCMLLGGRKNTDVPLEGYLVTPIQRICKYPLILKELLKRTPRKHSDYAAVMEALQAMKAVCSNINEAKRQMEKLEVLEEWQSHIEGWEGSNITDTCTEMLMCGVLLKISSGNIQERVFFLFDNLLVYCKRKHRRLKNSKASTDGHRYLFRGRINTEVMEVENVDDGTADFHSSGHIVVNGWKIHNTAKNKWFVCMAKTPEEKHEWFEAILKERERRKGLKLGMEQDTWVMISEQGEKLYKMMCRQGNLIKDRKRKLTTFPKCFLGSEFVSWLLEIGEIHRPEEGVHLGQALLENGIIHHVTDKHQFKPEQMLYRFRYDDGTFYPRNEMQDVISKGVRLYCRLHSLFTPVIRDKDYHLRTYKSVVMANKLIDWLIAQGDCRTREEAMIFGVGLCDNGFMHHVLEKSEFKDEPLLFRFFSDEEMEGSNMKHRLMKHDLKVVENVIAKSLLIKSNEGSYGFGLEDKNKVPIIKLVEKGSNAEMAGMEVGKKIFAINGDLVFMRPFNEVDCFLKSCLNSRKPLRVLVSTKPRETVKIPDSADGLGFQIRGFGPSVVHAVGRGTVAAAAGLHPGQCIIKVNGINVSKETHASVIAHVTACRKYRRPTKQDSIQWVYNSIESAQEDLQKSHSKPPGDEAGDAFDCKVEEVIDKFNTMAIIDGKKEHVSLTVDNVHLEYGVVYEYDSTAGIKCNVVEKMIEPKGFFSLTAKILEALAKSDEHFVQNCTSLNSLNEVIPTDLQSKFSALCSERIEHLCQRISSYKKFSRVLKNRAWPTFKQAKSKISPLHSSDFCPTNCHVNVMEVSYPKTSTSLGSAFGVQLDSRKHNSHDKENKSSEQGKLSPMVYIQHTITTMAAPSGLSLGQQDGHGLRYLLKEEDLETQDIYQKLLGKLQTALKEVEMCVCQIDDLLSSITYSPKLERKTSEGIIPTDSDNEKGERNSKRVCFNVAGDEQEDSGHDTISNRDSYSDCNSNRNSIASFTSICSSQCSSYFHSDEMDSGDELPLSVRISHDKQDKIHSCLEHLFSQVDSITNLLKGQAVVRAFDQTKYLTPGRGLQEFQQEMEPKLSCPKRLRLHIKQDPWNLPSSVRTLAQNIRKFVEEVKCRLLLALLEYSDSETQLRRDMVFCQTLVATVCAFSEQLMAALNQMFDNSKENEMETWEASRRWLDQIANAGVLFHFQSLLSPNLTDEQAMLEDTLVALFDLEKVSFYFKPSEEEPLVANVPLTYQAEGSRQALKVYFYIDSYHFEQLPQRLKNGGGFKIHPVLFAQALESMEGYYYRDNVSVEEFQAQINAASLEKVKQYNQKLRAFYLDKSNSPPNSTSKAAYVDKLMRPLNALDELYRLVASFIRSKRTAACANTACSASGVGLLSVSSELCNRLGACHIIMCSSGVHRCTLSVTLEQAIILARSHGLPPRYIMQATDVMRKQGARVQNTAKNLGVRDRTPQSAPRLYKLCEPPPPAGEE

SEQ ID NO: 985 - DNA, 3024 bp, Homo sapiens
gcgccgcgctgcgcaccgccgccgaccatgagcgaggacagccgcggagacagccgcgccgagagcgccaaggacctggagaagcagcttcgcctgcgcgtgtgcgtgctcagcgagctccagaagaccgagcgggactatgtgggcacgctggagttcctggtgtcggcattcttacacagaatgaaccagtgtgcagcatcaaaagttgacaaaaatgtgacagaagaaacagtgaagatgttgttctcaaacattgaagacatccttgcagtacataaagaattcttaaaagtcgtggaagaatgcttacaccccgaacctaatgctcaacaagaagtgggaacctgctttcttcactttaaagacaagtttcgtatctatgatgaatattgtagtaaccatgagaaggcacaaaaattacttcttgaactcaacaaaataagaacaatccggacatttcttttgaactgcatgctgcttggaggacggaagaacacagatgttcccttggaaggatatttagtaacaccaatacaaagaatatgcaagtaccctcttattttgaaggagttgctgaagcggactccacggaaacacagtgactatgcagcagtgatggaagccctccaagccatgaaagctgtctgttccaacataaacgaggccaagagacagatggagaagttagaagttttagaggaatggcagtctcacattgaaggctgggaggggtccaacatcactgacacctgcactgaaatgctaatgtgtggagtcttactgaaaatttcttctggaaatattcaagaacgggtgttttttcttttcgataatcttttggtgtactgcaaaagaaaacacagacggttgaagaacagcaaggcatctacagatggacatcggtacctttttcgtggccggatcaacacggaggtgatggaagtggagaatgtggatgatggcaccgctgatttccatagcagtggacacattgttgttaatggatggaagatacataacacagcaaaaaataaatggtttgtttgtatggcaaaaacacctgaagagaagcatgaatggtttgaagctattttgaaagaaagagaacggcggaaaggtttaaaattaggaatggagcaagatacctgggtcatgatctctgaacagggtgagaaactttataaaatgatgtgcagacaaggaaatctgatcaaagaccgaaagagaaaactgactacgttccctaaatgctttcttggaagcgaatttgtgtcatggctgttggaaattggagagattcacaggcctgaggaaggcgtgcacttgggacaagcattattagaaaatggaatcattcaccatgttactgataaacatcaattcaaaccagaacagatgttatatagatttcgctatgatgatggaacattttatccaagaaatgagatgcaggacgtgatttcaaagggtgtaagattatattgtcgtcttcatagcctttttactccagtgataagagataaagattaccatttaaggacctacaaatctgtggtcatggccaacaaactgatagactggttaattgcacagggagattgccgcaccagagaagaggcaatgatatttggcgttggactctgtgacaatggatttatgcaccatgtccttgaaaaaagcgaattcaaagatgaacccctacttttccgttttttttcggatgaggaaatggagggatcaaatatgaaacatcgacttatgaaacatgacttaaaagttgtggaaaatgttatagctaagtcattattgattaaatccaatgaaggcagctatggctttggattagaagacaaaaataaagttccaataataaagttggtagaaaagggatctaatgctgagatggctggcatggaagtcgggaaaaagatttttgctattaatggtgacctagtttttatgagacctttcaatgaagtggattgcttcctgaaatcgtgtttaaacagcagaaaacctctaagagttcttgtgagcacaaagccaagagagacagtgaaaattccagattcagctgatggacttggcttccagatccggggatttggcccttctgttgtgcatgctgtaggaagaggaactgtggctgcagcagctggtcttcaccctggacagtgcattatcaaggtgaatggaatcaatgtcagcaaagagacacatgccagtgtcattgcacacgttacagcctgcaggaagtacaggcggccaacgaagcaagattccatacaatgggtttataatagcattgagagtgctcaagaagaccttcaaaaatctcactccaagccccctggagatgaagcaggggatgcttttgactgtaaagtagaagaggttattgacaaattcaacactatggccatcattgatgggaagaaggagcatgtgagtctgacagtggacaatgtccacctggaatatggtgtcgtgtatgagtacgacagcacagctggcatcaagtgcaatgtggtggaaaagatgattgagcccaaaggtttcttcagcttaactgccaagattcttgaagccctggctaaaagtgatgagcattttgtacaaaactgtaccagcctaaattctctaaatgaagtgattcctactgaccttcagagtaaattcagtgccctttgcagtgaaagaattgaacacctatgtcagagaatatccagttataaaaaggttcaagcttcagaaaggttttacaatttcacagcacggcatgctgtctgggagcacagttttgatcttcacagtgtaagcagcacatttccagtacctgtgactatggagttcctcctgctgcctcctcctctcttaggaatatcccaggatggaagacagcactgcattcctgaggaccttccttctcaagaaatgctcttagcagagagggcccctgtctgattcttaccctttggaacagttcaggcacccttagacacagtacacagcccttcctag

SEQ ID NO: 986 - protein, 979 aa, Homo sapiens
MSEDSRGDSRAESAKDLEKQLRLRVCVLSELQKTERDYVGTLEFLVSAFLHRMNQCAASKVDKNVTEETVKMLFSNIEDILAVHKEFLKVVEECLHPEPNAQQEVGTCFLHFKDKFRIYDEYCSNHEKAQKLLLELNKIRTIRTFLLNCMLLGGRKNTDVPLEGYLVTPIQRICKYPLILKELLKRTPRKHSDYAAVMEALQAMKAVCSNINEAKRQMEKLEVLEEWQSHIEGWEGSNITDTCTEMLMCGVLLKISSGNIQERVFFLFDNLLVYCKRKHRRLKNSKASTDGHRYLFRGRINTEVMEVENVDDGTADFHSSGHIVVNGWKIHNTAKNKWFVCMAKTPEEKHEWFEAILKERERRKGLKLGMEQDTWVMISEQGEKLYKMMCRQGNLIKDRKRKLTTFPKCFLGSEFVSWLLEIGEIHRPEEGVHLGQALLENGIIHHVTDKHQFKPEQMLYRFRYDDGTFYPRNEMQDVISKGVRLYCRLHSLFTPVIRDKDYHLRTYKSVVMANKLIDWLIAQGDCRTREEAMIFGVGLCDNGFMHHVLEKSEFKDEPLLFRFFSDEEMEGSNMKHRLMKHDLKVVENVIAKSLLIKSNEGSYGFGLEDKNKVPIIKLVEKGSNAEMAGMEVGKKIFAINGDLVFMRPFNEVDCFLKSCLNSRKPLRVLVSTKPRETVKIPDSADGLGFQIRGFGPSVVHAVGRGTVAAAAGLHPGQCIIKVNGINVSKETHASVIAHVTACRKYRRPTKQDSIQWVYNSIESAQEDLQKSHSKPPGDEAGDAFDCKVEEVIDKFNTMAIIDGKKEHVSLTVDNVHLEYGVVYEYDSTAGIKCNVVEKMIEPKGFFSLTAKILEALAKSDEHFVQNCTSLNSLNEVIPTDLQSKFSALCSERIEHLCQRISSYKKVQASERFYNFTARHAVWEHSFDLHSVSSTFPVPVTMEFLLLPPPLLGISQDGRQHCIPEDLPSQEMLLAERAPV

SEQ ID NO: 987 - DNA, 4326 bp, Homo sapiens
aaaccaataaggttaggacaagagaatagctgtggtttgcgttgcaaaaaccaaaaaaaaaaaaaaaaaaaaaaaaagaaagccccgaggctccatgggcagacctacaaggctgcgcaaacaaatcgagggatgagattctgctgtttctttgtctagggttctcagatgctatctgccgctgctgtttggtggggaaggagcgctgggcgcaaagctgttaccaaacagaacggtgggagctgatggctccgagtttggggcgaggtagaaactctccagtgccacttccgactttaagccttcctgttgccgtccactgtggcgggtttcttcctggggaacacgttttcgctcagtcgctcggcagcccgagcctgcggcagcggccaggcgcctgccccctgcgccgagctttcccctgcagaggcgctccactcccagaagcgccgcggctgcaccagagcgcctgagagcccccgcgcgtacccatccaggagcaaaactatgtcaggaatggaggtttgctaacccagaaaattcgaaggaacacattaaactggtggatgcagcagatgtaagcgctgtgcaaacatctcaagccagttcagatgttgctgtttcctcaagttgcaggtctatggaaatgcaggatctaaccagcccgcatagccgtctgagtggtagtagtgaatcccccagtggccccaaactcggtaactctcatataaatagtaattccatgactcccaatggcaccgaagttaaaacagagccaatgagcagcagtgaaacagcttcaacgacagccgacgggtctttaaacaatttctcaggttcagcaattgggagcagtagtttcagcccacgaccaactcaccagttctctccaccacagatttacccttccaacagaccatacccacatattctccctaccccttcctcacaaactatggctgcatatgggcaaacacagtttaccacaggaatgcaacaagctacagcctatgccacgtacccacagccaggacagccgtacggcatttcctcatatggtgcattgtgggcaggcatcaagactgaaggtggattgtcacagtctcagtcacctggacagacaggatttctcagctatggcacaagcttcagtacccctcaacctggacaggcaccatacagctaccagatgcaaggtagcagttttacaacatcatcaggaatatatacaggaaataattcactcacaaattcctctggatttaatagttcacagcaggactatccgtcttatcccagttttggccagggtcagtacgcacagtattataacagctcaccgtatccagcacattatatgaccagcagcaacaccagcccaacgacaccatccaccaatgccacttaccagcttcaagaaccgccatctggcatcaccagccaagcagttacagatcccacagcagagtacagcacaatccacagcccatcaacacccattaaagattcagattctgatcgattgcgtcgaggttcagatgggaaatcacgtggacggggccgaagaaacaataatccttcacctcccccagattctgatcttgagagagtgttcatctgggacttggatgagacaatcattgttttccactccttgcttactgggtcctacgccaacagatatgggagggatccacccacttcagtttcccttggactgcgaatggaagaaatgattttcaacttggcagacacacatttattttttaatgacttagaagaatgtgaccaagtccatatagatgatgtttcttcagatgataacggacaggacctaagcacatataactttggaacagatggctttcctgctgcagcaaccagtgctaacttatgtttggcaactggtgtacggggcggtgtggactggatgagaaagttggccttccgctacagacgggtaaaagagatctacaacacctacaaaaataatgttggaggtctgcttggtccagctaagagggaagcctggctgcagttgagggccgaaattgaagccctgaccgactcctggttgacactggccctgaaagcactctcgctcattcactcccggacaaactgtgtgaatattttagtaacaactactcagctcatcccagcattggcgaaagtcctgctgtatgggttaggaattgtatttccaatagaaaatatttacagtgcaactaaaataggaaaagaaagctgttttgagagaataattcaaaggtttggaagaaaagtggtgtatgttgttataggagatggtgtagaagaagaacaaggagcaaaaaagcacgcgatgcccttctggaggatctccagccactcggacctcatggccctgcaccatgccttggaactggagtacctgtaacagcgctcggcactttgacagcgcacagctgctctgtgaccagggacagatccagcaggccccagtctcgcatcagcgccggcctccagaacttagcaatttccgcctggtgatgcgcagttgctgtcagtcttgacctctgcctttgtggtgaatggaggaccacgtctatttcatcagaacagctgttgactctagtactgtgaatccagtgaaaataagccatgagaatgttttagcacagcgttatgtgtctgccacattaactacacggttcaaacctgtgaagaaaggacctgcaaacgcttcagttgttagcattttcaatgtgatataaacagcttctccaatacagcaaacctaattgcacaacagagactgaaatgtgtttcctgaataccagtggaggaattttcttgtaaagaaggtttactttttggtgtctcatacccagggtaatctgtacatctctacttatttatgaacagactttttttaaaaagataaaaaaacagctttattgaggtataattcacccaccagacttttttaaacatcaaataattgaagagacaatagcattagaaataagtgattaaaggcctctgcctcacaacatggcaagtacagtactttgaattttagcacattgcatagtagttttaagtatgtctaatttaaacgtataatatgtacatcactgagacaatcatgtacagaaagaatttttggtgtaaatttgtaataatggataattcttttacatattgtttagggaaatgatattgaaaggtagcaatgcctggatagtgaagcatgaggcagcacgtgcacaaattcatgtgccgtgccttatctgagttttcggtataaatatgtagataatggattttttttttttagataatgttgtcaagaccaaaagcatggatgtcaagtgtcagtaaggattttgttttctaaaattttttcctgcatcagttcttctgagggccttgatgaaataacacagcagtttcttaaacaatttgaaacaaaatgagctctcctaccacctcactttttcatttccacactaatgtattatatgtaactacttggaaaaaataattattcaaatgcttcttcccacaaagaatatagatgatagtagatatattttattaataaaatggttcatgaatcggagactaacaaagttttcatgtgctcagaattattaattatcgtgtctgcattttctttcgataaaggaagacacacgatgctaatccggaaatcagcaaactttgcattactccctatgtgcgtattttctctttcttcctgtcaccctgaggaaggttcattgccattgtcatcaccatggaaacaacgttcctctccacctgcattatgtactacatgacaggcatcaatctggggaaataataaaattatcacctttgtcagaccataagagtttctccaaaagtggtcagtttggctgggcaatattttctctcatctaacaaacacaatccattgtcatgaaattacccttaggatgagtcttctttaatcaatcatatattgggcggaaaaaacaccagctttgacccgaagtagttgaagagctacttcattcttttctgaagttgtgtgttgctgctagaaatagtcatttgtgaattatccaaattgtttaaattcacaattgaattagttttttcttcctttttgcttgaagcaaacagttgacaatttttaaccttttcattttatgtttttgtactctgcagactgaaaagacaaagtttatcttggccttactgtataaaggtgtgctgtgtccaccgttgtgtacagaatttttcttcattaattttgtgtttaagttaataaaatttatttgtgatgtactgtaa

SEQ ID NO: 988 - protein, 592 aa, Homo sapiens
MEMQDLTSPHSRLSGSSESPSGPKLGNSHINSNSMTPNGTEVKTEPMSSSETASTTADGSLNNFSGSAIGSSSFSPRPTHQFSPPQIYPSNRPYPHILPTPSSQTMAAYGQTQFTTGMQQATAYATYPQPGQPYGISSYGALWAGIKTEGGLSQSQSPGQTGFLSYGTSFSTPQPGQAPYSYQMQGSSFTTSSGIYTGNNSLTNSSGFNSSQQDYPSYPSFGQGQYAQYYNSSPYPAHYMTSSNTSPTTPSTNATYQLQEPPSGITSQAVTDPTAEYSTIHSPSTPIKDSDSDRLRRGSDGKSRGRGRRNNNPSPPPDSDLERVFIWDLDETIIVFHSLLTGSYANRYGRDPPTSVSLGLRMEEMIFNLADTHLFFNDLEECDQVHIDDVSSDDNGQDLSTYNFGTDGFPAAATSANLCLATGVRGGVDWMRKLAFRYRRVKEIYNTYKNNVGGLLGPAKREAWLQLRAEIEALTDSWLTLALKALSLIHSRTNCVNILVTTTQLIPALAKVLLYGLGIVFPIENIYSATKIGKESCFERIIQRFGRKVVYVVIGDGVEEEQGAKKHAMPFWRISSHSDLMALHHALELEYL

SEQ ID NO: 989 - DNA, 3862 bp, Homo sapiens
ctcctttttctcttttggttaaaagagagcattgtcgttctcagccatgtgctctgtataattaagagctgacactgaagcagagtaacaacatcttctaatttttttacccctgatcacaggtgcaaacatctcaagccagttcagatgttgctgtttcctcaagttgcaggtctatggaaatgcaggatctaaccagcccgcatagccgtctgagtggtagtagtgaatcccccagtggccccaaactcggtaactctcatataaatagtaattccatgactcccaatggcaccgaagttaaaacagagccaatgagcagcagtgaaacagcttcaacgacagccgacgggtctttaaacaatttctcaggttcagcaattgggagcagtagtttcagcccacgaccaactcaccagttctctccaccacagatttacccttccaacagaccatacccacatattctccctaccccttcctcacaaactatggctgcatatgggcaaacacagtttaccacaggaatgcaacaagctacagcctatgccacgtacccacagccaggacagccgtacggcatttcctcatatggtgcattgtgggcaggcatcaagactgaaggtggattgtcacagtctcagtcacctggacagacaggatttctcagctatggcacaagcttcagtacccctcaacctggacaggcaccatacagctaccagatgcaaggtagcagttttacaacatcatcaggaatatatacaggaaataattcactcacaaattcctctggatttaatagttcacagcaggactatccgtcttatcccagttttggccagggtcagtacgcacagtattataacagctcaccgtatccagcacattatatgaccagcagcaacaccagcccaacgacaccatccaccaatgccacttaccagcttcaagaaccgccatctggcatcaccagccaagcagttacagatcccacagcagagtacagcacaatccacagcccatcaacacccattaaagattcagattctgatcgattgcgtcgaggttcagatgggaaatcacgtggacggggccgaagaaacaataatccttcacctcccccagattctgatcttgagagagtgttcatctgggacttggatgagacaatcattgttttccactccttgcttactgggtcctacgccaacagatatgggagggatccacccacttcagtttcccttggactgcgaatggaagaaatgattttcaacttggcagacacacatttattttttaatgacttagaagaatgtgaccaagtccatatagatgatgtttcttcagatgataacggacaggacctaagcacatataactttggaacagatggctttcctgctgcagcaaccagtgctaacttatgtttggcaactggtgtacggggcggtgtggactggatgagaaagttggccttccgctacagacgggtaaaagagatctacaacacctacaaaaataatgttggaggtctgcttggtccagctaagagggaagcctggctgcagttgagggccgaaattgaagccctgaccgactcctggttgacactggccctgaaagcactctcgctcattcactcccggacaaactgtgtgaatattttagtaacaactactcagctcatcccagcattggcgaaagtcctgctgtatgggttaggaattgtatttccaatagaaaatatttacagtgcaactaaaataggaaaagaaagctgttttgagagaataattcaaaggtttggaagaaaagtggtgtatgttgttataggagatggtgtagaagaagaacaaggagcaaaaaagcacgcgatgcccttctggaggatctccagccactcggacctcatggccctgcaccatgccttggaactggagtacctgtaacagcgctcggcactttgacagcgcacagctgctctgtgaccagggacagatccagcaggccccagtctcgcatcagcgccggcctccagaacttagcaatttccgcctggtgatgcgcagttgctgtcagtcttgacctctgcctttgtggtgaatggaggaccacgtctatttcatcagaacagctgttgactctagtactgtgaatccagtgaaaataagccatgagaatgttttagcacagcgttatgtgtctgccacattaactacacggttcaaacctgtgaagaaaggacctgcaaacgcttcagttgttagcattttcaatgtgatataaacagcttctccaatacagcaaacctaattgcacaacagagactgaaatgtgtttcctgaataccagtggaggaattttcttgtaaagaaggtttactttttggtgtctcatacccagggtaatctgtacatctctacttatttatgaacagactttttttaaaaagataaaaaaacagctttattgaggtataattcacccaccagacttttttaaacatcaaataattgaagagacaatagcattagaaataagtgattaaaggcctctgcctcacaacatggcaagtacagtactttgaattttagcacattgcatagtagttttaagtatgtctaatttaaacgtataatatgtacatcactgagacaatcatgtacagaaagaatttttggtgtaaatttgtaataatggataattcttttacatattgtttagggaaatgatattgaaaggtagcaatgcctggatagtgaagcatgaggcagcacgtgcacaaattcatgtgccgtgccttatctgagttttcggtataaatatgtagataatggattttttttttttagataatgttgtcaagaccaaaagcatggatgtcaagtgtcagtaaggattttgttttctaaaattttttcctgcatcagttcttctgagggccttgatgaaataacacagcagtttcttaaacaatttgaaacaaaatgagctctcctaccacctcactttttcatttccacactaatgtattatatgtaactacttggaaaaaataattattcaaatgcttcttcccacaaagaatatagatgatagtagatatattttattaataaaatggttcatgaatcggagactaacaaagttttcatgtgctcagaattattaattatcgtgtctgcattttctttcgataaaggaagacacacgatgctaatccggaaatcagcaaactttgcattactccctatgtgcgtattttctctttcttcctgtcaccctgaggaaggttcattgccattgtcatcaccatggaaacaacgttcctctccacctgcattatgtactacatgacaggcatcaatctggggaaataataaaattatcacctttgtcagaccataagagtttctccaaaagtggtcagtttggctgggcaatattttctctcatctaacaaacacaatccattgtcatgaaattacccttaggatgagtcttctttaatcaatcatatattgggcggaaaaaacaccagctttgacccgaagtagttgaagagctacttcattcttttctgaagttgtgtgttgctgctagaaatagtcatttgtgaattatccaaattgtttaaattcacaattgaattagttttttcttcctttttgcttgaagcaaacagttgacaatttttaaccttttcattttatgtttttgtactctgcagactgaaaagacaaagtttatcttggccttactgtataaaggtgtgctgtgtccaccgttgtgtacagaatttttcttcattaattttgtgtttaagttaataaaatttatttgtgatgtactgtaa

SEQ ID NO: 990 - protein, 592 aa, Homo sapiens; identical to SEQ ID NO: 988

SEQ ID NO: 991 - DNA, 3610 bp, Homo sapiens
atgttgctgtttcctcaagttgcaggtctatggaaatgcaggatctaaccagcccgcatagccgtctgagtggtagtagtgaatcccccagtggccccaaactcggtaactctcatataaatagtaattccatgactcccaatggcaccgaagttaaaacagagccaatgagcagcagtgaaacagcttcaacgacagccgacgggtctttaaacaatttctcaggttcagcaattgggagcagtagtttcagcccacgaccaactcaccagttctctccaccacagatttacccttccaacagaccatacccacatattctccctaccccttcctcacaaactatggctgcatatgggcaaacacagtttaccacaggaatgcaacaagctacagcctatgccacgtacccacagccaggacagccgtacggcatttcctcatatggcatcaagactgaaggtggattgtcacagtctcagtcacctggacagacaggatttctcagctatggcacaagcttcagtacccctcaacctggacaggcaccatacagctaccagatgcaaggtagcagttttacaacatcatcaggaatatatacaggaaataattcactcacaaattcctctggatttaatagttcacagcaggactatccgtcttatcccagttttggccagggtcagtacgcacagtattataacagctcaccgtatccagcacattatatgaccagcagcaacaccagcccaacgacaccatccaccaatgccacttaccagcttcaagaaccgccatctggcatcaccagccaagcagttacagatcccacagcagagtacagcacaatccacagcccatcaacacccattaaagattcagattctgatcgattgcgtcgaggttcagatgggaaatcacgtggacggggccgaagaaacaataatccttcacctcccccagattctgatcttgagagagtgttcatctgggacttggatgagacaatcattgttttccactccttgcttactgggtcctacgccaacagatatgggagggaatgtgaccaagtccatatagatgatgtttcttcagatgataacggacaggacctaagcacatataactttggaacagatggctttcctgctgcagcaaccagtgctaacttatgtttggcaactggtgtacggggcggtgtggactggatgagaaagttggccttccgctacagacgggtaaaagagatctacaacacctacaaaaataatgttggaggtctgcttggtccagctaagagggaagcctggctgcagttgagggccgaaattgaagccctgaccgactcctggttgacactggccctgaaagcactctcgctcattcactcccggacaaactgtgtgaatattttagtaacaactactcagctcatcccagcattggcgaaagtcctgctgtatgggttaggaattgtatttccaatagaaaatatttacagtgcaactaaaataggaaaagaaagctgttttgagagaataattcaaaggtttggaagaaaagtggtgtatgttgttataggagatggtgtagaagaagaacaaggagcaaaaaagcacgcgatgcccttctggaggatctccagccactcggacctcatggccctgcaccatgccttggaactggagtacctgtaacagcgctcggcactttgacagcgcacagctgctctgtgaccagggacagatccagcaggccccagtctcgcatcagcgccggcctccagaacttagcaatttccgcctggtgatgcgcagttgctgtcagtcttgacctctgcctttgtggtgaatggaggaccacgtctatttcatcagaacagctgttgactctagtactgtgaatccagtgaaaataagccatgagaatgttttagcacagcgttatgtgtctgccacattaactacacggttcaaacctgtgaagaaaggacctgcaaacgcttcagttgttagcattttcaatgtgatataaacagcttctccaatacagcaaacctaattgcacaacagagactgaaatgtgtttcctgaataccagtggaggaattttcttgtaaagaaggtttactttttggtgtctcatacccagggtaatctgtacatctctacttatttatgaacagactttttttaaaaagataaaaaaacagctttattgaggtataattcacccaccagacttttttaaacatcaaataattgaagagacaatagcattagaaataagtgattaaaggcctctgcctcacaacatggcaagtacagtactttgaattttagcacattgcatagtagttttaagtatgtctaatttaaacgtataatatgtacatcactgagacaatcatgtacagaaagaatttttggtgtaaatttgtaataatggataattcttttacatattgtttagggaaatgatattgaaaggtagcaatgcctggatagtgaagcatgaggcagcacgtgcacaaattcatgtgccgtgccttatctgagttttcggtataaatatgtagataatggattttttttttttagataatgttgtcaagaccaaaagcatggatgtcaagtgtcagtaaggattttgttttctaaaattttttcctgcatcagttcttctgagggccttgatgaaataacacagcagtttcttaaacaatttgaaacaaaatgagctctcctaccacctcactttttcatttccacactaatgtattatatgtaactacttggaaaaaataattattcaaatgcttcttcccacaaagaatatagatgatagtagatatattttattaataaaatggttcatgaatcggagactaacaaagttttcatgtgctcagaattattaattatcgtgtctgcattttctttcgataaaggaagacacacgatgctaatccggaaatcagcaaactttgcattactccctatgtgcgtattttctctttcttcctgtcaccctgaggaaggttcattgccattgtcatcaccatggaaacaacgttcctctccacctgcattatgtactacatgacaggcatcaatctggggaaataataaaattatcacctttgtcagaccataagagtttctccaaaagtggtcagtttggctgggcaatattttctctcatctaacaaacacaatccattgtcatgaaattacccttaggatgagtcttctttaatcaatcatatattgggcggaaaaaacaccagctttgacccgaagtagttgaagagctacttcattcttttctgaagttgtgtgttgctgctagaaatagtcatttgtgaattatccaaattgtttaaattcacaattgaattagttttttcttcctttttgcttgaagcaaacagttgacaatttttaaccttttcattttatgtttttgtactctgcagactgaaaagacaaagtttatcttggccttactgtataaaggtgtgctgtgtccaccgttgtgtacagaatttttcttcattaattttgtgtttaagttaataaaatttatttgtgatgtactgtaa

SEQ ID NO: 992 - protein, 557 aa, Homo sapiens
MEMQDLTSPHSRLSGSSESPSGPKLGNSHINSNSMTPNGTEVKTEPMSSSETASTTADGSLNNFSGSAIGSSSFSPRPTHQFSPPQIYPSNRPYPHILPTPSSQTMAAYGQTQFTTGMQQATAYATYPQPGQPYGISSYGIKTEGGLSQSQSPGQTGFLSYGTSFSTPQPGQAPYSYQMQGSSFTTSSGIYTGNNSLTNSSGFNSSQQDYPSYPSFGQGQYAQYYNSSPYPAHYMTSSNTSPTTPSTNATYQLQEPPSGITSQAVTDPTAEYSTIHSPSTPIKDSDSDRLRRGSDGKSRGRGRRNNNPSPPPDSDLERVFIWDLDETIIVFHSLLTGSYANRYGRECDQVHIDDVSSDDNGQDLSTYNFGTDGFPAAATSANLCLATGVRGGVDWMRKLAFRYRRVKEIYNTYKNNVGGLLGPAKREAWLQLRAEIEALTDSWLTLALKALSLIHSRTNCVNILVTTTQLIPALAKVLLYGLGIVFPIENIYSATKIGKESCFERIIQRFGRKVVYVVIGDGVEEEQGAKKHAMPFWRISSHSDLMALHHALELEYL

SEQ ID NO: 993 - DNA, 3734 bp, Homo sapiens
ctcctttttctcttttggttaaaagagagcattgtcgttctcagccatgtgctctgtataattaagagctgacactgaagcagagtaacaacatcttctaatttttttacccctgatcacaggtgcaaacatctcaagccagttcagatgttgctgtttcctcaagttgcagttaaaacagagccaatgagcagcagtgaaacagcttcaacgacagccgacgggtctttaaacaatttctcaggttcagcaattgggagcagtagtttcagcccacgaccaactcaccagttctctccaccacagatttacccttccaacagaccatacccacatattctccctaccccttcctcacaaactatggctgcatatgggcaaacacagtttaccacaggaatgcaacaagctacagcctatgccacgtacccacagccaggacagccgtacggcatttcctcatatggtgcattgtgggcaggcatcaagactgaaggtggattgtcacagtctcagtcacctggacagacaggatttctcagctatggcacaagcttcagtacccctcaacctggacaggcaccatacagctaccagatgcaaggtagcagttttacaacatcatcaggaatatatacaggaaataattcactcacaaattcctctggatttaatagttcacagcaggactatccgtcttatcccagttttggccagggtcagtacgcacagtattataacagctcaccgtatccagcacattatatgaccagcagcaacaccagcccaacgacaccatccaccaatgccacttaccagcttcaagaaccgccatctggcatcaccagccaagcagttacagatcccacagcagagtacagcacaatccacagcccatcaacacccattaaagattcagattctgatcgattgcgtcgaggttcagatgggaaatcacgtggacggggccgaagaaacaataatccttcacctcccccagattctgatcttgagagagtgttcatctgggacttggatgagacaatcattgttttccactccttgcttactgggtcctacgccaacagatatgggagggatccacccacttcagtttcccttggactgcgaatggaagaaatgattttcaacttggcagacacacatttattttttaatgacttagaagaatgtgaccaagtccatatagatgatgtttcttcagatgataacggacaggacctaagcacatataactttggaacagatggctttcctgctgcagcaaccagtgctaacttatgtttggcaactggtgtacggggcggtgtggactggatgagaaagttggccttccgctacagacgggtaaaagagatctacaacacctacaaaaataatgttggaggtctgcttggtccagctaagagggaagcctggctgcagttgagggccgaaattgaagccctgaccgactcctggttgacactggccctgaaagcactctcgctcattcactcccggacaaactgtgtgaatattttagtaacaactactcagctcatcccagcattggcgaaagtcctgctgtatgggttaggaattgtatttccaatagaaaatatttacagtgcaactaaaataggaaaagaaagctgttttgagagaataattcaaaggtttggaagaaaagtggtgtatgttgttataggagatggtgtagaagaagaacaaggagcaaaaaagcacgcgatgcccttctggaggatctccagccactcggacctcatggccctgcaccatgccttggaactggagtacctgtaacagcgctcggcactttgacagcgcacagctgctctgtgaccagggacagatccagcaggccccagtctcgcatcagcgccggcctccagaacttagcaatttccgcctggtgatgcgcagttgctgtcagtcttgacctctgcctttgtggtgaatggaggaccacgtctatttcatcagaacagctgttgactctagtactgtgaatccagtgaaaataagccatgagaatgttttagcacagcgttatgtgtctgccacattaactacacggttcaaacctgtgaagaaaggacctgcaaacgcttcagttgttagcattttcaatgtgatataaacagcttctccaatacagcaaacctaattgcacaacagagactgaaatgtgtttcctgaataccagtggaggaattttcttgtaaagaaggtttactttttggtgtctcatacccagggtaatctgtacatctctacttatttatgaacagactttttttaaaaagataaaaaaacagctttattgaggtataattcacccaccagacttttttaaacatcaaataattgaagagacaatagcattagaaataagtgattaaaggcctctgcctcacaacatggcaagtacagtactttgaattttagcacattgcatagtagttttaagtatgtctaatttaaacgtataatatgtacatcactgagacaatcatgtacagaaagaatttttggtgtaaatttgtaataatggataattcttttacatattgtttagggaaatgatattgaaaggtagcaatgcctggatagtgaagcatgaggcagcacgtgcacaaattcatgtgccgtgccttatctgagttttcggtataaatatgtagataatggattttttttttttagataatgttgtcaagaccaaaagcatggatgtcaagtgtcagtaaggattttgttttctaaaattttttcctgcatcagttcttctgagggccttgatgaaataacacagcagtttcttaaacaatttgaaacaaaatgagctctcctaccacctcactttttcatttccacactaatgtattatatgtaactacttggaaaaaataattattcaaatgcttcttcccacaaagaatatagatgatagtagatatattttattaataaaatggttcatgaatcggagactaacaaagttttcatgtgctcagaattattaattatcgtgtctgcattttctttcgataaaggaagacacacgatgctaatccggaaatcagcaaactttgcattactccctatgtgcgtattttctctttcttcctgtcaccctgaggaaggttcattgccattgtcatcaccatggaaacaacgttcctctccacctgcattatgtactacatgacaggcatcaatctggggaaataataaaattatcacctttgtcagaccataagagtttctccaaaagtggtcagtttggctgggcaatattttctctcatctaacaaacacaatccattgtcatgaaattacccttaggatgagtcttctttaatcaatcatatattgggcggaaaaaacaccagctttgacccgaagtagttgaagagctacttcattcttttctgaagttgtgtgttgctgctagaaatagtcatttgtgaattatccaaattgtttaaattcacaattgaattagttttttcttcctttttgcttgaagcaaacagttgacaatttttaaccttttcattttatgtttttgtactctgcagactgaaaagacaaagtttatcttggccttactgtataaaggtgtgctgtgtccaccgttgtgtacagaatttttcttcattaattttgtgtttaagttaataaaatttatttgtgatgtactgtaa

SEQ ID NO: 994 - protein, 559 aa, Homo sapiens
MLLFPQVAVKTEPMSSSETASTTADGSLNNFSGSAIGSSSFSPRPTHQFSPPQIYPSNRPYPHILPTPSSQTMAAYGQTQFTTGMQQATAYATYPQPGQPYGISSYGALWAGIKTEGGLSQSQSPGQTGFLSYGTSFSTPQPGQAPYSYQMQGSSFTTSSGIYTGNNSLTNSSGFNSSQQDYPSYPSFGQGQYAQYYNSSPYPAHYMTSSNTSPTTPSTNATYQLQEPPSGITSQAVTDPTAEYSTIHSPSTPIKDSDSDRLRRGSDGKSRGRGRRNNNPSPPPDSDLERVFIWDLDETIIVFHSLLTGSYANRYGRDPPTSVSLGLRMEEMIFNLADTHLFFNDLEECDQVHIDDVSSDDNGQDLSTYNFGTDGFPAAATSANLCLATGVRGGVDWMRKLAFRYRRVKEIYNTYKNNVGGLLGPAKREAWLQLRAEIEALTDSWLTLALKALSLIHSRTNCVNILVTTTQLIPALAKVLLYGLGIVFPIENIYSATKIGKESCFERIIQRFGRKVVYVVIGDGVEEEQGAKKHAMPFWRISSHSDLMALHHALELEYL

SEQ ID NO: 995 - DNA, 13823 bp, Homo sapiens
atttttttaaacagggctaaaacgataataattagcagaataaagacatatcggattttcatttcctttcctccttttcccaaccccttcacaaccaaacagcgagaccgcggtcggcacatgctttaactcctcccggacccccgaggaccgctccatgccccccactttctgctccagcgtttttattttcacccaataaagttcgaggattattttttattttttttgtttttttaatgaaccctctcgttttacttggatgtgatcagctgtaagtaaaataaaagcaaaacaaaaaagaggcgaagatcgagtaggaactgcaggggaaatggaaagtccctgacaggctggatgaaatgagatccccatgtagcaattgccatggaaacctgtgactcccctcctatctcaaggcaggaaaatgggcagagcacatcaaagctatgtggaacgacacaacttgataatgaggtgccagagaaagttgcagggatggagcctgacagggaaaacagctccacagatgacaacctgaaaacggatgagcgcaaaagtgaagccttgctgggtttcagcgttgagaatgcagctgccactcaggttacctcagcaaaggagataccctgcaacgaatgtgccacttcttttcccagtttacagaaatacatggaacaccactgccctaatgcccgccttcctgtcctgaaggatgacaacgagagcgagatcagcgagttagaggacagtgacgtggaaaatctaacaggggagatcgtttaccagcctgatgggtcagcatatataattgaggactccaaagaaagtgggcagaatgcacagactggggcaaatagcaaactcttttctacagcgatgttcctggactccctggcatctgctggagagaagagtgatcagtctgcttctgcacctatgtcgttctacccacagatcatcaacacttttcatatcgcttcatccctcgggaaaccatttacagccgatcaggctttcccaaatacctcagcattagcaggagttggtcctgtgttgcacagtttccgtgtctatgatctccgacacaagagagagaaagactatctaaccagtgatggctcagccaaaaactcctgtgtgtccaaagatgtccctaacaatgtggacttgtccaaattcgatggttgtgttagcgatgggaaaaggaaacctgttttaatgtgtttcttgtgcaagttgtcttttggttatatcaggtcatttgtaacccatgctgtgcatgatcatcggatgaccctcaatgacgaggagcagaagctcctcagtaataaatgcgtctccgccataatacaggggattggcaaagacaaagaacctcttataagctttctggaaccaaaaaaatccacttctgtttatccccatttttctactacaaacctcataggacccgatccaaccttccgcggtttatggagcgcttttcatgttgaaaatggtgactctttgccggctggctttgccttcttaaaaggaagcgcgagcacctcgagctcagcagagcagccgctggggattacccaaatgccaaaggctgaagtgaatctgggggggctgtctagtttagtagtgaacaccccaattacctctgtctccctcagccactcatcgtctgagtctagcaagatgtcagagagcaaagaccaagagaacaactgtgaaaggccaaaagaaagcaacgttttacacccaaacggggagtgccctgtcaaaagtgaacccactgaaccgggagatgaggatgaagaagatgcgtactccaatgaacttgatgacgaggaagtattaggtgaactcaccgatagtattggtaacaaagatttccctctcttaaaccaaagcatttctcctttatcatccagtgtgctaaaatttattgaaaagggtacctcgtcctcctcggcgactgtttctgatgacacagaaaagaaaaaacagactgctgctgttagggccagtggcagtgttgctagtaactatggcatcagtggcaaggactttgcagacgcaagtgccagtaaagacagtgccacagctgctcatccaagtgaaatagcccggggagacgaagacagttcagccactcctcaccagcatggctttaccccgagtactcctggcacaccagggcctggaggagacggctcaccgggcagtggcatcgagtgtccaaagtgcgacactgtgttggggtcttcgaggtctcttggtggtcatatgactatgatgcactcgaggaactcatgcaaaaccctcaaatgtcctaaatgtaactggcactacaaatatcagcagaccctggaggcccatatgaaggagaaacaccctgagccgggtggctcttgtgtttattgtaagactggacagcctcaccccaggcttgcccggggtgagagttacacgtgtggctataaacccttccgttgtgaggtttgtaactactctaccactaccaaaggcaacctcagtattcatatgcagtcggacaagcacctgaacaatgttcagaatctccaaaatggcaatggtgagcaggtgtttggccactctgccccagcccccaacaccagcctcagtggctgcggaacaccctctccgtccaaacccaaacagaaacccacctggcggtgtgaagtttgtgattatgaaaccaatgtcgccaggaacctccgaattcatatgaccagcgaaaagcacatgcataatatgatgcttttgcagcagaacatgaagcagatccagcataatctgcacttgggcctcgccccggcggaagcagagctttatcagtactacctagcccagaacataggcctgaccggaatgaagctggaaaaccctgccgaccctcagctgatgatcaatccattccagctggatccagcgacagcagcggctttggcaccagggctcggagagctgtcaccttatatcagtgacccagcgctgaagctattccagtgtgctgtttgcaacaaattcacctctgacagcctggaggccctaagtgtgcatgtgagcagtgagcgctctctccctgaagaggaatggagggcagtaattggagatatctaccagtgcaagctctgcaactacaacactcagctcaaagccaacttccagctacactgcaagactgataaacatatgcagaaatatcaactggtggctcacattaaagaagggggcaaaagcaatgagtggaggttgaagtgtattgccattggcaaccctgttcacctaaaatgtaacgcctgtgactattacaccaacagtgtggataaattacgcttgcataccaccaatcacaggcacgaggcggccctgaagctctacaagcacttgcagaagcaagagggtgcagtgaatcccgaatcctgctattactactgtgccgtgtgtgattacaccaccaaggtcaagttgaatctggtacaacatgtccgttcggtgaagcatcagcagactgagggcctacggaagctccagctccaccagcaaggcctggcaccagaggaggacaacctcagtgagatcttttttgttaaagattgcccaccaaatgagcttgaaactgcctcattgggagccaggacttgtgatgatgatcttacagagcagcatgaggaggcagaaggagctattaagcctacagcagtggccgaggacgatgaaaaagacacaagtgagagagacaatagtgaaggcaaaaactctaataaagactctgttagtgtggcagggggtacccagccactcctgctggcaaaagaagaggatgttgcaacaaaaaggtcaaaacctacagaggacaataaattctgtcatgaacagttctatcaatgtccttattgtaactacaatagtagggaccaaagtcgtatccagatgcacgtcctatcacagcactcggtgcagccggtcatctgctgtcctctctgtcaggacgtcctcagcaacaaaatgcatctccaactgcatctgacgcatttgcacagtgtgtctccagactgtgtggagaagctgcttatgacagtgcctgtccctgatgtgatgatgccaaacagtatgctactgccagcagctgcctctgagaaatcagagcgggacacacctgcagccgtgacagctgaggggtctgggaaatattcaggtgaaagtccaatggatgacaaaagcatggcaggtctcgaggattcaaaggctaatgtggaagtaaagaatgaggagcagaaaccgactaaagaacccttggaagtctcagaatggaataaaaatagcagtaaggatgtgaaaatccccgacacactgcaagatcaattaaatgaacagcaaaaaaggcaaccgctctctgtttctgaccgtcatgtctacaagtatcgctgtaaccattgtagcttggctttcaaaactatgcagaagcttcagatacattcccagtatcatgcaattcgggctgcgacaatgtgtaacctctgccagcgcagtttccgtacattccaggctttaaaaaaacacttggaagcaggccaccctgaactgagtgaagctgaacttcaacagctatatgcctccttgcccgtgaatggagaactgtgggcagagagcgaaactatgtcccaggatgaccatggcctagagcaggaaatggagagagagtatgaggtggaccacgaagggaaagcaagtcctgtaggaagtgatagtagctctattccagatgacatgggctctgaaccaaagcggaccttaccttttagaaaagggcccaattttacgatggaaaaattccttgatccatctcgtccatataaatgtacagtgtgtaaagagtcattcacccaaaagaacattctcttggtccactataattcagtttctcacttgcataagctgaaaaaagttttgcaggaagcctccagtcctgtcccacaagaaaccaacagcaacacagataacaaaccctacaagtgcagcatctgcaatgttgcatacagccaaagctcaacattggaaatccacatgaggtctgtgctccaccagacaaaggctagggctgcaaagctggagcccagtggtcatgtggctggtgggcacagcattgcagcaaatgtcaacagccctggccaggggatgttagattccatgagtttagcagctgtaaacagcaaagatacccatttagatgccaaagaattaaataaaaagcaaactcctgatttaatctctgctcaacctgcacatcacccaccacagtcaccagcacaaattcagatgcaactacagcacgaattacaacagcaagccgcattctttcagcctcagtttctaaacccagcctttttgcctcattttcctatgaccccagaagcactgctgcagtttcagcagcctcagtttctctttccattttatatacctgggacggagttcagcttggggccagatttgggcttgccaggctctgccacatttgggatgcctggcatgacaggaatggctggctccttgcttgaagacctaaagcagcagattcaaacccaacatcacgttggtcaaactcaactccagatactacagcaacaagcacaacaataccaagccacacagccccagctgcagcctcaaaaacaacagcagcagccaccacctccacagcagcagcagcaacagcaggcaagcaaattattgaaacaagagcaaagtaacatagtgagtgcagactgccaaatcatgaaggatgtgccatcttataaggaggcagaagatatttctgaaaagccagaaaaaccaaagcaggaatttataagtgaaggtgaaggactcaaagaaggcaaagacacaaagaagcaaaaatccttggaaccatccatcccaccaccccgaatagcttcaggggccagaggaaatgctgccaaagcgttattggaaaactttggttttgaactggtcattcagtataacgaaaacaggcagaaggtacagaagaagggcaaaagtggtgaaggcgaaaacactgacaaactagaatgtggaacatgtggtaaattgttttccaatgttcttattttaaagagtcaccaagaacatgtacatgggcaattttttccatatgcagcgctagaaaaatttgctcgtcaatacagggaggcctatgacaagctttatccaatttctccatcttctccagaaacgccgcccccgccacctcctcctcctcccttgcctccggctcctccacagccttcttctatgggtcctgtaaagatccccaacacggtttctactcctctgcaagctccaccacccactcctcccccaccaccaccacctcctcctcctcctcctcctccccccccacctcctccaccttctgctcctccacaggtccaactgccggtttctctggacctgccgctctttccttccattatgatgcaacctgtgcaacaccctgcgcttcctccccagcttgccctgcagctgccacagatggacgcactctctgcagacctcacccaactttgccagcagcagctcggattagatcccaacttcttaagacattctcagttcaaacgcccacggacaagaattacagatgatcagctaaaaatcctgagggcttattttgacattaataattctccaagtgaagaacagatccaggaaatggcagagaaatctggcctctcccaaaaagttatcaaacactggtttagaaatacgctttttaaggaacgacagagaaataaagattcaccatacaacttcagtaaccctcctataacggttttagaagatatcagaattgatccacagcccacctctttagaacattacaaatctgatgcatcattcagtaaaaggtcttctagaacgagatttactgactaccagcttagggttctgcaagacttttttgacacaaacgcttacccaaaagatgatgaaatagaacaactctccactgttctcaatctgcctacccgggttattgttgtatggttccagaatgctcgtcagaaagcacgaaagagttatgagaatcaagcagaaacaaaagataatgaaaaaagagaactcactaatgaacggtacattcgaacaagcaacatgcagtaccagtgtaaaaagtgcaatgtggttttccccaggatctttgacttgattacgcatcagaaaaagcagtgttacaaggatgaagatgatgatgcccaagatgaaagccaaacagaagactccatggatgccactgatcaagtggtatacaagcattgcacagtgtctggccaaacggatgcagctaaaaacgctgctgcccctgcagcaagttctggctctgggaccagcacccccctgattccatcacccaaaccagaacctgagaagacttctccaaaacctgaatatcccgcagaaaagccaaagcagagtgacccctctcccccttctcaaggcaccaaaccagccctgccattagcatcgacttcctcggacccaccacaggcatccacagcccagccacagccacagccacagccaccaaaacaaccccaacttatcggaagacctccctcggcctctcaaacaccggtcccttccagtccactgcaaatttccatgacgtctctccagaacagtctacctccacagttactacaataccaatgtgatcagtgtacagttgccttcccaactctggaactctggcaggaacaccagcacatgcacttccttgctgctcaaaaccaattccttcactctccgttcttggaaaggcccatggacatgccctacatgatatttgaccccaacaatccgctgatgactggacaactgctgggcagttccctcactcaaatgccccctcaggccagttcctcccacaccacagcccccacaacggttgctgcttccctaaaaaggaaactagacgataaagaagataataattgcagtgaaaaagaaggagggaatagcggtgaagaccaacaccgagataaacgcttgagaaccacgatcaccccggaacagctggaaatactctatgaaaaatacttgctggattccaatcctaccagaaaaatgcttgatcatattgcccgcgaagtcgggctgaaaaaaagggtcgtgcaagtctggttccagaatacacgagcgcgggagaggaaaggccagttccgggcggtgggtccagcacagtctcataaacggtgtccgttttgccgagccctgtttaaagcaaagtcggccttagaaagccacattcgctctcggcactggaatgaaggaaagcaggcaggttacagcttgccaccaagccctttaatatccaccgaagatgggggagaaagcccacagaaatacatctattttgattacccatctttgccattaactaaaattgatctatcaagtgagaatgaattggcttctacagtgtcaacacctgttagtaaaacagcagagctgtcaccgaagaatcttttaagcccttcttcttttaaagcagagtgttctgaggatgtagagaatttaaatgcccctcctgctgaggctgggtatgatcaaaataaaaccgattttgatgagacttcatcgattaatacggcaatcagtgacgccaccaccggagacgagggaaacactgaaatggaaagcaccacaggaagttccggagatgtgaaaccggctttgtctcccaaagagccaaaaactctggatactctgccaaaacctgcaaccacacctaccacggaggtctgcgatgacaaatttctcttttctctcacaagcccatccatccatttcaatgacaaagatggcgaccacgaccaaagcttttacatcacagatgacccggatgacaacgccgaccgcagcgaaacgtccagcatagcggacccgagctccccaaatccattcggatccagcaatccctttaaatccaaaagtaatgatcggccgggtcacaagcgttttcgaacgcaaatgagcaatcttcaactcaaggttctcaaggcttgctttagtgactaccgaactccaaccatgcaagaatgtgaaatgttagggaatgagattggtctgcccaaacgcgtagtccaggtgtggttccaaaatgcaagggcaaaggaaaagaaatttaaaattaacatagggaagcctttcatgatcaatcaaggcggaacggaaggcaccaaaccagagtgtaccctctgcggggtgaagtactctgcccgcttgtccatcagagatcacattttctccaaacagcacatttcaaaagtgagggagaccgttggcagtcagctcgatcgggagaaagattacttggctccgaccacggttcggcagctgatggcacagcaagaacttgatcgtataaagaaagcttcagacgtgctgggcttgacggtacagcagccaggcatgatggacagcagttctctccacggcatcagcctgccaacagcctaccccggactccccggccttcctccagtccttctccccggaatgaacggtccatcctccttgccgggatttccacaaaattcaaacactttaacacctcccggtgcaggcatgcttgggtttcctacttcagctacttcgtctcctgccctgtctctcagcagtgcccccaccaaacctttgctgcagactccaccacctccaccacctcctcctcctcctcctccttcatcctctctgtcaggacagcagaccgagcaacagaacaaagaatctgagaaaaagcaaactaagccaaacaaggtgaaaaaaatcaaagaggaggaattagaggccaccaaacccgaaaaacaccccaaaaaagaggaaaaaatctcatctgctctttcagtgttgggcaaagttgtaggtgaaacacatgtcgatcctattcagttgcaggcattacagaatgcaattgctggtgacccagcttcctttataggcggacagttcttgccatactttatccctgggtttgcttcttattttacacctcagctccctggaacagtgcaggggggatacttcccacctgtctgtggcatggagagcctctttccttatggccctacaatgccccagacactggcaggtctgtccccaggtgcactgttgcagcagtaccaacagtatcagcagaacctgcaggagtccctgcaaaagcagcaaaagcaacagcaagaacagcagcagaaaccagttcaggcaaagacatccaaagtagaaagtgaccagccgcaaaactccaacgatgcttcagaaacaaaggaagacaaaagtactgctacagaaagcacaaaagaagaaccccagttagaatccaaaagtgcagacttttcagacacttacgttgttccattcgtcaagtatgagtttatatgcagaaagtgccagatgatgtttactgatgaagacgccgcagtaaatcatcaaaagtccttctgttatttcggtcagcctttgattgacccacaagagacagtgcttcgtgtcccagtcagcaaatatcagtgtcttgcctgtgatgtggctatcagtgggaatgaagcacttagccaacacctccagtcaagcttgcacaaagagaaaacaatcaaacaagcaatgagaaatgccaaagagcatgttagattattacctcactcagtctgctcccctaatcctaacaccacatctacctcgcagtctgcagcttcttctaataacacctatcctcatctttcttgcttctccatgaagtcctggcctaatatccttttccaagcgtctgccaggagagctgcttctcccccttcttctcctccttccctttccttgccttcaacggttacctcaagtttgtgcagcacctcaggggttcaaacctcactacccacagaaagttgttcagatgagtctgacagtgagctgagccagaagctagaagacttagataattctttggaagtgaaggctaagcctgcttctggcctagatggtaatttcaatagcatccgaatggatatgttcagtgtgtaggagtgaagacaggatcccgtgcttaaaaaaataaaaaataaaaaaataaaaaaaaaataagactttaactgcagttccaaagcttctctaacccaaaaattacagtaccaaatgattgactcaggattgtttttcccatattgatatgctggcaatataggatggtatgtaatggacagaactgatgcagatggttgaatgcgcttgtactatatgctaaaatatggaaaaggaaaaaaaaatctcacaagttcttttggaacttgtttcaagccaaaaactctcaagaaagcaaattgcacctcagctggattgatttccaaatgctagcatgtactgtatgggaggatgatccagatgtttcaaagagaatttctcttagtttagttaggtgtaattcagtagctttaaattctcaggtcagaacataacatttctcatttgttaaaagcagcaagaagcctggtaaaactgtgacttttccccaaacgtcaatctttattagaaagcattttctaggtgtgtttagtgtacaaagagactttataacccttactggacaacacacagatccttgagctcacgctgcaggatagtacagttttaccgcagagggaatctggaacagtggaatcatgtgtctgccctgtgtattgcagtttgtattgccacaagctatatttataccagtgtcacccttttcttgtagaatatactaataatctgtgccaactctaccttctcacttttacctctgacgtcattctttttttctgaaagaggtaataattctagttttgatagactctgaggattatgtgaacaggacatttttcatttgtgaatttaatgctatactgtcaaggtacttgcttgtgtctgaactctagtgcacttatgattttgtagaccatgtgaaatttaataagataccttttttttcctttctttgtgtgtagtgcagcaacagtttggtctgcatttgttagaagtttaactcctaacaacccaaagacctatttaacaattggtgcataaatgaaagtagtactgtatacttgaaactgtttaagtacaagttgaacaaaaattatgaaaaggtatatttgcttctcgggaaagcaaagaagctgctttaaaaaataaaaaggggactaaaaatttgttttgtataaagaggttagccctgcgcacgtaggactgaattcagtgatatccctatacactgccatttagtggataggttattgtacttccattcatactctgggcacttgtgttgtattgttctgttacatactttttttaacctgttttgttttatcatatatgcattaaaagtattatctttatcaacatttgctgctactgtgttaacatttttgttttgcttgccatgaatttcaacttccaccacccagtgaattgatttataaattgctatgctttgctgtttttctgttgctgtggaacttaaagaatgtgaaagctgtcaaagggtattttacgaatcacttttgtgtttgatatagtaaaacaatgtgattcattccaaagtaacagaaggttatttgtaagaaagttaaaggcttgtgaacaaagaaagctaagctgttgtacatatttgtagttggctgtgcatggtacaaatttattaatatgaagaaatgcaaaatgtattgcttttgatatttctcttccgagatgaacaagtagcatgtaatgcaactgtttgacagtttaactcaagtcatgcttcaaactgttttaatgatcaaatcaagacacatttcattttacattttattattgtacagtttttgtttcggatgatgatcacagcaatctttattctatacattttatgtgaacttttttaatgtctttaatttggattttttttttttttagtattttaacatttattttaatcctgaagacacttttttgattgtgtttcgtaagagacaacatggcctcctaaggtgcaatcctgccgctatagtgagctaatgtcctgaatccaaaggcttcagaaaattgcttttgcctttttcatgaatgttaagcagcagcattgtgagatcgatctgtcctggcagttaacacgatgtgcaacagtgtgttagcatggaacagaacgcttttcacaaaacaaaggactgttttacaaatgattattccgacagtgtgtcgacataaacttttacaactgcacagcagccaaaaaaagaaaaaaaaaagaaaaaaaactttaactggatggacgttgttagggtgagaaataaaaggacagcctccaaaggttgagaatgagaattgttttttcctggatatcaaagggattatcacagcgcaatcattgtctacacaacatgtactctcaacgcctgggttacataggaaatgcaccctgaggttttaataaaagcccctatggctataactttaaataaactaaaccaaaaatgttattgatgttttatatatagagagtagtctcattagtttttgttactgtaatgtttgaagtctcaaatgcaccgtattacggtaaataacatggttttgaaaacttttttttattttgtcacagacctgttgtcatagttgaaatgatgtttattgtagatggtatttgaacttattcttctggaaatagttcatcaagtatgtttgttgctcattgtgatacattaaaaactgtatctacatattta

SEQ ID NO: 996 - protein, 3571 aa, Homo sapiens
METCDSPPISRQENGQSTSKLCGTTQLDNEVPEKVAGMEPDRENSSTDDNLKTDERKSEALLGFSVENAAATQVTSAKEIPCNECATSFPSLQKYMEHHCPNARLPVLKDDNESEISELEDSDVENLTGEIVYQPDGSAYIIEDSKESGQNAQTGANSKLFSTAMFLDSLASAGEKSDQSASAPMSFYPQIINTFHIASSLGKPFTADQAFPNTSALAGVGPVLHSFRVYDLRHKREKDYLTSDGSAKNSCVSKDVPNNVDLSKFDGCVSDGKRKPVLMCFLCKLSFGYIRSFVTHAVHDHRMTLNDEEQKLLSNKCVSAIIQGIGKDKEPLISFLEPKKSTSVYPHFSTTNLIGPDPTFRGLWSAFHVENGDSLPAGFAFLKGSASTSSSAEQPLGITQMPKAEVNLGGLSSLVVNTPITSVSLSHSSSESSKMSESKDQENNCERPKESNVLHPNGECPVKSEPTEPGDEDEEDAYSNELDDEEVLGELTDSIGNKDFPLLNQSISPLSSSVLKFIEKGTSSSSATVSDDTEKKKQTAAVRASGSVASNYGISGKDFADASASKDSATAAHPSEIARGDEDSSATPHQHGFTPSTPGTPGPGGDGSPGSGIECPKCDTVLGSSRSLGGHMTMMHSRNSCKTLKCPKCNWHYKYQQTLEAHMKEKHPEPGGSCVYCKTGQPHPRLARGESYTCGYKPFRCEVCNYSTTTKGNLSIHMQSDKHLNNVQNLQNGNGEQVFGHSAPAPNTSLSGCGTPSPSKPKQKPTWRCEVCDYETNVARNLRIHMTSEKHMHNMMLLQQNMKQIQHNLHLGLAPAEAELYQYYLAQNIGLTGMKLENPADPQLMINPFQLDPATAAALAPGLGELSPYISDPALKLFQCAVCNKFTSDSLEALSVHVSSERSLPEEEWRAVIGDIYQCKLCNYNTQLKANFQLHCKTDKHMQKYQLVAHIKEGGKSNEWRLKCIAIGNPVHLKCNACDYYTNSVDKLRLHTTNHRHEAALKLYKHLQKQEGAVNPESCYYYCAVCDYTTKVKLNLVQHVRSVKHQQTEGLRKLQLHQQGLAPEEDNLSEIFFVKDCPPNELETASLGARTCDDDLTEQHEEAEGAIKPTAVAEDDEKDTSERDNSEGKNSNKDSVSVAGGTQPLLLAKEEDVATKRSKPTEDNKFCHEQFYQCPYCNYNSRDQSRIQMHVLSQHSVQPVICCPLCQDVLSNKMHLQLHLTHLHSVSPDCVEKLLMTVPVPDVMMPNSMLLPAAASEKSERDTPAAVTAEGSGKYSGESPMDDKSMAGLEDSKANVEVKNEEQKPTKEPLEVSEWNKNSSKDVKIPDTLQDQLNEQQKRQPLSVSDRHVYKYRCNHCSLAFKTMQKLQIHSQYHAIRAATMCNLCQRSFRTFQALKKHLEAGHPELSEAELQQLYASLPVNGELWAESETMSQDDHGLEQEMEREYEVDHEGKASPVGSDSSSIPDDMGSEPKRTLPFRKGPNFTMEKFLDPSRPYKCTVCKESFTQKNILLVHYNSVSHLHKLKKVLQEASSPVPQETNSNTDNKPYKCSICNVAYSQSSTLEIHMRSVLHQTKARAAKLEPSGHVAGGHSIAANVNSPGQGMLDSMSLAAVNSKDTHLDAKELNKKQTPDLISAQPAHHPPQSPAQIQMQLQHELQQQAAFFQPQFLNPAFLPHFPMTPEALLQFQQPQFLFPFYIPGTEFSLGPDLGLPGSATFGMPGMTGMAGSLLEDLKQQIQTQHHVGQTQLQILQQQAQQYQATQPQLQPQKQQQQPPPPQQQQQQQASKLLKQEQSNIVSADCQIMKDVPSYKEAEDISEKPEKPKQEFISEGEGLKEGKDTKKQKSLEPSIPPPRIASGARGNAAKALLENFGFELVIQYNENRQKVQKKGKSGEGENTDKLECGTCGKLFSNVLILKSHQEHVHGQFFPYAALEKFARQYREAYDKLYPISPSSPETPPPPPPPPPLPPAPPQPSSMGPVKIPNTVSTPLQAPPPTPPPPPPPPPPPPPPPPPPPPSAPPQVQLPVSLDLPLFPSIMMQPVQHPALPPQLALQLPQMDALSADLTQLCQQQLGLDPNFLRHSQFKRPRTRITDDQLKILRAYFDINNSPSEEQIQEMAEKSGLSQKVIKHWFRNTLFKERQRNKDSPYNFSNPPITVLEDIRIDPQPTSLEHYKSDASFSKRSSRTRFTDYQLRVLQDFFDTNAYPKDDEIEQLSTVLNLPTRVIVVWFQNARQKARKSYENQAETKDNEKRELTNERYIRTSNMQYQCKKCNVVFPRIFDLITHQKKQCYKDEDDDAQDESQTEDSMDATDQVVYKHCTVSGQTDAAKNAAAPAASSGSGTSTPLIPSPKPEPEKTSPKPEYPAEKPKQSDPSPPSQGTKPALPLASTSSDPPQASTAQPQPQPQPPKQPQLIGRPPSASQTPVPSSPLQISMTSLQNSLPPQLLQYQCDQCTVAFPTLELWQEHQHMHFLAAQNQFLHSPFLERPMDMPYMIFDPNNPLMTGQLLGSSLTQMPPQASSSHTTAPTTVAASLKRKLDDKEDNNCSEKEGGNSGEDQHRDKRLRTTITPEQLEILYEKYLLDSNPTRKMLDHIAREVGLKKRVVQVWFQNTRARERKGQFRAVGPAQSHKRCPFCRALFKAKSALESHIRSRHWNEGKQAGYSLPPSPLISTEDGGESPQKYIYFDYPSLPLTKIDLSSENELASTVSTPVSKTAELSPKNLLSPSSFKAECSEDVENLNAPPAEAGYDQNKTDFDETSSINTAISDATTGDEGNTEMESTTGSSGDVKPALSPKEPKTLDTLPKPATTPTTEVCDDKFLFSLTSPSIHFNDKDGDHDQSFYITDDPDDNADRSETSSIADPSSPNPFGSSNPFKSKSNDRPGHKRFRTQMSNLQLKVLKACFSDYRTPTMQECEMLGNEIGLPKRVVQVWFQNARAKEKKFKINIGKPFMINQGGTEGTKPECTLCGVKYSARLSIRDHIFSKQHISKVRETVGSQLDREKDYLAPTTVRQLMAQQELDRIKKASDVLGLTVQQPGMMDSSSLHGISLPTAYPGLPGLPPVLLPGMNGPSSLPGFPQNSNTLTPPGAGMLGFPTSATSSPALSLSSAPTKPLLQTPPPPPPPPPPPPSSSLSGQQTEQQNKESEKKQTKPNKVKKIKEEELEATKPEKHPKKEEKISSALSVLGKVVGETHVDPIQLQALQNAIAGDPASFIGGQFLPYFIPGFASYFTPQLPGTVQGGYFPPVCGMESLFPYGPTMPQTLAGLSPGALLQQYQQYQQNLQESLQKQQKQQQEQQQKPVQAKTSKVESDQPQNSNDASETKEDKSTATESTKEEPQLESKSADFSDTYVVPFVKYEFICRKCQMMFTDEDAAVNHQKSFCYFGQPLIDPQETVLRVPVSKYQCLACDVAISGNEALSQHLQSSLHKEKTIKQAMRNAKEHVRLLPHSVCSPNPNTTSTSQSAASSNNTYPHLSCFSMKSWPNILFQASARRAASPPSSPPSLSLPSTVTSSLCSTSGVQTSLPTESCSDESDSELSQKLEDLDNSLEVKAKPASGLDGNFNSIRMDMFSV

SEQ ID NO: 997 - DNA, 724 bp, Homo sapiens
caaaggtcagaggtaaagaagtcatggcggcgctgtgtcggacccgtgctgtggctgccgagagccattttctgcgagtgtttctcttcttcaggccctttcggggtgtaggcactgagagtggatccgaaagtggtagttccaatgccaaggagcctaagacgcgcgcaggcggtttcgcgagcgcgttggagcggcactcggagcttctacagaaggtggagcccctacagaagggttctccaaaaaatgtggaatcctttgcatctatgctgagacattctcctcttacacagatgggacctgcaaaggataaactggtcattggacggatctttcatattgtggagaatgatctgtacatagattttggtggaaagtttcattgtgtatgtagaagaccagaagtggatggagagaaataccagaaaggaaccagggtccggttgcggctattagatcttgaacttacgtctaggttcctgggagcaacaacagatacaactgtactagaggctaatgcagttctcttgggaatccaggagagtaaagactcaagatcgaaagaagaacatcatgaaaaataaatgaactttgcttagtggattgactcctttgctgaagtcagttattcatcaagaatgcaattagactaattgtgaataaatgattgaatgaagatataataaataaaagctataattataaaaaaaaaaaaaaaaaa

SEQ ID NO: 998 - protein, 187 aa, Homo sapiens
MAALCRTRAVAAESHFLRVFLFFRPFRGVGTESGSESGSSNAKEPKTRAGGFASALERHSELLQKVEPLQKGSPKNVESFASMLRHSPLTQMGPAKDKLVIGRIFHIVENDLYIDFGGKFHCVCRRPEVDGEKYQKGTRVRLRLLDLELTSRFLGATTDTTVLEANAVLLGIQESKDSRSKEEHHEK

SEQ ID NO: 999 - DNA, 4250 bp, Homo sapiens
gcccttctttgttgactgaggaaagctcgctccctgcccaggtttttcattgttgatcgaaattaacaccaggtggtgaatagagcccctcctaaggttgctcaggataaatcatttattaaataggtctgcttatcaggaggggcgtgaaggctcccaaaaggaaatgctggcacctgggcccagaagccagggcctctaactcctggggttgatttcttcagtgaagttgcaccctacaaagggaatatggccaaagcggcactcaactgaaggctgatatcaggcgattagacagccatgcattctgcgtttgtctggaatggattgtagagagatggacttatatgaggactaccagtccccgtttgattttgatgcaggagtgaacaaaagctatctctacttgtctcctagtggaaattcatctccacccggatcacctactcttcagaaatttggtctgctgagaacagacccagtccctgaggaaggagaagatgttgctgccacgatcagtgccacagagaccctctcggaagaggagcaggaagagctaagaagagaacttgcaaaggtagaagaagaaatccagactctgtctcaagtgttagcagcaaaagagaagcatctagcagagatcaagcggaaacttggaatcaattctctacaggaactaaaacagaacattgccaaagggtggcaagacgtgacagcaacatctgcttacaagaagacatctgaaaccttatcccaggctggacagaaggcctcagctgctttttcgtctgttggctcagtcatcaccaaaaagctggaagatgtaaaaaactccccaacttttaaatcatttgaagaaaaggtcgaaaacttaaagtctaaagtagggggaaccaagcctgctggtggtgattttggagaagtcttgaattcggctgcaaatgctagtgccaccaccacggagcctcttccagaaaagacacaggagagcctgtgagattcctacctttgttctgctacccactgccagatgctgcaagcgaggtccaagcacatcttgtcaacatgcattgccatgaatttctaccagatgtgcttttatttagctttacatattcctttgaccaaatagtttgtgggttaaacaaaatgaaaatatcttcacctctattcttgggaaacaccctttagtgtacatttatgttcctttatttaggaaacaccattataaaaacacttatagtaaatggggacattcactataatgatctaagaagctacagattgtcatagttgttttcctgctttacaaaattgctccagatctggaatgccagtttgacctttgtcttctataatatttcctttttttcccctctttgaatctctgtatatttgattcttaactaaaattgttctcttaaatattctgaatcctggtaattaaaagtttgggtgtattttctttacctccaaggaaagaactactagctacaaaaaatattttggaataagcattgttttggtataaggtacatattttggttgaagacaccagactgaagtaaacagctgtgcatccaatttattatagttttgtaagtaacaatatgtaatcaaacttctaggtgacttgagagtggaacctcctatatcattatttagcaccgtttgtgacagtaaccatttcagtgtattgtttattataccacttatatcaacttatttttcaccaggttaaaattttaatttctacaaaataacattctgaatcaagcacactgtatgttcagtaggttgaactatgaacactgtcatcaatgttcagttcaaaagcctgaaagtttagatctagaagctggtaaaaatgacaatatcaatcacattaggggaaccattgttgtcttcacttaatccatttagcactatttaaaataagcacaccaagttatatgactaatataacttgaaaattttttatactgaggggttggtgataactcttgaggatgtaatgcattaataaaaatcaactcatcattttctacttgttttcaatgtgttggaaactgtaaaatgatactgtagaacctgtctcctactttgaaaactgaatgtcagggctgagtgaatcaaagtgtctagacatatttgcatagaggccaaggtattctattctaataactgcttactcaacactaccaccttttccttatactgtatatgattatggcctacaatgttgtatttgttatttattaaattgtgattgttttattattgtttatgccaaatgttaactgccaagcttggagtgacctaaagcattttttaaaagcatggctagatttacttcagtataaattatcttatgaaaaccaaattttaaaagccacaggtgttgattgttataaaataacatgctgccattcttgattgctagagtttttgttagtactttggatgcaattaaaactatgtgctatcacatgtgaaaagcttaataaattccatctatcagtagtataggtctcaatatttattatgagaccagtggtctggaaacagcttgttgtaccgaatcaactggagtctatgcttaaaaaaaaaaaatttttttttaaccatccttaaattattgcttaatggtatcatattaacatattctaaataagggctttaaggcacaggctgttgaagcattttctcagaggagtggatctgtagaagtctgtctttctatagaaatattgtgcttactcaagtgttaaattattttttctatgaactagtctacttcttaaaattcaaacatattcttttgatcacattgtttcttgagcatcctgccctgctactaacttttcaacaaggcaaaatggagtaaagtggcaatttctttagatgagtgaaataccctcaagtctcttttctgcccaaaaagggaaaagtgatagaaatgggggtggcaagtggggtgagtggatgaaggtgggtattgggggtggctgtgaaagaaaataatggagaatcacttttctagacatctacctatacttaatctaagaaacaaagtaatctactgtaaagtactctgccccttgaaagaagtattaaaaagagtgaggatggatttagaaaaaaacatgaatttagaaatattcaaaatggtttttgtggcagattcaatattatgaattcacagatatttaaagaatgagaaacatagtaattagtagaaatgccagaaacagttcctggttcctcttgtgtttgacactaagaaaatagcaagagtgtgaaatctcagatacttatgaaatctcacagatgtaaggactcaagtgtagaagaaaatatccccttcttacaaaaagaaatgtcaatttatggagtttgtgggaaatagggcaagaattcttatgcttatgagagccaagtagtcagtggaagagagtagagctcaaaactggattatcaccttagcaacttagaatagtttgaaatagaaaaaaagtatttaatttggatctggatctgttaagatatgcacagtctattttttgtatagtattggaaaataaaaatgctataatttgggtatgggttcttttgtatacattacctgcccattgaggaaaggggcaagtccattatgcaacttctctccaaacccttcatattctggatatgatacttaaagagccatgagcagctacattctgcctatcagaaggcatttattaaatgactgcttgctgaagatgtgtccaaagagatcctacattaaggtcatttgtcagaatgatgtttgtgtttgtttagagttggctgacctccaactcctggggtcaaggaatcctactgccttagcttcccaaatagctaggactataggcatgcacccggccatgtgttttatttatagctcttaaagcccagatgaagaaatcacatttttgcccatagtgaagaaacatttggccattgattagtccttattttcagtgactgtcctgttttcattagattagagagaccctgtgtgggccacagttaatataaaccattatcacttttaagtaaacctgcacatcttagatttcataatttccttattgttctgactcaaaatgaactaagagcttttcactttttgtttgtaagttctcagagagtcgggtctgcaagtgcttttgcctgccaggattttgtactcaaataaatgctatttggcaactaaaaaaaaa

SEQ ID NO: 1000 - protein, 224 aa, Homo sapiens
MDCREMDLYEDYQSPFDFDAGVNKSYLYLSPSGNSSPPGSPTLQKFGLLRTDPVPEEGEDVAATISATETLSEEEQEELRRELAKVEEEIQTLSQVLAAKEKHLAEIKRKLGINSLQELKQNIAKGWQDVTATSAYKKTSETLSQAGQKASAAFSSVGSVITKKLEDVKNSPTFKSFEEKVENLKSKVGGTKPAGGDFGEVLNSAANASATTTEPLPEKTQESL

SEQ ID NO: 1001 - DNA, 4035 bp, Homo sapiens
gggcggcgccgccgcgcccgacgcctctgggggtggggacttcgcgggagtcgccggcggaggcgaggaggagctctgcgcggcgcggcgggcgatccgagccgggacgggctgcaggcgggggtgctgcagaggacacgaggcggcgggctggagacatggaccgcggcgagcaaggtctgctgagaacagacccagtccctgaggaaggagaagatgttgctgccacgatcagtgccacagagaccctctcggaagaggagcaggaagagctaagaagagaacttgcaaaggtagaagaagaaatccagactctgtctcaagtgttagcagcaaaagagaagcatctagcagagatcaagcggaaacttggaatcaattctctacaggaactaaaacagaacattgccaaagggtggcaagacgtgacagcaacatctgcttacaagaagacatctgaaaccttatcccaggctggacagaaggcctcagctgctttttcgtctgttggctcagtcatcaccaaaaagctggaagatgtaaaattgcaagccttttcacattcctttagtatacgttccattcagcattcaattagcatgcctgctatgagaaactccccaacttttaaatcatttgaagaaaaggtcgaaaacttaaagtctaaagtagggggaaccaagcctgctggtggtgattttggagaagtcttgaattcggctgcaaatgctagtgccaccaccacggagcctcttccagaaaagacacaggagagcctgtgagattcctacctttgttctgctacccactgccagatgctgcaagcgaggtccaagcacatcttgtcaacatgcattgccatgaatttctaccagatgtgcttttatttagctttacatattcctttgaccaaatagtttgtgggttaaacaaaatgaaaatatcttcacctctattcttgggaaacaccctttagtgtacatttatgttcctttatttaggaaacaccattataaaaacacttatagtaaatggggacattcactataatgatctaagaagctacagattgtcatagttgttttcctgctttacaaaattgctccagatctggaatgccagtttgacctttgtcttctataatatttcctttttttcccctctttgaatctctgtatatttgattcttaactaaaattgttctcttaaatattctgaatcctggtaattaaaagtttgggtgtattttctttacctccaaggaaagaactactagctacaaaaaatattttggaataagcattgttttggtataaggtacatattttggttgaagacaccagactgaagtaaacagctgtgcatccaatttattatagttttgtaagtaacaatatgtaatcaaacttctaggtgacttgagagtggaacctcctatatcattatttagcaccgtttgtgacagtaaccatttcagtgtattgtttattataccacttatatcaacttatttttcaccaggttaaaattttaatttctacaaaataacattctgaatcaagcacactgtatgttcagtaggttgaactatgaacactgtcatcaatgttcagttcaaaagcctgaaagtttagatctagaagctggtaaaaatgacaatatcaatcacattaggggaaccattgttgtcttcacttaatccatttagcactatttaaaataagcacaccaagttatatgactaatataacttgaaaattttttatactgaggggttggtgataactcttgaggatgtaatgcattaataaaaatcaactcatcattttctacttgttttcaatgtgttggaaactgtaaaatgatactgtagaacctgtctcctactttgaaaactgaatgtcagggctgagtgaatcaaagtgtctagacatatttgcatagaggccaaggtattctattctaataactgcttactcaacactaccaccttttccttatactgtatatgattatggcctacaatgttgtatttgttatttattaaattgtgattgttttattattgtttatgccaaatgttaactgccaagcttggagtgacctaaagcattttttaaaagcatggctagatttacttcagtataaattatcttatgaaaaccaaattttaaaagccacaggtgttgattgttataaaataacatgctgccattcttgattgctagagtttttgttagtactttggatgcaattaaaactatgtgctatcacatgtgaaaagcttaataaattccatctatcagtagtataggtctcaatatttattatgagaccagtggtctggaaacagcttgttgtaccgaatcaactggagtctatgcttaaaaaaaaaaaatttttttttaaccatccttaaattattgcttaatggtatcatattaacatattctaaataagggctttaaggcacaggctgttgaagcattttctcagaggagtggatctgtagaagtctgtctttctatagaaatattgtgcttactcaagtgttaaattattttttctatgaactagtctacttcttaaaattcaaacatattcttttgatcacattgtttcttgagcatcctgccctgctactaacttttcaacaaggcaaaatggagtaaagtggcaatttctttagatgagtgaaataccctcaagtctcttttctgcccaaaaagggaaaagtgatagaaatgggggtggcaagtggggtgagtggatgaaggtgggtattgggggtggctgtgaaagaaaataatggagaatcacttttctagacatctacctatacttaatctaagaaacaaagtaatctactgtaaagtactctgccccttgaaagaagtattaaaaagagtgaggatggatttagaaaaaaacatgaatttagaaatattcaaaatggtttttgtggcagattcaatattatgaattcacagatatttaaagaatgagaaacatagtaattagtagaaatgccagaaacagttcctggttcctcttgtgtttgacactaagaaaatagcaagagtgtgaaatctcagatacttatgaaatctcacagatgtaaggactcaagtgtagaagaaaatatccccttcttacaaaaagaaatgtcaatttatggagtttgtgggaaatagggcaagaattcttatgcttatgagagccaagtagtcagtggaagagagtagagctcaaaactggattatcaccttagcaacttagaatagtttgaaatagaaaaaaagtatttaatttggatctggatctgttaagatatgcacagtctattttttgtatagtattggaaaataaaaatgctataatttgggtatgggttcttttgtatacattacctgcccattgaggaaaggggcaagtccattatgcaacttctctccaaacccttcatattctggatatgatacttaaagagccatgagcagctacattctgcctatcagaaggcatttattaaatgactgcttgctgaagatgtgtccaaagagatcctacattaaggtcatttgtcagaatgatgtttgtgtttgtttagagttggctgacctccaactcctggggtcaaggaatcctactgccttagcttcccaaatagctaggactataggcatgcacccggccatgtgttttatttatagctcttaaagcccagatgaagaaatcacatttttgcccatagtgaagaaacatttggccattgattagtccttattttcagtgactgtcctgttttcattagattagagagaccctgtgtgggccacagttaatataaaccattatcacttttaagtaaacctgcacatcttagatttcataatttccttattgttctgactcaaaatgaactaagagcttttcactttttgtttgtaagttctcagagagtcgggtctgcaagtgcttttgcctgccaggattttgtactcaaataaatgctatttggcaactaaaaaaaaa

SEQ ID NO: 1002 - protein, 207 aa, Homo sapiens
MDRGEQGLLRTDPVPEEGEDVAATISATETLSEEEQEELRRELAKVEEEIQTLSQVLAAKEKHLAEIKRKLGINSLQELKQNIAKGWQDVTATSAYKKTSETLSQAGQKASAAFSSVGSVITKKLEDVKLQAFSHSFSIRSIQHSISMPAMRNSPTFKSFEEKVENLKSKVGGTKPAGGDFGEVLNSAANASATTTEPLPEKTQESL

SEQ ID NO: 1003 - DNA, 3966 bp, Homo sapiens
gggcggcgccgccgcgcccgacgcctctgggggtggggacttcgcgggagtcgccggcggaggcgaggaggagctctgcgcggcgcggcgggcgatccgagccgggacgggctgcaggcgggggtgctgcagaggacacgaggcggcgggctggagacatggaccgcggcgagcaaggtctgctgagaacagacccagtccctgaggaaggagaagatgttgctgccacgatcagtgccacagagaccctctcggaagaggagcaggaagagctaagaagagaacttgcaaaggtagaagaagaaatccagactctgtctcaagtgttagcagcaaaagagaagcatctagcagagatcaagcggaaacttggaatcaattctctacaggaactaaaacagaacattgccaaagggtggcaagacgtgacagcaacatctgcttacaagaagacatctgaaaccttatcccaggctggacagaaggcctcagctgctttttcgtctgttggctcagtcatcaccaaaaagctggaagatgtaaaaaactccccaacttttaaatcatttgaagaaaaggtcgaaaacttaaagtctaaagtagggggaaccaagcctgctggtggtgattttggagaagtcttgaattcggctgcaaatgctagtgccaccaccacggagcctcttccagaaaagacacaggagagcctgtgagattcctacctttgttctgctacccactgccagatgctgcaagcgaggtccaagcacatcttgtcaacatgcattgccatgaatttctaccagatgtgcttttatttagctttacatattcctttgaccaaatagtttgtgggttaaacaaaatgaaaatatcttcacctctattcttgggaaacaccctttagtgtacatttatgttcctttatttaggaaacaccattataaaaacacttatagtaaatggggacattcactataatgatctaagaagctacagattgtcatagttgttttcctgctttacaaaattgctccagatctggaatgccagtttgacctttgtcttctataatatttcctttttttcccctctttgaatctctgtatatttgattcttaactaaaattgttctcttaaatattctgaatcctggtaattaaaagtttgggtgtattttctttacctccaaggaaagaactactagctacaaaaaatattttggaataagcattgttttggtataaggtacatattttggttgaagacaccagactgaagtaaacagctgtgcatccaatttattatagttttgtaagtaacaatatgtaatcaaacttctaggtgacttgagagtggaacctcctatatcattatttagcaccgtttgtgacagtaaccatttcagtgtattgtttattataccacttatatcaacttatttttcaccaggttaaaattttaatttctacaaaataacattctgaatcaagcacactgtatgttcagtaggttgaactatgaacactgtcatcaatgttcagttcaaaagcctgaaagtttagatctagaagctggtaaaaatgacaatatcaatcacattaggggaaccattgttgtcttcacttaatccatttagcactatttaaaataagcacaccaagttatatgactaatataacttgaaaattttttatactgaggggttggtgataactcttgaggatgtaatgcattaataaaaatcaactcatcattttctacttgttttcaatgtgttggaaactgtaaaatgatactgtagaacctgtctcctactttgaaaactgaatgtcagggctgagtgaatcaaagtgtctagacatatttgcatagaggccaaggtattctattctaataactgcttactcaacactaccaccttttccttatactgtatatgattatggcctacaatgttgtatttgttatttattaaattgtgattgttttattattgtttatgccaaatgttaactgccaagcttggagtgacctaaagcattttttaaaagcatggctagatttacttcagtataaattatcttatgaaaaccaaattttaaaagccacaggtgttgattgttataaaataacatgctgccattcttgattgctagagtttttgttagtactttggatgcaattaaaactatgtgctatcacatgtgaaaagcttaataaattccatctatcagtagtataggtctcaatatttattatgagaccagtggtctggaaacagcttgttgtaccgaatcaactggagtctatgcttaaaaaaaaaaaatttttttttaaccatccttaaattattgcttaatggtatcatattaacatattctaaataagggctttaaggcacaggctgttgaagcattttctcagaggagtggatctgtagaagtctgtctttctatagaaatattgtgcttactcaagtgttaaattattttttctatgaactagtctacttcttaaaattcaaacatattcttttgatcacattgtttcttgagcatcctgccctgctactaacttttcaacaaggcaaaatggagtaaagtggcaatttctttagatgagtgaaataccctcaagtctcttttctgcccaaaaagggaaaagtgatagaaatgggggtggcaagtggggtgagtggatgaaggtgggtattgggggtggctgtgaaagaaaataatggagaatcacttttctagacatctacctatacttaatctaagaaacaaagtaatctactgtaaagtactctgccccttgaaagaagtattaaaaagagtgaggatggatttagaaaaaaacatgaatttagaaatattcaaaatggtttttgtggcagattcaatattatgaattcacagatatttaaagaatgagaaacatagtaattagtagaaatgccagaaacagttcctggttcctcttgtgtttgacactaagaaaatagcaagagtgtgaaatctcagatacttatgaaatctcacagatgtaaggactcaagtgtagaagaaaatatccccttcttacaaaaagaaatgtcaatttatggagtttgtgggaaatagggcaagaattcttatgcttatgagagccaagtagtcagtggaagagagtagagctcaaaactggattatcaccttagcaacttagaatagtttgaaatagaaaaaaagtatttaatttggatctggatctgttaagatatgcacagtctattttttgtatagtattggaaaataaaaatgctataatttgggtatgggttcttttgtatacattacctgcccattgaggaaaggggcaagtccattatgcaacttctctccaaacccttcatattctggatatgatacttaaagagccatgagcagctacattctgcctatcagaaggcatttattaaatgactgcttgctgaagatgtgtccaaagagatcctacattaaggtcatttgtcagaatgatgtttgtgtttgtttagagttggctgacctccaactcctggggtcaaggaatcctactgccttagcttcccaaatagctaggactataggcatgcacccggccatgtgttttatttatagctcttaaagcccagatgaagaaatcacatttttgcccatagtgaagaaacatttggccattgattagtccttattttcagtgactgtcctgttttcattagattagagagaccctgtgtgggccacagttaatataaaccattatcacttttaagtaaacctgcacatcttagatttcataatttccttattgttctgactcaaaatgaactaagagcttttcactttttgtttgtaagttctcagagagtcgggtctgcaagtgcttttgcctgccaggattttgtactcaaataaatgctatttggcaactaaaaaaaaa

SEQ ID NO: 1004 - protein, 184 aa, Homo sapiens
MDRGEQGLLRTDPVPEEGEDVAATISATETLSEEEQEELRRELAKVEEEIQTLSQVLAAKEKHLAEIKRKLGINSLQELKQNIAKGWQDVTATSAYKKTSETLSQAGQKASAAFSSVGSVITKKLEDVKNSPTFKSFEEKVENLKSKVGGTKPAGGDFGEVLNSAANASATTTEPLPEKTQESL

SEQ ID NO: 1005 - DNA, 4303 bp, Homo sapiens
acacaagctcaggagtagctgccatgcacatcagtgtccattaaaatgacttgtagcaaatctctacgttcaaagtctaactttgacagacaaccttacttccagcgaagtctactcccctccctccggagggaagaatgggctgcggttaagcgtttgccctggtgtcagggccaactgcttcgaagcgccagactttcggagactgtgggtggggagcattaagcgggaaatgaccttcacatttcagtcagaggacttaaaacgtgactgtggtaaaaaaatgtctcatcaacacgtgttttccttggccatggaggaagatgtgaaaacagcagacaccaaaaaagccagccggatccttgaccatgaaaaagaaaacactcgctccatctgtctccttgagcaaaaaagaaaagttgtttcctccaacattgatgttcctccagcaaggaaatcttcagaggaactagacatggacaaggtgacagcagcaatggtactaaccagcttgtcgactagccctttggttcgaagtcctcccgtgcggccgaacgagagcctcagcggatcctggaaggagggcggctgcgtgccttccagcaccagcagcagcggctactggagctggagcgcccccagcgaccagtccaacccgtccacgccgtcgccgccgctctcggctgacagcttcaagcccttccgcagccccgcgcagccagacgacggcatcgacgaggcggaggccagcaacctgctcttcgacgagcccattcccaggaaaagaaagaattccatgaaggtgatgttcaaatgcctctggaaaaactgtgggaaggtgctgagcactgcagcaggtatccagaaacacatccgaaccatccatctggggcgcgttggagactctgactacagtgatggagaagaggacttttactacactgagatcaagctcaacacagactcagtggcagacgggctgagcagcctggccccggtctcaccttcccagtccctggcttcacctcctactttccccatcccagattcaagccgaacagaaactccttgtgccaaaacggagactaagttgatgacgccgttgagccgctcagctcccaccaccctctacctcgtgcacactgaccatgcttaccaggccacaccccctgtgaccattccaggatcggccaagttcacccccaatggcagcagcttcagcatttcctggcaatctcctccggtcactttcacaggcatcccagtgtcacccacacatcatccggtgggcacaggagagcagagacagcatgcgcacacggtcctgtcctccccacccagaggcacagtcagcttaaggaagcccaggggagagggcaaaaagtgtcggaaggtgtacgggatggagaaccgagacatgtggtgtaccgcctgccgctggaagaaggcctgccagaggttcctcgactgagagacccccaggcagaggggctcagggccctgagccgctcctgccctggcctgccactgcaggtgttggaaagagcttttcctactgaataaaacacagttgaagccaggaaaagccctttcaggaaccttggaggaataacagcaaaaacacagaaaaattgtttaagtcaccacctatgacaaaagaaagttgctcttactgagaacccagcttggagcagctataactagttttttttccttcaaaagaaaagtcaactttttttgctgtatgtctagacttaaaactgtggacttctgtagcaattgaaccaacaaagcccattttacctagaaaggaggcatattttgataagctttctgaattatgccattttcaagatttttttgacacttaaaaaacaagctacaggttattcagtagcatttgtacaaagatcaatacttacttttgttgtgaataatcttttccgtatcttccatttgacttcttggagcagtatatgtcaggatgtgttgcaagacagcgcagcactctgggcatcttttctatggctttttgtttgtttttcttttaagaatggccccacactgaaccatggtagagctattagtttgtagggccccagatggcataaactcgagaagggattgtccacggaaatcaccagcagacttcagcccgaagctgagttcaggaagtccagctgtcactgttgggaaacatctaggagtcttccttggatccataagaagctcttcccctaaaggcagcacagctaactctactctctacctgccacaactcagtcaagaattggcacctgtagccatctgggtaagcctcgatgcttctttcagggatgtgacacaaatggcaactcggagctatttgttactgcttgtctgtcaagattgtagccaggttaatgggtcattttccttctctccagactccaccactgactgatttcagaagaggtagagaactccaaactgtcccagcaggtttgctttagacaacagagcacagcccacatggccctacctgttcagaaagtcatgttagatcaacaaaccacttccattctgagtgcacttttataggttttatgctttagcatgtccgggagatgagttaattaacaatataaacattatgtgagtaaatggaaggtccaaactttaagtttttcttataaaaatattggagctattcatttaagaatttgctcaaaagggaacataacgccaaaaggaaaatgcatgtaggtataggaatttctcagtttagtagggccagggcttgcactatgttccatttattgggcttcgtaacttacttgcttgtttgtttgggggatagtggtgtggggagaggggagtcgtcaagccctataaataagctcattctctatctacccgactctcaattgccctgctaaagagttatttctcctatacctatgcaaagtaggaagagcaccttataggaggcactgtatagggacaggggacatgggatcagccataggaatgttaaatgaaattgcacagaggaaagtttaatatatgtctagagattatacatacacttttttaagcgtaaaaagaagacatctagtaatgacagatattctttttatatacaagcaaaagaaagtataaggaggttctacagtgcaacatccacaatctgtgcattcacatattatgggacttttattttttaaactctcatataaattttttaaaattactccttggaagagatcctggtttttttcttcatttatttttttctttaaaaacatttattttaagagaagagaaaaagagcttcatctaattttgcatcttgattaccaatcagtactagtcacagcaccagcaatactgtatgttttagactgacaaggtcagccaggaaatggcatttttttaaacgcagaaatgtgtttgtttcctctactctaacacgtcctttctcctcctggtgtcctgtcaccccccatgcagcaccactgatgcgagatgatgctctggcctggtccaggaagccctgagccatgggcagattgcccagtggccttgggcggccagagcttgtcacctgtttaaacaagttcaccatgtgtttaaatgacagggcacagtcctggaccagaggtttttctcttcagcaaagctccctggcccttgatcgttggactgttactaatagaaaaagattcaagtcatgaagtataaaatccatcccccatcccagaactttgaaacacaaggagggagagatctttgctatggagcagtcctggagcaaagccccgtggcttccacccccagatatataccccataagtagtgctgagctccagcttagctgagccaagctcagtccttatctggtgttcagccagtgcacaggtataagcagaactacagagctgaatgtagcttccctgggatctcttctcctttctaaagcatttttcacacagttctgtacctcctacccaagttggggctgctttctgcctgctagcccacggctctgtgtactttcttttctggcttcaggtgcagacagaccctcagtaccttcctggacacagacacatattccctggaccaaggcgtggaataactagtagaccaccaagccacaggtggctggtcttgaagaaaagggattatactccttacaggccacccagaaagctatgaattccaatatacaccactgatcgtgcaagttagggttttttttttttaaacgtagcattattttgttatattttggaactaaatgaagtgccaaattaaccag

SEQ ID NO: 1006 - protein, 412 aa, Homo sapiens
MTFTFQSEDLKRDCGKKMSHQHVFSLAMEEDVKTADTKKASRILDHEKENTRSICLLEQKRKVVSSNIDVPPARKSSEELDMDKVTAAMVLTSLSTSPLVRSPPVRPNESLSGSWKEGGCVPSSTSSSGYWSWSAPSDQSNPSTPSPPLSADSFKPFRSPAQPDDGIDEAEASNLLFDEPIPRKRKNSMKVMFKCLWKNCGKVLSTAAGIQKHIRTIHLGRVGDSDYSDGEEDFYYTEIKLNTDSVADGLSSLAPVSPSQSLASPPTFPIPDSSRTETPCAKTETKLMTPLSRSAPTTLYLVHTDHAYQATPPVTIPGSAKFTPNGSSFSISWQSPPVTFTGIPVSPTHHPVGTGEQRQHAHTVLSSPPRGTVSLRKPRGEGKKCRKVYGMENRDMWCTACRWKKACQRFLD

SEQ ID NO: 1007 - DNA, 2919 bp, Homo sapiens
tccccgtcgccgccgccgccgcctcgccagccagagttgggctccgtgggcttcccccctcgcagcctcggtccttccccgctgcctgcaagtcagcctggctccgagtcacgtgtcagtgcctgaggcagagactgcgagaaaaaaacgcgcttcattccttcttccaccgccatactgtattttatactaaatctcatttttattccaacattttactcccgctcggtgagtaccttctcagtggcattcttgtcctattcttttttttgtccttttttttggttttttgttttttttgtttttgttttttttctttttttccacttctttgattattgtttatatttgggaaagctggaggagcatggttttgagccttttcctgaatccaagtttttctagcatgcgatcgttctgtagacaaggcgctgtgtctcggagtccgcggcgaccgtgcccgctgggagcgtctcccaagtccagcaaaatgtgcaactggttttatggaaaaagcgatgtgaagtatggtgcctatttttttcctttgtaaaaataaaaagcatgtttctaactctttttttgcatactctttttctgataacatttttgtataggtgggattttacggcagtgtttacaagtttgtggtcttgcaatactggtgcaaaccactgagcaaagacattaattttatattttttgtgccctttttggaagccggtgaaaacaaattcgttttttttccctcctgtttttgatacccattgataacatgaaacttttcttacagctggtgattgggatcatttttaagcaaaatacttttttcctcctttaaattaactatgacttttgcacatttgacttttttaaaaaaccgagataattttatgatagatatcctgatatctatatctatattgtcccttatttctcccccttccctccccgtaaatcaattttcaaatgatggcagtggaaggtttttctggaaaaaaaaaaatgaagtgcggtttggtttccttgtcaacggaggatgaagtgaacagctgagcagctcgcagagagcaggattaaagcaaggagagccaatcatgactggcaaaacacagaccagcaacgtcaccaataagaatgaccccaagtccatcaactcccgtgttttcatcggcaatctaaatacggcaattgtcaagaaagttgacattgaagccattttttcaaagtatggaaaaatagttggatgttccgttcacaaaggttatgcatttgtacagtacatgagtgagcgacatgcaagagctgcagtggctggagaaaatgccagagtcatcgccggccaaccacttgatatcaacatggcaggagagcccaaaccatacagaccaaaacctggaaacaagaggcccctttctgcactttacagacttgaatcaaaggaacctttcctgtctgttggcggttatgtctttgactatgattactacagagatgatttctacaatcggttatttgattaccacgggcgtgtgcctccacctccccgtgcagtaattccgctgaagcgtcccagagtggcagtcacaacgactcgcagggggaaaggagtcttttccatgaaaggtggatcgagatctactgccagtgggtcaacaggttctaaattgaaatcagatgagttacagaccatcaagaaagaattaacccagatcaaaactaaaattgactccttgctagggcgcctggagaagattgagaaacagcagaaggcggaggcagaagctcagaagaagcaattggaagagagtctagtgctgatccaagaggaatgtgtgtcagagattgcagatcactctacagaggagcctgctgaaggagggccagatgccgatggagaagagatgacagatgggatagaggaggacttcgatgaagatgggggtcatgagctgtttctacagataaagtgatctgaaataacgcatgatgccacaaagcagaaaagagaaactgtgacaacccccagaaatgtgaaaggaggtttcttactggacagcagcatctttggttcaatttatataaaaacccaaataaataaaatggacagtattgctcagttttagaaattccatttcttctatgttttaagctgtacaattgtcaggtttttatggtttaaattgtaaatgtgttttcccctttgctaattatgttttttttttcagtcttaaaatgtgaaaggcatttatgaatggtaagggaaacactatatacaaatgtatatttgtaaaagctatttttatgattagcatgtttcactgttgatcatatataaagtcaggtgatattgcaattctgtatttaaagcttatttccaacaatgtcatgtaagaaaagatgcatcttatgctagtttttataatttatttataatttatagtttaaagtacttcagatcataatgataaaatacttgaaaaagttatatttctgccctgtataagcaccctttttattaataaagaatgcagatatttcagatgtgatataatagttaaagaactgttggtttgatctgtgattaagttgagcatgctccgctctactgaactaaatgatccaattattacttcagtctgggtatgagattccatggacaagtaaggactagattgccaaggaaaagactgtcttgcccttggatccaaaagtttaaattagtgcatacatcatgtcatttcacctcctgttcctaggaactctccattcccaagcattgccagtgttttccagataatcttagctgttgtcttgtgctgtggaaatggaagaaaccatcttcacagactgtaggagaattcaacatataatttcttaataaatactgtttcttttaaaacaaaaaaaaaaaaaaaa

SEQ ID NO: 1008 - protein, 291 aa, Homo sapiens
MTGKTQTSNVTNKNDPKSINSRVFIGNLNTAIVKKVDIEAIFSKYGKIVGCSVHKGYAFVQYMSERHARAAVAGENARVIAGQPLDINMAGEPKPYRPKPGNKRPLSALYRLESKEPFLSVGGYVFDYDYYRDDFYNRLFDYHGRVPPPPRAVIPLKRPRVAVTTTRRGKGVFSMKGGSRSTASGSTGSKLKSDELQTIKKELTQIKTKIDSLLGRLEKIEKQQKAEAEAQKKQLEESLVLIQEECVSEIADHSTEEPAEGGPDADGEEMTDGIEEDFDEDGGHELFLQIK

SEQ ID NO: 1009 - DNA, 1675 bp, Homo sapiens
tttttggttacatagtaagtgtatatatttaaaaatacggaacgcttcacgaatttgcgtgttatccttgggaaggggccatgctaatctttatattattctaattttagtatatgtgctgcagaattaagcactgcttttaggaatgtaggtactttatttatttatttttgagacggagtctcgctctgtcgcccaggctggagtgcagtggcgcgatcttagctcactgcaagctccgcctcccgggttcacgccattcaccatggtctcgatctcctgacctcgtgatctgcccgtctcggcctcccaaagtgctgggataacaagcgtgagccaccgcgcccggccaggtactttattattattttttgatacggagtctcactctttggcccaggctgagtgcagtggcgcgatctcagctcactgcaacctccgcctcccggtttcaagcgattctcctgcatcaggctcttgagtagctgggattacaggcgcgtgccaccacgcccggggctaggttttgtatttttagtagaaacgggtttcaccatgttggtcaggctggtctggaacttctgacctcaggtgatccgtccgcctcggccttccaaaaggaatttaggtactttaaaatgctgttatgtatgttaacggaaaagtaactacatgcttcattttcagaaccaacattcaaatgaaatgaacgtgtcaaatcgacaaaagctcaaaaaagagaaaaacatataatacttaaaagtggttaatatactcttagattgcataactctggggcagtctgagtcctatgattttcttttaagaccccaagactctaaaatacctgctcatcacaagtttgttcagtgacaacattcagtaaaacttaacatttgttttacaaaattatgttgaaagatataaacataaacgtatatttgaagcacaaaaataattacggctttttttggaagcggagttagacatttccgtagaaaagtagatgcaatcaatctctcctgatttttgtcctccccacctttaatttttgacaaaccgaataacgacactcactattgagtacttttctaactccctattgcatcacaaacgcccgcaggggcttaaaaagcagcaggggttcctgcccttccccacactggccggtgtggtctggggcgggcctgatgagcacctggattttcacccggcgtgctggtaattcctacacttgtgggtgtttgagagacatgaagaggggaggatgacctcttcccggaagcgggacttccataaaagaagcgtggtgggcgggtcccgggcacctgtggtttggtgagtcctccaggtaactgtgatgcgggggtcagcgggagaggcacccggaagctcccggcgtctgcaccccggcagcgcgaggaaatgcccaaaggtgggttctcaggcgtgggaagctcgacccttcccggggtcctcggcgaagtggccgaggccgcgccttacgcagggaactccgccgggccatctgggtggcccgagttcgcagcagcttctcttccgctcgtccctcggccctctcgacgcgcacccaccggcctcaccaagtcgcacgcagaggggcggcggggcgctgaccgaggtctaggtctcgattgccgccggtcgagccgcg

SEQ ID NO: 1010 - protein, 95 aa, Homo sapiens
MRGSAGEAPGSSRRLHPGSARKCPKVGSQAWEARPFPGSSAKWPRPRLTQGTPPGHLGGPSSQQLLFRSSLGPLDAHPPASPSRTQRGGGALTEV

SEQ ID NO: 1011 - DNA, 4199 bp, Homo sapiens
tggggcgggctgatgagcacctggattttcacccggcgtgctggtaattcctacacttgtgggtgtttgagagacatgaagaggggaggatgacctcttcccggaagcgggacttccataaaagaagcgtggtgggcgggtcccgggcacctgtggtttggtgagtcctccaggtaactgtgatgcgggggtcagcgggagaggcacccggaagctcccggcgtctgcaccccggcagcgcgaggaaatgcccaaagaaactatagtgacactgaaactgaaggagagatttttaattccttagtgcaatactttggtgacaacttggggcgaaaagttaaagcgatgccattagttgaagaaacttctttattggaagattcgtcagtgacttttcctgtggtaataataggaaatggaccctcaggaatatgcctttcttatatgttatcaggctacagaccgtatttatcatcagaagcaatacacccaaatacaatcttaaatagtaaattagaagaagcaagacatctttccattgttgatcaggacttagaatacttgtctgagggccttgagggccgatcatccaatccagttgcagtacttttcgatacacttcttcatccagatgctgactttgggtatgattatccatccgttttgcattggaaattagagcaacatcattatatccctcacgtagttcttggtaaaggtccacctggtggggcttggcataatatggaaggctccatgttgacaatcagctttggaagttggatggaactacctggacttaaatttaaggactgggtatcaagtaaacgaaggagcctaaaaggggatcgagttatgccagaggaaatagctcgctactataaacattatgtaaaagtcatgggtcttcagaagaatttcagagagaatacttacataacttccgtatcaagactctacagagatcaagatgatgatgatattcaagacagagatatttcaacaaagcatttacagatagagaagtcaaactttatcaagagaaactgggaaattaggggttatcagcgaatagctgatggttctcatgttcccttctgcctctttgctgagaatgtagcgctggcaactggaacgctggattctcctgcccatctggaaattgaaggggaagattttccttttgtgtttcattcaatgcctgaatttggagctgctataaacaaaggaaagttgcgtggcaaagtggatccagtgttaattgtaggttctgggcttactgccgctgacgcagtactgtgtgcttacaacagtaatatccctgtgattcatgtgtttcgcagacgagtaactgatccaagcttaattttcaaacagcttcccaaaaagctgtatcctgaatatcataaagtctatcatatgatgtgtactcagtcatattctgtagactcaaatcttttatctgattataccagctttcccgagcaccgtgtgctttcctttaagtcggacatgaaatgtgttctccaaagcgtttctggattgaagaaaatatttaagctgtctgcagcagtagtattgataggttctcatcctaatctgtcttttctgaaggatcaagggtgttacctaggccataagtcaagccagccaatcacatgtaagggtaatcctgtggaaatagatacatatacctatgagtgtattaaagaagccaacctttttgcattgggtcctttggttggagacaattttgttcgatttttaaagggaggggcgctgggtgttacacgctgtttagctacaagacagaagaaaaagcatttgtttgttgaaagaggaggaggagatgggatagcttaaagcaagtttacaagtaattaaaatggacagtttgccattaaagatttttaatagtggttttgcagtgtactggcttgaattttctggacttgagttaactgaaggagagcctcaaactatagtaacttcatttttaaaagttactagaatttggtatcctgatttatattgcagtgtttcaaaggtgtcactgtcagacaaatagaaacactgccaacttggtgtaacttaagctttcatttaactaaaacattcttttcttgcaaaacttatttttcatgatcatttttggttatttattatacttgattccaaaatagtacagccttgaatctataaaactgtgcagtcattatgccagaaattatcttaaatatataatgggtcaccttgctgttcaaagggtggtgcaaggtcctgcagcatcttacatctgtagcttgttagaaatgtaaactctcaggccccacaacttacttcctgcattttaacaagatccccaagggatatgtatgctcataaaaatttgagacactggtttaaatgaaaatggatataaggtatgtataactgggggtggggtgagggtaggaggcatttacaactcagattttatttattttgaaattatcaattgtataaatctaatttattaccaaatagggtcttttaaaaaatatttttatcgttgaaaccttgacaggtacttcatattcttctaataatttaaacagtccaataatgtggtatacactttgacatccaagaactcaccaagatgtttttcagagatttattctcgatttaactatcatagcatttaatgaatctgatttgtagttcaataaattgtgggttgaactacttatccctgtgtgaacattgaattactttctgtcactgaaactgaggtatttgggtgtggtaagtacttcgaaaattgtaatactgtttgggcattgtctaaattattaaaggttaaaatagaaaataaagtcagaatttttcttttccattccaaaggtgtacttagagatctctattagtattcattcgagatgacatagcagctcatatcatggttgtttattggatttatctgttctaattatataagtgtgtttactgtctgtgttttcacacaaactgctagaatttttaatgttaagacgaaaacatctgaagttctccatggcaaattgaatttttcagtcattttcttttctttttttggtacaattacttcatctggaatgtcttcattgaactcgttattctatttttcttagaattaaaagtggattaatgtgggtttttctgttcattttattgcagtattaaatgcttaagcttattaggaccataattcactttaaatataattgtatagaatatatttgcgtcgatcaaataattgcttcagatgaattcttagactcttgataatatcacacctaatttaacttgattttacaagctgtacaatccagttttagttttctattgtgataataacttttttcaaaccagtttcacatcttaatgaaataacattctctgactgcacttgcttcagtactctcttgcctgcctgtttttgacctctgcatgagttggattagatgtttttcttactgtcacttctaaatagaaaatgacagtgttataaaaaagggaaggataaaacctttgacatccccttgtgtctcaaaagtccacagttattcaaacaatggctttttttgtgatgagagtatttgttaaaaaaaaaaaaagacttcaagaaaaataaaagttcagtggagctgcaaataaatctggtgaataatttcatctttggtaatctcccatttcctgagttcttcctcaatccaagctgtcctgtgtagtatataacatttgggcattttctctgatatactatactctcatgttctataaatttctgtcccgtaattctaacactttacattttttctttgctatcagctatagctattcatggaagggaagaatcactaaatacttgtctagttatagcatgatgtgagcatctcctccttatccctcgatgcctggcttggtgtctggcaaacagtccataattagcagatgttgaaagaccgtttacaaagcagaatttggggatttaaagtgcaatgatacaacaaaaagatttaattacagcttccagtgttttgactatgtgaaccatatccaactacttttttgaaaatctagttctatgtaatatatttctgtggcatcaaattttagttgattgtattagtcaataggaagtggtggaaaatttctaaataaattcaactattaaa

SEQ ID NO: 1012 - protein, 505 aa, Homo sapiens
MPLVEETSLLEDSSVTFPVVIIGNGPSGICLSYMLSGYRPYLSSEAIHPNTILNSKLEEARHLSIVDQDLEYLSEGLEGRSSNPVAVLFDTLLHPDADFGYDYPSVLHWKLEQHHYIPHVVLGKGPPGGAWHNMEGSMLTISFGSWMELPGLKFKDWVSSKRRSLKGDRVMPEEIARYYKHYVKVMGLQKNFRENTYITSVSRLYRDQDDDDIQDRDISTKHLQIEKSNFIKRNWEIRGYQRIADGSHVPFCLFAENVALATGTLDSPAHLEIEGEDFPFVFHSMPEFGAAINKGKLRGKVDPVLIVGSGLTAADAVLCAYNSNIPVIHVFRRRVTDPSLIFKQLPKKLYPEYHKVYHMMCTQSYSVDSNLLSDYTSFPEHRVLSFKSDMKCVLQSVSGLKKIFKLSAAVVLIGSHPNLSFLKDQGCYLGHKSSQPITCKGNPVEIDTYTYECIKEANLFALGPLVGDNFVRFLKGGALGVTRCLATRQKKKHLFVERGGGDGIA

SEQ ID NO: 1013 - DNA, 4689 bp, Homo sapiens
gagcgcgcacgtcccggagcccatgccgaccgcaggcgccgtatccgcgctcgtctagcagccccggttacgcggttgcacgtcggccccagccctgaggagccggaccgatgtggaaactgctgcccgccgcgggcccggcaggaggagaaccatacagacttttgactggcgttgagtacgttgttggaaggaaaaactgtgccattctgattgaaaatgatcagtcgatcagccgaaatcatgctgtgttaactgctaacttttctgtaaccaacctggtatagaaaaacattttggaaatttctacagaaaaagtaaaattgttactagtcaaacagatgaaatccctgtattgacattaaaagataattctaagtatggtacctttgttaatgaggaaaaaatgcagaatggcttttcccgaactttgaagtcgggggatggtattacttttggagtgtttggaagtaaattcagaatagagtatgagcctttggttgcatgctcttcttgtttagatgtctctgggaaaactgctttaaatcaagctatattgcaacttggaggatttactgtaaacaattggacagaagaatgcactcaccttgtcatggtatcagtgaaagttaccattaaaacaatatgtgcactcatttgtggacgtccaattgtaaagccagaatattttactgaattcctgaaagcagttgagtccaagaagcagcctccacaaattgaaagtttttacccacctcttgatgaaccatctattggaagtaaaaatgttgatctgtcaggacggcaggaaagaaaacaaatcttcaaagggaaaacatttatatttttgaatgccaaacagcataagaaattgagttccgcagttgtctttggaggtggggaagctaggttgataacagaagagaatgaagaagaacataatttctttttggctccgggaacgtgtgttgttgatacaggaataacaaactcacagaccttaattcctgactgtcagaagaaatggattcagtcaataatggatatgctccaaaggcaaggtcttagacctattcctgaagcagaaattggattggcggtgattttcatgactacaaagaattactgtgatcctcagggccatcccagtacaggattaaagacaacaactccaggaccaagcctttcacaaggcgtgtcagttgatgaaaaactaatgccaagcgccccagtgaacactacaacatacgtagctgacacagaatcagagcaagcagatacatgggatttgagtgaaaggccaaaagaaatcaaagtctccaaaatggaacaaaaattcagaatgctttcacaagatgcacccactgtaaaggagtcctgcaaaacaagctctaataataatagtatggtatcaaatactttggctaagatgagaatcccaaactatcagctttcaccaactaaattgccaagtataaataaaagtaaagatagggcttctcagcagcagcagaccaactccatcagaaactactttcagccgtctaccaaaaaaagggaaagggatgaagaaaatcaagaaatgtcttcatgcaaatcagcaagaatagaaacgtcttgttctcttttagaacaaacacaacctgctacaccctcattgtggaaaaataaggagcagcatctatctgagaatgagcctgtggacacaaactcagacaataacttatttacagatacagatttaaaatctattgtgaaaaattctgccagtaaatctcatgctgcagaaaagctaagatcaaataaaaaaagggaaatggatgatgtggccatagaagatgaagtattggaacagttattcaaggacacaaaaccagagttagaaattgatgtgaaagttcaaaaacaggaggaagatgtcaatgttagaaaaaggccaaggatggatatagaaacaaatgacactttcagtgatgaagcagtaccagaaagtagcaaaatatctcaagaaaatgaaattgggaagaaacgtgaactcaaggaagactcactatggtcagctaaagaaatatctaacaatgacaaacttcaggatgatagtgagatgcttccaaaaaagctgttattgactgaatttagatcactggtgattaaaaactctacttccagaaatccatctggcataaatgatgattatggtcaactaaaaaatttcaagaaattcaaaaaggtcacatatcctggagcaggaaaacttccacacatcattggaggatcagatctaatagctcatcatgctcgaaagaatacagaactagaagagtggctaaggcaggaaatggaggtacaaaatcaacatgcaaaagaagagtctcttgctgatgatctttttagatacaatccttatttaaaaaggagaagataactgaggattttaaaaagaagccatggaaaaacttcctagtaagcatctacttcaggccaacaaggttatatgaatatatagtgtatagaagcgatttaagttacaatgttttatggcctaaatttattaaataaaatgcacaaaactttgattcttttgtatgtaacaattgtttgttctgttttcaggctttgtcattgcatctttttttcatttttaaatgtgttttgtttattaaatagttaatatagtcacagttcaaaattctaaatgtacgtaaggtaaagactaaagtcacccttccaccattgtcctagctacttggttcccctcagaaaaaaattcatgatactcatttcttatgaatctttccagggatttttgagtcctattcaaattcctatttttaaataatttcctacacaaatgatagcataacatatgcagtgttctacaccttgcttttttacttagtagattaaaaattataggaatatcaatataatgtttttaatattttttcttttccattatgctgtagtcttacctaaactctggtgatccaaacaaaatggcttcagtggtgcagatgtcacctacatgttattctagtactagaaactgaagaccatgtggagacttcatcaaacatgggtttagttttcaccagaatggaaagacctgtacccctttttggtggtcttactgagctgggtgggtgtctgttttgagcttatttagagtcctagttttcctacttataaagtagaaatggtgagattgttttctttttctaccttaaagggagatggtaagaaacaatgaatgtcttttttcaaactttattgacaagtgattttcaagtctgtgttcaaaaatatattcatgtacctgtgatccagcaagaagggagttccagtcaagagtcactacaactgattagttgtttagagaatgagaaatggaacagtgaggaatggaggccatatttccatgacttcccttgtaaacagaagcaacagaagggacaagaggctggcctctacatcactctcaccttccaaatcttgtggaagtgcatctacttgccagaaccaaattaacttacttccaagttctggctgcttgcaggtggaactccagctgcaagggagttagggaaatgaaggtctttttttaaaagcttctcagccttcctagggaacagaaattgggtgagccaatctgcaatttctactacaggcattgagaccagttagattattgaaatattatagagagttatgaacacttaaattatgatagtggtatgacattggatagaacatgggatactttagaagtagaattgacagggcatattagttgatgaaatggagtcatttgagtctcttaatagccatgtatcataattaccaagtgaagctggtggaacatatggtctccattttacagttaaggaatataatggacagattaatattgttctctgtcatgcccacaatccctttctaaggaagactgccctactatagcagtttttatatttgtcaatttatgaatataatgaatgagagttctggtacctcctgtctttacaaatattggtgttgtcagtatttttcctttttaaccattccaatcggtgtgtagtgatgtttcattttggttttaatttgtatatccctgatagctataattgggtcatagaaattctttatacattctagatgcaagtctcttgtcggatatatgtattgagatattacacctagtctgtggcttgactgttttctttatgtcttttgatgaatagaagttttaaattttgacaaggtcaaatttatttttttcttttgtttgatattttttctctccaatttaaccccaagatttcagatattctgctctattatataaactttatatttttatatttgtgatctaccttgaattgatatgtatgttgtgaattatggatcagggttctttttttcccccatacaagtatccagtcattgtaacactgtttattgaaagaattatcctttcctcattaaattaccttgccaattagtaaaaaatcaattaaccataatggtggatctgtttctggactttctgtttggttacactgaaatgtttgtccatccttgcactcactcataccatactgccttgaattactgtagctgcatagatgctccttaagttgggattacattgtaataaacgcaatgtaagttaaaaaaaaaaaaaaaaaa

SEQ ID NO: 1014 - protein, 672 aa, Homo sapiens
MQNGFSRTLKSGDGITFGVFGSKFRIEYEPLVACSSCLDVSGKTALNQAILQLGGFTVNNWTEECTHLVMVSVKVTIKTICALICGRPIVKPEYFTEFLKAVESKKQPPQIESFYPPLDEPSIGSKNVDLSGRQERKQIFKGKTFIFLNAKQHKKLSSAVVFGGGEARLITEENEEEHNFFLAPGTCVVDTGITNSQTLIPDCQKKWIQSIMDMLQRQGLRPIPEAEIGLAVIFMTTKNYCDPQGHPSTGLKTTTPGPSLSQGVSVDEKLMPSAPVNTTTYVADTESEQADTWDLSERPKEIKVSKMEQKFRMLSQDAPTVKESCKTSSNNNSMVSNTLAKMRIPNYQLSPTKLPSINKSKDRASQQQQTNSIRNYFQPSTKKRERDEENQEMSSCKSARIETSCSLLEQTQPATPSLWKNKEQHLSENEPVDTNSDNNLFTDTDLKSIVKNSASKSHAAEKLRSNKKREMDDVAIEDEVLEQLFKDTKPELEIDVKVQKQEEDVNVRKRPRMDIETNDTFSDEAVPESSKISQENEIGKKRELKEDSLWSAKEISNNDKLQDDSEMLPKKLLLTEFRSLVIKNSTSRNPSGINDDYGQLKNFKKFKKVTYPGAGKLPHIIGGSDLIAHHARKNTELEEWLRQEMEVQNQHAKEESLADDLFRYNPYLKRRR

SEQ ID NO: 1015 - DNA, 4639 bp, Homo sapiens
gagcgcgcacgtcccggagcccatgccgaccgcaggcgccgtatccgcgctcgtctagcagccccggttacgcggttgcacgtcggccccagccctgaggagccggaccgatgtggaaactgctgcccgccgcgggcccggcaggaggagaaccatacagacttttgactggcgttgagtacgttgttggaaggaaaaactgtgccattctgattgaaaatgatcagtcgatcagccgaaatcatgctgtgttaactgctaacttttctgtaaccaacctgagtcaaacagatgaaatccctgtattgacattaaaagataattctaagtatggtacctttgttaatgaggaaaaaatgcagaatggcttttcccgaactttgaagtcgggggatggtattacttttggagtgtttggaagtaaattcagaatagagtatgagcctttggttgcatgctcttcttgtttagatgtctctgggaaaactgctttaaatcaagctatattgcaacttggaggatttactgtaaacaattggacagaagaatgcactcaccttgtcatggtatcagtgaaagttaccattaaaacaatatgtgcactcatttgtggacgtccaattgtaaagccagaatattttactgaattcctgaaagcagttgagtccaagaagcagcctccacaaattgaaagtttttacccacctcttgatgaaccatctattggaagtaaaaatgttgatctgtcaggacggcaggaaagaaaacaaatcttcaaagggaaaacatttatatttttgaatgccaaacagcataagaaattgagttccgcagttgtctttggaggtggggaagctaggttgataacagaagagaatgaagaagaacataatttctttttggctccgggaacgtgtgttgttgatacaggaataacaaactcacagaccttaattcctgactgtcagaagaaatggattcagtcaataatggatatgctccaaaggcaaggtcttagacctattcctgaagcagaaattggattggcggtgattttcatgactacaaagaattactgtgatcctcagggccatcccagtacaggattaaagacaacaactccaggaccaagcctttcacaaggcgtgtcagttgatgaaaaactaatgccaagcgccccagtgaacactacaacatacgtagctgacacagaatcagagcaagcagatacatgggatttgagtgaaaggccaaaagaaatcaaagtctccaaaatggaacaaaaattcagaatgctttcacaagatgcacccactgtaaaggagtcctgcaaaacaagctctaataataatagtatggtatcaaatactttggctaagatgagaatcccaaactatcagctttcaccaactaaattgccaagtataaataaaagtaaagatagggcttctcagcagcagcagaccaactccatcagaaactactttcagccgtctaccaaaaaaagggaaagggatgaagaaaatcaagaaatgtcttcatgcaaatcagcaagaatagaaacgtcttgttctcttttagaacaaacacaacctgctacaccctcattgtggaaaaataaggagcagcatctatctgagaatgagcctgtggacacaaactcagacaataacttatttacagatacagatttaaaatctattgtgaaaaattctgccagtaaatctcatgctgcagaaaagctaagatcaaataaaaaaagggaaatggatgatgtggccatagaagatgaagtattggaacagttattcaaggacacaaaaccagagttagaaattgatgtgaaagttcaaaaacaggaggaagatgtcaatgttagaaaaaggccaaggatggatatagaaacaaatgacactttcagtgatgaagcagtaccagaaagtagcaaaatatctcaagaaaatgaaattgggaagaaacgtgaactcaaggaagactcactatggtcagctaaagaaatatctaacaatgacaaacttcaggatgatagtgagatgcttccaaaaaagctgttattgactgaatttagatcactggtgattaaaaactctacttccagaaatccatctggcataaatgatgattatggtcaactaaaaaatttcaagaaattcaaaaaggtcacatatcctggagcaggaaaacttccacacatcattggaggatcagatctaatagctcatcatgctcgaaagaatacagaactagaagagtggctaaggcaggaaatggaggtacaaaatcaacatgcaaaagaagagtctcttgctgatgatctttttagatacaatccttatttaaaaaggagaagataactgaggattttaaaaagaagccatggaaaaacttcctagtaagcatctacttcaggccaacaaggttatatgaatatatagtgtatagaagcgatttaagttacaatgttttatggcctaaatttattaaataaaatgcacaaaactttgattcttttgtatgtaacaattgtttgttctgttttcaggctttgtcattgcatctttttttcatttttaaatgtgttttgtttattaaatagttaatatagtcacagttcaaaattctaaatgtacgtaaggtaaagactaaagtcacccttccaccattgtcctagctacttggttcccctcagaaaaaaattcatgatactcatttcttatgaatctttccagggatttttgagtcctattcaaattcctatttttaaataatttcctacacaaatgatagcataacatatgcagtgttctacaccttgcttttttacttagtagattaaaaattataggaatatcaatataatgtttttaatattttttcttttccattatgctgtagtcttacctaaactctggtgatccaaacaaaatggcttcagtggtgcagatgtcacctacatgttattctagtactagaaactgaagaccatgtggagacttcatcaaacatgggtttagttttcaccagaatggaaagacctgtacccctttttggtggtcttactgagctgggtgggtgtctgttttgagcttatttagagtcctagttttcctacttataaagtagaaatggtgagattgttttctttttctaccttaaagggagatggtaagaaacaatgaatgtcttttttcaaactttattgacaagtgattttcaagtctgtgttcaaaaatatattcatgtacctgtgatccagcaagaagggagttccagtcaagagtcactacaactgattagttgtttagagaatgagaaatggaacagtgaggaatggaggccatatttccatgacttcccttgtaaacagaagcaacagaagggacaagaggctggcctctacatcactctcaccttccaaatcttgtggaagtgcatctacttgccagaaccaaattaacttacttccaagttctggctgcttgcaggtggaactccagctgcaagggagttagggaaatgaaggtctttttttaaaagcttctcagccttcctagggaacagaaattgggtgagccaatctgcaatttctactacaggcattgagaccagttagattattgaaatattatagagagttatgaacacttaaattatgatagtggtatgacattggatagaacatgggatactttagaagtagaattgacagggcatattagttgatgaaatggagtcatttgagtctcttaatagccatgtatcataattaccaagtgaagctggtggaacatatggtctccattttacagttaaggaatataatggacagattaatattgttctctgtcatgcccacaatccctttctaaggaagactgccctactatagcagtttttatatttgtcaatttatgaatataatgaatgagagttctggtacctcctgtctttacaaatattggtgttgtcagtatttttcctttttaaccattccaatcggtgtgtagtgatgtttcattttggttttaatttgtatatccctgatagctataattgggtcatagaaattctttatacattctagatgcaagtctcttgtcggatatatgtattgagatattacacctagtctgtggcttgactgttttctttatgtcttttgatgaatagaagttttaaattttgacaaggtcaaatttatttttttcttttgtttgatattttttctctccaatttaaccccaagatttcagatattctgctctattatataaactttatatttttatatttgtgatctaccttgaattgatatgtatgttgtgaattatggatcagggttctttttttcccccatacaagtatccagtcattgtaacactgtttattgaaagaattatcctttcctcattaaattaccttgccaattagtaaaaaatcaattaaccataatggtggatctgtttctggactttctgtttggttacactgaaatgtttgtccatccttgcactcactcataccatactgccttgaattactgtagctgcatagatgctccttaagttgggattacattgtaataaacgcaatgtaagttaaaaaaaaaaaaaaaaaa

SEQ ID NO: 1016 - protein, 754 aa, Homo sapiens
MWKLLPAAGPAGGEPYRLLTGVEYVVGRKNCAILIENDQSISRNHAVLTANFSVTNLSQTDEIPVLTLKDNSKYGTFVNEEKMQNGFSRTLKSGDGITFGVFGSKFRIEYEPLVACSSCLDVSGKTALNQAILQLGGFTVNNWTEECTHLVMVSVKVTIKTICALICGRPIVKPEYFTEFLKAVESKKQPPQIESFYPPLDEPSIGSKNVDLSGRQERKQIFKGKTFIFLNAKQHKKLSSAVVFGGGEARLITEENEEEHNFFLAPGTCVVDTGITNSQTLIPDCQKKWIQSIMDMLQRQGLRPIPEAEIGLAVIFMTTKNYCDPQGHPSTGLKTTTPGPSLSQGVSVDEKLMPSAPVNTTTYVADTESEQADTWDLSERPKEIKVSKMEQKFRMLSQDAPTVKESCKTSSNNNSMVSNTLAKMRIPNYQLSPTKLPSINKSKDRASQQQQTNSIRNYFQPSTKKRERDEENQEMSSCKSARIETSCSLLEQTQPATPSLWKNKEQHLSENEPVDTNSDNNLFTDTDLKSIVKNSASKSHAAEKLRSNKKREMDDVAIEDEVLEQLFKDTKPELEIDVKVQKQEEDVNVRKRPRMDIETNDTFSDEAVPESSKISQENEIGKKRELKEDSLWSAKEISNNDKLQDDSEMLPKKLLLTEFRSLVIKNSTSRNPSGINDDYGQLKNFKKFKKVTYPGAGKLPHIIGGSDLIAHHARKNTELEEWLRQEMEVQNQHAKEESLADDLFRYNPYLKRRR

SEQ ID NO: 1017 - DNA, 3370 bp, Homo sapiens
aagtaagcaaacattttcctctaattcagattctttaaacaaaagttgcaaatgaatgtagccttcatctattgtaaaattaaagatggagatggtcaaggggttaccgccagtctgtttcttgcgctgataatttttctagacattaaatctcaccatttgttcccaacaaagaaagaaagacaggaccaccagactctacagggaagccaagaggaagaagggaaggagcccagaaatggagagaagctggactctagggatggatctggggatgctccacaaagtgcagctgtggagaatgcagaagaagagttggctagtgggacattcccactgaggagcatggcagggggaatgtctaatattcactaagagaattcttgaaatgtaacatttagatgaaactcttcaagtttccttaaaatacaaattcatgactctctttctttctctctctctctttctctctctctttggtatgttaaagtaatcaaggaaagggattttgttttataactgggttacacaggggagagaccagaatagctgaaagctgtgagacatgaagaaaattcaagatttaggagacatgcagaacatcagtgtctaggcaaaatggcagactgaccaacccccacacactgaatccctagagatattaggacagggatattgagaaaaatttacctttaagttgtaaaggacaaggcaactcaacatattgaatgccttgttgacaaccaggggctaatatttgggatgcatattgggcatagatgcacagaaaataatttatcagtgacattaataatatgacatctctttgttgagaatttactgctgtcttaatatcacaactctaaggggtcaacatccagaataaacttcttatcttacatatttaaaattatttgctaggctacatttttcttagaaaaatgcatatctgaaacagaatattgatttttttcctgggtcatacataaagaccatcagaaattaattattgaaaaaacactgctatactcattagagatatattttaattagattaattttgcattaacagtccatgagaagttacaactaacttgcaacgagacattaacatgcatcatgtttgatataagtaaaaatggaaatgattagaagtatacaaatataaagtatgttgctagtatatgcaagcttaaaaaacttttacctgatagaattagcaagagcagctatgttgagcttctttcagttaaaagtcattttcggctatgtctccctaaggatagaaatatcactgcttttgatctcatttagaattctgctcacttttaggaaagtagggctgtttggaaatggtcagccatatccttactgaatttcctagggcttgactgcacctactctagttaacaagtaagatatagttatatattgtattataacttctcaaagcacttatattttgattttccttcttttatgttcattatcttcatttggactactccatgtgacaaaagcagttatttttcttctaccccctaaactggaccacatcgatgctcttaggtccaaatcatattctttaagaaacaagtgttcactgaatgatttactgcattatataataggtactatacaagacacctgaggccccccacaccgtgaaaacagatgtttcttcctggagcttgcccaataggagagaaatttttaatttaccctttctcagtaaaccattatacaaaacagaagtgaaattatggacccagtgaactcaatctggctgacttgcaacccctatgtgttcataaacccactgaaatatataatttgttgtttatattaaatatgcactgaagcatgattagataaacattgaaagtaaattttaattttaaccatcagtggaagtatatggggtgatttaagtcattcatattagtttatttttatcaggtgttcctccttgtccatagtgaaatacaatacagagattatagcctgtggcttgacaggacatcttatagttggtaacaggactacattaaaaggaaaaaacaataaataaggatgtctaattatacagataaagaaagcaagttcactcactcctccaggacagcaccagagacaacgttagaaccaagagtttcaaaacctcgccttgtatggtttgcctgatgccatgattaaagaaaagggggtggggaactaagagaggaagccaaagagaaagaattcagtaccaaacagcaatattcagatgttttattaaataataggaggtgttttgaccttgctggtgaacagaggtgatctcaaaacatttgacagatataattaaggccataaggcaataattgcaaaagtcaaggagcccttgccacctccaaagcatcacgtgtggatgcaggaaccatattaacaacatgggtagtcaaggagaaagcagatagaataaagctgtacccagcaatataaagggacatgcaagtgtgtgttgtgcttaagagtaaacttagggaaaaaagctccccataacctcgagaaacgtttctggatctgagatatccattagcacatttagaaggtacctatttccattattgtgaaggagttgtaaatgaaataaacaactttaaataatacctcccttggtcaaactgcattaagtattccctgatggaattcattcatcatcattcaaacagaatggtttgcaactcaacctgcctagtgtggggtctggaattcccaccacagtcactgtgccttaagcactgttgcagcagaaggacttgaagtaacacatgaatatataatgccaatttgcatgtcagcatggattgttgaaattgaagttagttaattgtcacattgtaacaggaaaagaatccaagttttggagctggttggaactgagttttcatcttctttctctgctacttaactgtgttatcctgaacaagatactcaacctccatgagacacagtgaccatgtgaaatatatatgtaaaatgtctggcaaacatctgattcatgtaggtacccaaaattagatcattttcattttcttttgcttccttggaagttcaaaacaaaattctgaggtaagtttcaattaaaatgggtcaggcagacagattccagcaaggtcaaagcatccttttttctttaataaaatatctgaatatctgaacaagaaacaacttctgtttctcaaggttgaaatgatgaattattgaacttctgttgctgtttgttttctctcttatctccttactactacatataaatgagatatcttgctatcccactgatatctcaaattcagtatttcccaaataaaacgtaatcttttccaac

SEQ ID NO: 1018 - protein, 107 aa, Homo sapiens
MNVAFIYCKIKDGDGQGVTASLFLALIIFLDIKSHHLFPTKKERQDHQTLQGSQEEEGKEPRNGEKLDSRDGSGDAPQSAAVENAEEELASGTFPLRSMAGGMSNIH

SEQ ID NO: 1019 - DNA, 3260 bp, Homo sapiens
gggtttgagagtttgggaccctgggttggtggggtcagagggagagggggtaccttcctcccggaccgctgggggtgcagggcgccttgggtgtagcacccagaacaggtttctgatctctaacttggctgtgatcattgtgatggagcaagaaaaaaaactgttggtctcagattctaacagctttatggagagggagagtttgaaaagccctttcacaggagatacaagtatgaataatttggaaactgttcaccacaataattctaaggcagataaacttaaagagaaaccttcagaatggtctaaaagacatagaccacaacattataagcatgaggatgcaaaagaaatgccactgacatgggttcaagatgagatttggtgtcatgattcctatgagagtgatggcaagtcagagaattggggaaattttatagctaaagaggaggaaaaacccaatcaccaggaatgggactcaggagaacataccaatgcctgtgtccagcagaattcatcctttgtagacagaccctataaatgttccgaatgttggaaaagcttcagtaatagttctcatttgcgtactcaccagaggacccactcaggagaaaagccttataaatgctctgagtgtgcaaaatgtttttgtaacagttctcacctgattcagcatctaagaatgcacacaggagagaagccctaccagtgtggtgaatgtgggaaaagcttcagcaatacctcccatcttattatccatgagagaactcacacgggagagaaaccctacaaatgtcccgagtgtgggaagagattcagcagcagctctcaccttattcagcatcacagatcacatacaggtgaaaaaccatatgaatgttctgtctgcggaaaaggcttcagtcacagctatgtcctaatagaacatcagaggactcacactggagaaaaaccttataagtgccctgattgtgggaagagttttagtcagagttccagcctcattcgccaccagcggacacacacaggtgagaagccctacaaatgtcttgagtgtgaaaaaagctttggttgtaattctactctaataaaacatcagagaatacatacaggagaaaagccttatcaatgtccagaatgtgggaagaattttagtcgtagttcaaaccttattacacaccagaaaatgcacacaggagagaaatcctatgaaagttctgaatatgaggaaagtttgggtcagaactgcaatgtgatagaagaatgcagaatccagttaggagagaaaccatatagatgttgtgaatgtgggaagagttttggccttagctcccatctcattagacatcagagaacacatacaggagaaaaaccttacagatgttctgagtgctggaaaactttcagtcagagttccaccctggtgattcaccaaaggacacatacaggagagaaaccttataaatgtcctgattgtggtgaaagcttcagtcagagctttaaccttatcaggcaccggaggacccacataggggaaaaaccttacaaatgtaccagctgtgagaaatgcttcagcagaattgcctacctcagtcagcatcggaaaattcacgtagaaaagccttttgagtctcccgacgttggggattttcctcatgaatggacttggaaaaactgttcaggggaaatgcccttcatctcttcattttccgtctcaaattcatcttcctgagtcccaaagcctggttggtgatggttttttcttccttgttggaccatgacaatttaggtattctgtgattgttgtgctataaagtttctttgatgtgtttgtcaaaacatttggaaaaagtcaacctcccagtttaaaggatgggaagaccccaatcaccaggttattggatctgtccagtgagagattcatccaccaaggatgaagaaaggaggacttttaaaaatttaaggtaagatagtaatagcttcaaaagaacacatacagagtaatcctgagagtaagcaaaggaaccatgagaaccgaagctagaattgctattgaattactttattttctcttcccttattgggtagagatacatcattactggcctcaggggtttacccaaagaaagggtatttttgagcaaataatgtgatttcctggctattttgttgggggcttaagatttttttttttcaaatgcatttttagtcactaaaaattaactgtcgtaccatctagaactatactgtccagtaccatagcctctagccgtatgtagctatttgtattaagattaattgaaattttaaatccagttcctcagtcacactagccactttctaagtgctcagtagctctgtgtgaccagcggctactgtattggatattatagaaggttctttcattcaagatcatcattcttgacagacccataaatatttcctataaagactgtagaagtgtgttctggagggtttgctctccaaaaagaattgtaatatagagtagaattgggatagagtattgaagacactgggtttagacattggatattttaatgattgtgtgttctaattcatgtgctgccaactgagttatctagtgatatgacctcactgtcttgaccaaagccagaatagaaggcaggattcctgaattctatcttaaaatttgcaatgaagagccttttccctaaattatcccattatgtaattcttggtcagctcaagaactgggttctttttctaataattaactcactaaatctgagccagtgtccaaggacagtttgtcattaaggagtactgagacttcttagctttggtactgacagttttcttttgcctcttgacataataggtatatggatctgataactgaggtcccatcttccctactcattcctatgggaatgatgctttggaaattattagatatatcctattcccttcctcccatttttttcctgctagtgcaaaaggtagatgagtaggaagattaggactcctgagttgcccatgatttcatctaatttttggattcagaatgtattttatgaataatatgcagagatgcatattaggaatgtgaagccagaatgggtcagttgtagctgctgcaaagttctgtagctgatggtcatttaattgcatgggggttattttatctttcatgattgtggtgcacctgatgctggcggggtatttgtgtgtttttgtattgttatttgattacaaaaataaagcaaaaactaacaaat

SEQ ID NO: 1020 - protein, 529 aa, Homo sapiens
MEQEKKLLVSDSNSFMERESLKSPFTGDTSMNNLETVHHNNSKADKLKEKPSEWSKRHRPQHYKHEDAKEMPLTWVQDEIWCHDSYESDGKSENWGNFIAKEEEKPNHQEWDSGEHTNACVQQNSSFVDRPYKCSECWKSFSNSSHLRTHQRTHSGEKPYKCSECAKCFCNSSHLIQHLRMHTGEKPYQCGECGKSFSNTSHLIIHERTHTGEKPYKCPECGKRFSSSSHLIQHHRSHTGEKPYECSVCGKGFSHSYVLIEHQRTHTGEKPYKCPDCGKSFSQSSSLIRHQRTHTGEKPYKCLECEKSFGCNSTLIKHQRIHTGEKPYQCPECGKNFSRSSNLITHQKMHTGEKSYESSEYEESLGQNCNVIEECRIQLGEKPYRCCECGKSFGLSSHLIRHQRTHTGEKPYRCSECWKTFSQSSTLVIHQRTHTGEKPYKCPDCGESFSQSFNLIRHRRTHIGEKPYKCTSCEKCFSRIAYLSQHRKIHVEKPFESPDVGDFPHEWTWKNCSGEMPFISSFSVSNSSS

SEQ ID NO: 1021 - DNA, 2989 bp, Homo sapiens
gtctgggccgagcccgcccagctggctgagacgcgtggagcctggcggcgagtgggggcgtgcgacggttactctggttactggggccgcgccgcgctggcgagagccgccgcccgcgagggatgctggtgaggaagccgtcgggagccgccgccgccatctgagggaggtaccctggaaaccaccttttatcggtggggaagtgcagtcgcggtgggcggctctgggggccagcgaaacgggaggcctctaaatctttaggttggggctgcattgccctggagccgcactcttgagtccgaggccatcttttgttggagaaggcgtcggcgttggcgttttcccgaggttgggctgtacagtgtctccgtccgcggaaaaagaagcctctgaacccgcgccggcccgcagcccccgtgccttccggccgctgctcgccgtcgccagaggctaggccacgtttcccccagtgccgaggtgtttctgtgaccctccctccactcccattcccttctgaaagggcacctgctcttggtgagaaaagaaattatagcacgaagagccagtatcagaagagtatccatcacccgcagcaaccgctcagggaacaccatcaaaaaagaaaaaaagggaatatctggatttcctgggcgaggaggagcgagtctgctcgggagctgttccagcaggcgatttttaaatactgctttctacgccctatacaacttggcttcacatacttttacactaactttatatgatttttaaaaactggtctgatcggacttctcgtcctgggacactgtttactggagtctggccggctctccgtgctcctcttggtacctcattttggggagaaccttaaacccactcgagcagataatctccgccttgaccggtgccaccaaagaagccttggaaccatgtggacttttctgggcattgccactttcacctatttttataagaagttcggggacttcatcactttggccaacagggaggtcctgttgtgcgtgctggtgttcctctcgctgggcctggtgctctcctaccgctgtcgccaccgaaacgggggtctcctcgggcgccagcagagcggctcccagttcgccctcttctcggatattctctcaggcctgcctttcattggcttcttctgggccaaatccccccctgaatcagaaaataaggagcagctcgaggccaggaggcgcagaaaaggaaccaatatttcagaaacaagcttaataggaacagctgcctgtacatcaacatcttctcagaatgacccagaagttatcatcgtgggagctggcgtgcttggctctgctttggcagctgtgctttccagagatggaagaaaggtgacagtcattgagagagacttaaaagagcctgacagaatagttggagaattcctgcagccgggtggttatcatgttctcaaagaccttggtcttggagatacagtggaaggtcttgatgcccaggttgtaaatggttacatgattcatgatcaggaaagcaaatcagaggttcagattccttaccctctgtcagaaaacaatcaagtgcagagtggaagagctttccatcacggaagattcatcatgagtctccggaaagcagctatggcagagcccaatgcaaagtttattgaaggtgttgtgttacagttattagaggaagatgatgttgtgatgggagttcagtacaaggataaagagactggagatatcaaggaactccatgctccactgactgttgttgcagatgggcttttctccaagttcaggaaaagcctggtctccaataaagtttctgtatcatctcattttgttggctttcttatgaagaatgcaccacagtttaaagcaaatcatgctgaacttattttagctaacccgagtccagttctcatctaccagatttcatccagtgaaactcgagtacttgttgacattagaggagaaatgccaaggaatttaagagaatacatggttgaaaaaatttacccacaaatacctgatcacctgaaagaaccattcttagaagccactgacaattctcatctgaggtccatgccagcaagcttccttcctccttcatcagtgaagaaacgaggtgttcttcttttgggagacgcatataatatgaggcatccacttactggtggaggaatgactgttgcttttaaagatataaaactatggagaaaactgctaaagggtatccctgacctttatgatgatgcagctattttcgaggccaaaaaatcattttactgggcaagaaaaacatctcattcctttgtcgtgaatatccttgctcaggctctttatgaattattttctgccacagatgattccctgcatcaactaagaaaagcctgttttctttatttcaaacttggtggcgaatgtgttgcgggtcctgttgggctgctttctgtattgtctcctaaccctctagttttaattggacacttctttgctgttgcaatctatgccgtgtatttttgctttaagtcagaaccttggattacaaaacctcgagcccttctcagtagtggtgctgtattgtacaaagcgtgttctgtaatatttcctctaatttactcagaaatgaagtatatggttcattaagcttaaaggggaaccatttgtgaatgaatatttggaacttaccaagtcctaagagacttttggaagaggatatatatagcatagtaccataccacttataaagtggaaactcttggaccaagatttggattaatttgtttttgaagttttttgtatataaatatgtaaatacatgctttaatttgcaatttaaaatgaaggggttaaataagttagacatttaaaagaaatgattgttaccataaattagtgctaatgctgaggagaactacagtttttcttttgaatttagtatttgagatgagttgttgggacatgcaaataaaatgaagaatgaa

SEQ ID NO: 1022 - protein, 574 aa, Homo sapiens
MWTFLGIATFTYFYKKFGDFITLANREVLLCVLVFLSLGLVLSYRCRHRNGGLLGRQQSGSQFALFSDILSGLPFIGFFWAKSPPESENKEQLEARRRRKGTNISETSLIGTAACTSTSSQNDPEVIIVGAGVLGSALAAVLSRDGRKVTVIERDLKEPDRIVGEFLQPGGYHVLKDLGLGDTVEGLDAQVVNGYMIHDQESKSEVQIPYPLSENNQVQSGRAFHHGRFIMSLRKAAMAEPNAKFIEGVVLQLLEEDDVVMGVQYKDKETGDIKELHAPLTVVADGLFSKFRKSLVSNKVSVSSHFVGFLMKNAPQFKANHAELILANPSPVLIYQISSSETRVLVDIRGEMPRNLREYMVEKIYPQIPDHLKEPFLEATDNSHLRSMPASFLPPSSVKKRGVLLLGDAYNMRHPLTGGGMTVAFKDIKLWRKLLKGIPDLYDDAAIFEAKKSFYWARKTSHSFVVNILAQALYELFSATDDSLHQLRKACFLYFKLGGECVAGPVGLLSVLSPNPLVLIGHFFAVAIYAVYFCFKSEPWITKPRALLSSGAVLYKACSVIFPLIYSEMKYMVH

SEQ ID NO: 1023 - DNA, 3097 bp, Homo sapiens
gacccgcgcgggatgtgaccccctgaccccctgcctggcctcccctgccccccagggggcccgcctttgcctgcttttgggggggggtggggaggggcgcgcggatcatggcattggagttcccgggcttgcagccgccgccgccgcctcgttcacgcaccccgagcgccccttcttcccagagcagcagcggagaaggcgaagcggccggcgggggcgaggcagatggggctcaaggcgcgcagggcggcgggggcggctggcggcggcggcgacgggggcggcggaggcggcggggcggctaacccagccggaggggacgcggcggcggccggcgacgaggagcggaaagtggggctggcgcccggcgacgtggagcaagtcaccttggcgctcggggccggagccgacaaagacgggaccctgctgctggagggcggcggccgcgacgaggggcagcggaggaccccgcagggcatcgggctcctggccaagaccccgctgagccgcccagtcaagagaaacaacgccaagtaccggcgcatccaaactttgatctacgacgccctggagagaccgcggggctgggcgctgctttaccacgcgttggtgttcctgattgtcctggggtgcttgattctggctgtcctgaccacattcaaggagtatgagactgtctcgggagactggcttctgttactggagacatttgctattttcatctttggagccgagtttgctttgaggatctgggctgctggatgttgctgccgatacaaaggctggcggggccgactgaagtttgccaggaagcccctgtgcatgttggacatctttgtgctgattgcctctgtgccagtggttgctgtgggaaaccaaggcaatgttctggccacctccctgcgaagcctgcgcttcctgcagatcctgcgcatgctgcggatggaccggagaggtggcacctggaagcttctgggctcagccatctgtgcccacagcaaagaactcatcacggcctggtacatcggtttcctgacactcatcctttcttcatttcttgtctacctggttgagaaagacgtcccagaggtggatgcacaaggagaggagatgaaagaggagtttgagacctatgcagatgccctgtggtggggcctgatcacactggccaccattggctatggagacaagacacccaaaacgtgggaaggccgtctgattgccgccaccttttccttaattggcgtctccttttttgcccttccagcgggcatcctggggtccgggctggccctcaaggtgcaggagcaacaccgtcagaagcactttgagaaaaggaggaagccagctgctgagctcattcaggctgcctggaggtattatgctaccaaccccaacaggattgacctggtggcgacatggagattttatgaatcagtcgtctcttttcctttcttcaggaaagaacagctggaggcagcatccagccaaaagctgggtctcttggatcgggttcgcctttctaatcctcgtggtagcaatactaaaggaaagctatttacccctctgaatgtagatgccatagaagaaagtccttctaaagaaccaaagcctgttggcttaaacaataaagagcgtttccgcacggccttccgcatgaaagcctacgctttctggcagagttctgaagatgccgggacaggtgaccccatggcggaagacaggggctatgggaatgacttccccatcgaagacatgatccccaccctgaaggccgccatccgagccgtcagaattctacaattccgtctctataaaaaaaaattcaaggagactttgaggccttacgatgtgaaggatgtgattgagcagtattctgccgggcatctcgacatgctttccaggataaagtaccttcagacgagaatagatatgattttcacccctggacctccctccacgccaaaacacaagaagtctcagaaagggtcagcattcaccttcccatcccagcaatctcccaggaatgaaccatatgtagccagaccatccacatcagaaatcgaagaccaaagcatgatggggaagtttgtaaaagttgaaagacaggttcaggacatggggaagaagctggacttcctcgtggatatgcacatgcaacacatggaacggttgcaggtgcaggtcacggagtattacccaaccaagggcacctcctcgccagctgaagcagagaagaaggaggacaacaggtattccgatttgaaaaccatcatctgcaactattctgagacaggccccccggaaccaccctacagcttccaccaggtgaccattgacaaagtcagcccctatgggttttttgcacatgaccctgtgaacctgccccgagggggacccagttctggaaaggttcaggcaactcctccttcctcagcaacaacgtatgtggagaggcccacggtcctgcctatcttgactcttctcgactcccgagtgagctgccactcccaggctgacctgcagggcccctactcggaccgaatctccccccggcagagacgtagcatcacgcgagacagtgacacacctctgtccctgatgtcggtcaaccacgaggagctggagaggtctccaagtggcttcagcatctcccaggacagagatgattatgtgttcggccccaatggggggtcgagctggatgagggagaagcggtacctcgccgagggtgagacggacacagacacggaccccttcacgcccagcggctccatgcctctgtcgtccacaggggatgggatttctgattcagtatggaccccttccaataagcccatttaaaagaggtcactggctgacccctccttgtaatgtagacagactttgtatagttcacttactcttacacccgacgcttaccagcggggacaccaatggctgcatcaaatgcatgcgtgtgcgtggtggccccacccaggcaggggcttcccacagcctcttcctccccatgtcaccacaacaaagtgcttccttttcagcatggtttgcatgactttacactatataaatggttccgctaatctcttctaggata

SEQ ID NO: 1024 - protein, 872 aa, Homo sapiens
MGLKARRAAGAAGGGGDGGGGGGGAANPAGGDAAAAGDEERKVGLAPGDVEQVTLALGAGADKDGTLLLEGGGRDEGQRRTPQGIGLLAKTPLSRPVKRNNAKYRRIQTLIYDALERPRGWALLYHALVFLIVLGCLILAVLTTFKEYETVSGDWLLLLETFAIFIFGAEFALRIWAAGCCCRYKGWRGRLKFARKPLCMLDIFVLIASVPVVAVGNQGNVLATSLRSLRFLQILRMLRMDRRGGTWKLLGSAICAHSKELITAWYIGFLTLILSSFLVYLVEKDVPEVDAQGEEMKEEFETYADALWWGLITLATIGYGDKTPKTWEGRLIAATFSLIGVSFFALPAGILGSGLALKVQEQHRQKHFEKRRKPAAELIQAAWRYYATNPNRIDLVATWRFYESVVSFPFFRKEQLEAASSQKLGLLDRVRLSNPRGSNTKGKLFTPLNVDAIEESPSKEPKPVGLNNKERFRTAFRMKAYAFWQSSEDAGTGDPMAEDRGYGNDFPIEDMIPTLKAAIRAVRILQFRLYKKKFKETLRPYDVKDVIEQYSAGHLDMLSRIKYLQTRIDMIFTPGPPSTPKHKKSQKGSAFTFPSQQSPRNEPYVARPSTSEIEDQSMMGKFVKVERQVQDMGKKLDFLVDMHMQHMERLQVQVTEYYPTKGTSSPAEAEKKEDNRYSDLKTIICNYSETGPPEPPYSFHQVTIDKVSPYGFFAHDPVNLPRGGPSSGKVQATPPSSATTYVERPTVLPILTLLDSRVSCHSQADLQGPYSDRISPRQRRSITRDSDTPLSLMSVNHEELERSPSGFSISQDRDDYVFGPNGGSSWMREKRYLAEGETDTDTDPFTPSGSMPLSSTGDGISDSVWTPSNKPI

SEQ ID NO: 1025 - DNA, 4146 bp, Homo sapiens
aattctttctgcctggtatcattaaaaaggaggtgacaatttggcctaagaaaattcacggaatccattttgaaagaaaattatgagtggaaaacacctgagttgaaaagtggggaagtttctcaatctgcttactccaaggaaattcttaaaggaattataaacacttaacctaataagttaatttttaattgtaaaatagaccatcttcaattttttgaagagccctcgtgtggaggaatgcgatctcatggaaacagtggcctaaagaaagttctcctattgctttttacttccctttgcttgaaaaaagataaacagcatagaaacctccaagaggctaccgagttctctttgaacttttttctctgcagctgcgcctggaactgctccctgctgcactttactacctctgtttataagagcaacagtccctctcctgaaaattggactgaattccaacaagtcggcaacttgcatgaagacaagatgtactgcagtgccatgctgggtatcttaaagaacaaggcattgtcctctgcagacacccaggctgcagacttcaaggactggaagaagagctttgcgtcttctctcttctctatacagacacaatctgtagcagcaaatgtgttacagatggacagaagctggggaacatggatgaagctggaaaccatcattctcagcaaactaacagaggaacagaaaagcaaacaccgtatgttctcactcatgattgggagttgaacaatgagaacacatggacacagggaggggaatattacacaccggggcctatcagagcgtgggaggctacgagagggatagcattaggagaaatacctaatgtagatgacgggttgatgggtgcagcaaaccaccatggctcatgtatacccatgtaacagacctacacattctgcacatgtatcccagaacttaaagtatgatttaaaaatatatatagagagagagatatataaattgctgagagtggattttaagtgttctcaccacacaacaaaataagtatgtgaagtaaacatatattagttagcttgatttagccatttcacactatataaatatttcaaaacaacatgttgcacactatagacaatttttattggtcaactaaaaataaaatttttaaagggagaaaataagagagaattggcatcagggttgcaaaggaatgaataaatacatgggccatgaaaaactgatcaatataagggtttgagaggaaggtgaacagtttgcaaagttgtaactttgaaagatctcccttattaatttatttgctcgtttaaaagagtcagggtacaatggaatattcaacttaatctagaagaggtagagtggactgaaattaatttccctctaacatgcatttgttgctctaatcaactatctagagctacacaaaatacatacgattttctaaaattatttaaattcttgaaggtaaatgccatttcttctcttatagatgatagaccttcagactttcacatgactctttataaatagtccccatgctcaaaacgacaaacaccactctcttagatttcaacttagcaaggcatcccaaactaaacttcacatccaagggagaaggcaaatgaaggagagtaatgaccagctatttgtttgagacaataggtacattcatcagattacctccaaacatcagccaagggattttagtttggaacaaagatagttggaatattaattattttcaaatggtggaagagctgccatagagaattagagaaaattttaaactagaagtttgcaaaaaatatattcaaataatagctttgtttttattctaaaatgtgaccttggctaagccacataatctctctgggtctctgtatgtgggagctactgataatacctgtatctctgtttcaggtgatgatcaaaatgcctattttgtgatttgtgaaatgaaatgtgctgtaggcatgtaaggtgatttttacaaataattattttcttgttgtttttgaagttccagagtacaggaaaggaaacaggaaaaacataactgaggaatagttgttaggtcggtgagacattgaaccttctaacatctgaaactgtccactaactggcaagagcatttcaataaaaagcaaacacctcatcatattgaatcatagtgaatatataaaaagacactgtacacatttcttcagatatacatactgtaattgtcattctaaattgttaaaaaattactatatatagtaattctaaaatatataatatataatacataaatatatattatatatataaattatatatatatacacacatatatattagaatggatttcacactgggttttactcccattatgtgatgcataaaaaagtaaacaacaataaaacagttaaattaatgagcttggttggttttcaaaacatgttaggcccaatatgttagagaattaatatagggattttaaaaatgtgttaaactcaacatgttcttactaataacaggggatttctgatatcaaggaccagttaatgtggttaatattttgtattagaaggaaagggaagagatgtgctgggcaaaagaggaaaatatagattttttaaaaataaatagaaatctgagctaatattaataagggtaaaaaaggaaaaagtgataacatcatgtggaacattccagaagttatgtgcagggctcagtatgggggcaacacatcaatagcatatatatacaaggccaacctcttcctctccattcccagaaatctagtagtggggcactgtatgtgtacaggtaacatgttaaatagataggctgtgctggatgctatggttgcagaatgtggttgaagaagaattgcgaagccaacaaagcaagggttggggcagagtttatgagttatatgaagtttgtgtggggactgagaattctggattttagacatcctgtgtcctgcatggcaactcctccacccccaccagtcatgtcaggtggaggccactatagcagatatagtacgcctacattaagggaaggaggtagttctacgtaatgaaaactcactttccaagttgacccttcttaatcctctgctggaaaaccagtgtactgtgatacccaagggcatggttttatcctttggtgccactattcatcatatcctcattgcattggaaaaattaattgattactcttgacttcacttttctgtcaaattaaaattccattaccattcatttgaaaagatctgatgtggtttaagtgagattatatagtgtgtggatcattgctcagcatgtgataagcactcagacattttagctaaatgaaaacaacactaataccagtactactaaaactgagccctaaagtaatcacctgagttttatttaaacaaaaacataattttcttccatctttctgtaaaattgttcaacaagaaaatattaacattcatagatgatttcagagtttataggaacttttgcatacagctcacttatcagagcaactcagttggatcctgttattaatttcctcactttagaaatgaagggactgagatcaagaaaaggaagtgacttgctcaaggatacatatacaacaagtaaccatgctaagaattctcatttgatgtgcgatttcccccaatcagtgactatagatatatatagatacatagatgtgtatatatatagatgatagatagatacgtagatggggatacagatactacacctgtgtataccatatctatgtatgtttatatgctatttgtatgttccacttcggatatcttctcacattcagatatctagtgtccacatgtttttttccctggattcctctcgaaacataatcatatggcaaataaagtgagttctgcaataaactttaagatttaatataatacattttcagggagggtgtgggcagaaaaattgtgtggctttaagttttcttagcaaataagtgacttccctcctaagatgcagctgcttttcttcattttttgtaactgttttatgtttcacgaaattgctctgtcctgattttaactgtgtcatattccagctctcagagggtagccaaaatttggaaacaaaatgttgttttgctaat

SEQ ID NO: 1026 - protein, 169 aa, Homo sapiens
MRSHGNSGLKKVLLLLFTSLCLKKDKQHRNLQEATEFSLNFFLCSCAWNCSLLHFTTSVYKSNSPSPENWTEFQQVGNLHEDKMYCSAMLGILKNKALSSADTQAADFKDWKKSFASSLFSIQTQSVAANVLQMDRSWGTWMKLETIILSKLTEEQKSKHRMFSLMIGS

SEQ ID NO: 1027 - DNA, 6366 bp, Homo sapiens
ggggctggccgaggctgcggcgtttctccccaaggaagtgtcttctccgctttccctgttcttctgtttctcacacactttctatctcattctgtaactttcaagcctttccttctaactgtatgtatttagttacttgttttcaagctggttccctctctggccccctggcctggggaaagcctccacacttactgcgggtcttgtttagagtctgagtttgtgagattatttggggcagagtgggcgagtggctgacaggtgacccccaggaggaggattcctggggctggtgtcttctcccagctgctgcttccagtgggcctgggcccaggactggacctccgctggcacccctgagtgcctccctgccaggccatgctgctgtagaccctaacagcgtctcttcctggccaagagaagcctgtccccaagaacaggagagccatggccggcctccgagggaacgctgtggctggcctcctctggatgctgctgctgtggagtgggggcggcggctgccaggctcagcgggcaggttgcaaaagtgtccactacgatctggtcttcctcctggacacctcctccagcgtgggcaaggaggactttgagaaggtccggcagtgggtggccaacctggtggacaccttcgaggtgggccccgaccgcacccgtgtgggggtcgtgcgctacagcgaccggcccaccacggccttcgagttgggactctttggctcgcaggaggaggtcaaggcggctgcccggcgtctcgcctaccacgggggcaacaccaacacgggagacgcgctccgctacatcacggcccgcagcttctccccacacgccggcggccgccccagggaccgcgcctacaagcaggtggccatcctgctcaccgacggccgcagccaggacctggtgctggacgccgcggcggcagcccaccgcgctggcatccgcatctttgccgtgggcgtgggcgaggcactcaaggaggagctggaggagatcgcctcagagcccaagtccgcccacgtcttccacgtgtccgacttcaatgccatcgacaagatccggggcaagctgcggcgccgtctttgtgaaaatgtgctctgtcctagcgttcgtgtagaaggagatcgctttaagcacaccaatggaggaaccaaggaaatcacaggttttgacctgatggatttgttcagtgtgaaggaaatcttggggaagagagagaatggagctcagagttcctatgtacggatgggatccttccctgtggtgcaaagtactgaggatgtgttcccccaaggtttacctgatgagtacgcctttgtcacaaccttccggttcaggaaaacctctcggaaggaagactggtatatctggcaggtcatcgaccagtacagcatcccacaggtctccatccggctggatggtgaaaacaaggcagtcgagtacaacgctgtgggtgccatgaaagatgctgtcagggtggtcttccgaggttctcgggtcaatgacctctttgaccgggactggcacaagatggccctgagcatccaggcccagaacgtctccctgcacattgactgtgcgctggtgcagacactacccatcgaggaacgggagaacattgacatccagggcaagactgtgattggcaagcgcctctacgacagtgtgcccattgactttgacctacagcggattgtgatctattgtgactcgagacacgcagaattggagacttgttgtgatatcccctcgggtccgtgccaggtgaccgtggtgacagagcctccacctccacccccaccccagcggcctcccaccccaggcagtgaacagattgggtttttgaagaccatcaactgctcctgcccagctggagagaagggtgaaatgggagttgctggccccatggggctccctggtccaaagggagacataggagccattgggccggttggcgctcctggacctaagggagagaaaggtgatgtgggcataggaccttttggccaaggggaaaagggtgaaaagggttccctgggcctgcccggcccccctgggagagacggcagcaaaggcatgagaggggagccaggagagctgggagagccggggctgccgggtgaggtcggcatgcgggggccccaaggaccacctggactccccggacctcctggacgtgtcggagctcctggtctccaaggagaacgaggtgaaaagggaactcgaggagaaaagggagagcgaggcctggatggattccctgggaagcctggggacacaggacagcagggcaggcccggcccttctggtgtggcaggaccccagggagaaaagggtgacgtgggacctgcggggccacctggtgtaccaggctcagtggtgcagcaagagggcttgaaaggggaacagggagctccaggacccagaggtcaccaaggcgcccccggtcctccaggagctcggggtccaataggcccagaaggcagggatggacctcctggtttgcaaggtctccgagggaagaaaggtgacatgggaccacctggaatccctggattgctggggctgcagggccctccaggaccccctggtgtcccaggcccccctggaccgggaggttctccgggtttgcctggagagatcggcttcccgggaaagcctggacctcctgggcccacgggaccccctggaaaggacgggccaaatggaccaccaggtccgccaggaaccaagggagaaccaggagaaagaggggaagatggtctgcctggaaaaccaggccttcggggagaaattggggagcagggcctggcaggccgacctggagagaagggagaagcaggcctcccaggggctccaggcttcccaggtgtgagaggagagaaaggagaccagggagaaaaaggtgaactgggacttccaggactgaaaggtgaccgaggtgaaaagggtgaagctggtcctgcaggccctcccgggttacctggaactacatccctgttcacaccacatccacggatgcccggagaacaagggcccaaaggagagaagggcgatccaggcctgcctggggaaccgggactgcagggccgtcctggagaattggggcctcagggacccactggaccaccgggtgccaagggacaggaaggtgcacatggggctcctggagcagctggaaaccccggtgctcccggacatgtcggtgcccccggtcccagtggccctccaggaagtgtgggtgctcccggcctcagaggcaccccagggaaagatggggagcgtggtgagaagggtgcagcgggggaagaaggcagcccagggccagttggtcccaggggagatcctggtgctcctgggctccctgggccgcccggaaaagggaaggatggagagccgggactccgtggatcacctggactccctggacccctaggaaccaaggctgcttgcggaaaagtcagagggtcagaaaactgtgcactgggagggcaatgtgttaagggggatcgaggagctcctgggatccctggttctcctggcagccgtggtgacccaggcattggggttgctggccctcctggcccttccggaccaccaggagacaaaggatccccgggatcacgaggcttacctggattccctggcccccagggcccagccggccgggacggtgcaccaggaaatccaggagaaagagggcctcctggcaagccgggcctctcttcactactgtctccaggggacataaatctcttggctaaggatgtgtgcaatgactgccctcctggccccccaggcctccctggtctaccaggttttaaaggggacaaaggtgtcccaggaaagccagggagagaaggcacagaagggaaaaagggagaggctgggcctccaggcctaccagggcccccaggaatagctggaccacagggaagtcaaggagaacgtggtgcagatggtgaggttgggcagaaaggtgatcagggtcatcctggagttccaggtttcatggggcccccagggaaccccgggccaccaggggcagatggaattgcaggagctgctggaccaccaggaatccaagggtcacctgggaaagaaggccctcctggcccccaaggcccatctggattacccggaatcccaggagaagaaggcaaagagggcagagatggaaagccgggtccccctggagagccgggcaaagcaggagagccaggtctaccaggaccagagggtgcccgaggcccacctggcttcaagggacacacaggcgattctggtgcacccggtccccggggagagtctggtgccatggggcttcctggtcaggaagggttaccaggaaaagatggtgacactggacccactgggccacagggtccccaaggaccaaggggcccaccgggcaagaatggatcaccgggatctccaggagagcctggcccttcaggaacccctggccagaaaggaagcaaaggggaaaatggcagcccaggacttcctggcttcctgggtccccgtgggcctccgggagaaccaggagagaaaggagtcccaggcaaggagggggtccctgggaagcctggagagcctggattcaaaggagaaaggggagatcctgggatcaaaggtgacaaaggacctcctggtggaaaaggccagcctggggaccctggaatcccaggccacaaaggccacacaggcctgatgggtccccaaggactacctggggagaatggaccagttggacccccagggcctccaggccagccgggatttccaggactgaggggggagtctccatccatggaaaccctgcgtcggcttattcaagaagagctggggaagcagcttgaaaccagactcgcctacctcctggcccagatgcccccggcgtacatgaagtcatctcaaggcagacctgggcccccagggccccctggaaaagatgggcttccaggccgggccggccccatgggggagccaggtcgtcctgggcaggggggtctggaaggaccctctggacccataggtcccaaaggtgagcgaggagccaaaggtgacccaggtgcacctggagttggcctccgaggcgagatgggaccccctggaatcccaggtcaacccggggaacctggctatgctaaagatggacttcctgggatccctggccctcaaggggagacaggaccagctggacatcctggcctcccaggacctcccggtcccccaggccaatgtgacccttcccagtgtgcctacttcgccagccttgctgcccggccgggtaatgtgaagggtccctaaaggactctggaaagccagaagactgcagtggatttctgaaacttgaactcagagcccagtgggaagccagaggtcttgaaagacttcagccatgtgttccttttttttttctttcttttatcgtttgctttttgttttattttcttgagagacctcaaaattattaaatccaacagacgctgccggtcggtcagattattattaatattattgttgttgttaattattattattatttcatatgctgatgctttgtgagttcttttccactcctttaaagttgggaaaacttgattcgtggggcaggagattgtttcttcattcttctgacagcccccatctgacgcgtaactgcccattttaaggaaactcttggtgctacaaaaccctgaccagacacttggcaaatttacctctttcttcaaaagaaaaactttaagaaaatgagccaatgggcttcattctcagtcatgcccggagatcacccaggagaaataatacaaacaccaccactgtccagagagagtaaagaagcagaaagagaaagaatttgcaaccatgaggaatgttcccacctcccgacgggacgtgcatttggaaaacacagaatcagccctcagggtgcactccagccacctcagtgctctaagctcacagaagtgaaataatgtctgtgggttggcaatggctttgtgggatcatatgtcttggccaaagatgggaaaacctatgttgaagaggcagcccttgagtgttaatttgtcttctaaactgtgtaaggccccttcaagttcctcttgttggtttcaattatattaattataaaacaagtggatgtggtgaccatccacttgtgtttccctaatgatgggcagttggccagggcactgaccagagctgggaaatttgtatctccaaggcggctctgtctctgaaataaatggcatcaagtgcatgtgtgtatgcgacatgccctgcctgaacaggtgctcaataaatccaagtttccttctcttgaaaaaaaaaaaaaaaaaaaaa

SEQ ID NO: 1028 - protein, 1626 aa, Homo sapiens
MAGLRGNAVAGLLWMLLLWSGGGGCQAQRAGCKSVHYDLVFLLDTSSSVGKEDFEKVRQWVANLVDTFEVGPDRTRVGVVRYSDRPTTAFELGLFGSQEEVKAAARRLAYHGGNTNTGDALRYITARSFSPHAGGRPRDRAYKQVAILLTDGRSQDLVLDAAAAAHRAGIRIFAVGVGEALKEELEEIASEPKSAHVFHVSDFNAIDKIRGKLRRRLCENVLCPSVRVEGDRFKHTNGGTKEITGFDLMDLFSVKEILGKRENGAQSSYVRMGSFPVVQSTEDVFPQGLPDEYAFVTTFRFRKTSRKEDWYIWQVIDQYSIPQVSIRLDGENKAVEYNAVGAMKDAVRVVFRGSRVNDLFDRDWHKMALSIQAQNVSLHIDCALVQTLPIEERENIDIQGKTVIGKRLYDSVPIDFDLQRIVIYCDSRHAELETCCDIPSGPCQVTVVTEPPPPPPPQRPPTPGSEQIGFLKTINCSCPAGEKGEMGVAGPMGLPGPKGDIGAIGPVGAPGPKGEKGDVGIGPFGQGEKGEKGSLGLPGPPGRDGSKGMRGEPGELGEPGLPGEVGMRGPQGPPGLPGPPGRVGAPGLQGERGEKGTRGEKGERGLDGFPGKPGDTGQQGRPGPSGVAGPQGEKGDVGPAGPPGVPGSVVQQEGLKGEQGAPGPRGHQGAPGPPGARGPIGPEGRDGPPGLQGLRGKKGDMGPPGIPGLLGLQGPPGPPGVPGPPGPGGSPGLPGEIGFPGKPGPPGPTGPPGKDGPNGPPGPPGTKGEPGERGEDGLPGKPGLRGEIGEQGLAGRPGEKGEAGLPGAPGFPGVRGEKGDQGEKGELGLPGLKGDRGEKGEAGPAGPPGLPGTTSLFTPHPRMPGEQGPKGEKGDPGLPGEPGLQGRPGELGPQGPTGPPGAKGQEGAHGAPGAAGNPGAPGHVGAPGPSGPPGSVGAPGLRGTPGKDGERGEKGAAGEEGSPGPVGPRGDPGAPGLPGPPGKGKDGEPGLRGSPGLPGPLGTKAACGKVRGSENCALGGQCVKGDRGAPGIPGSPGSRGDPGIGVAGPPGPSGPPGDKGSPGSRGLPGFPGPQGPAGRDGAPGNPGERGPPGKPGLSSLLSPGDINLLAKDVCNDCPPGPPGLPGLPGFKGDKGVPGKPGREGTEGKKGEAGPPGLPGPPGIAGPQGSQGERGADGEVGQKGDQGHPGVPGFMGPPGNPGPPGADGIAGAAGPPGIQGSPGKEGPPGPQGPSGLPGIPGEEGKEGRDGKPGPPGEPGKAGEPGLPGPEGARGPPGFKGHTGDSGAPGPRGESGAMGLPGQEGLPGKDGDTGPTGPQGPQGPRGPPGKNGSPGSPGEPGPSGTPGQKGSKGENGSPGLPGFLGPRGPPGEPGEKGVPGKEGVPGKPGEPGFKGERGDPGIKGDKGPPGGKGQPGDPGIPGHKGHTGLMGPQGLPGENGPVGPPGPPGQPGFPGLRGESPSMETLRRLIQEELGKQLETRLAYLLAQMPPAYMKSSQGRPGPPGPPGKDGLPGRAGPMGEPGRPGQGGLEGPSGPIGPKGERGAKGDPGAPGVGLRGEMGPPGIPGQPGEPGYAKDGLPGIPGPQGETGPAGHPGLPGPPGPPGQCDPSQCAYFASLAARPGNVKGP

SEQ ID NO: 1029 - DNA, 504 bp, Homo sapiens
atgggaaagatcctggaacagcatgggaaaagtcctgaaacagtgtgggaaaggtcctggaacagcgcaggaaagttcctggaacagcatgggaaaggttctggaacagcgtgggtaacggtcctggaacagcatgggaaaggtcctggaacagcatgggtgaagttcctggaacagcatggcatgggaaaggttctggaacagcatcggaaaggttctggaacagcatgggtgaacgttcaggaacagcatgggaaaggtcctggaacagtatgggagaggtcctggaacagcatgggaaaggttctggaacagcatgggaaaggttctggaacagtgtgggtgaaggtcctggtacagcatgggaaaggttctggaacagtgtgggtgaaggtcctggtacagcatgggaaaggttctggaacagcgtgggtgaaagtcctggtacagcatgggaaacgttctggaacagcatgggtgaaggccctggaacagcgtgggtga

SEQ ID NO: 1030 - protein, 167 aa, Homo sapiens
MGKILEQHGKSPETVWERSWNSAGKFLEQHGKGSGTAWVTVLEQHGKGPGTAWVKFLEQHGMGKVLEQHRKGSGTAWVNVQEQHGKGPGTVWERSWNSMGKVLEQHGKGSGTVWVKVLVQHGKGSGTVWVKVLVQHGKGSGTAWVKVLVQHGKRSGTAWVKALEQRG

SEQ ID NO: 1031 - DNA, 5535 bp, Homo sapiens
ggactttagaagccgttgctgccctctctgtcacctgaagcggggccctctcccatcccacccttgccccgcctccctgcccccaccgggccggccctgcccgccgccggaccctggcatgtcaagacctggtccgcgcctgcctgcccagcccgcggaaccccggcggccccgcgagctaggatgaggggccaggccgccgccccgggccccgtctggatcctcgccccgctgctactgctgctgctgctgctgggacgccgcgcgcgggcggccgccggagcagacgcggggcccgggcccgagccgtgcgccacgctggtgcagggaaagttcttcggctacttctccgcggccgccgtgttcccggccaacgcctcgcgctgctcctggacgctacgcaacccggacccgcggcgctacactctctacatgaaggtggccaaggcgcccgtgccctgcagcggccccggccgcgtgcgcacctaccagttcgactccttcctcgagtccacgcgcacctacctgggcgtggagagcttcgacgaggtgctgcggctctgcgacccctccgcacccctggccttcctgcaggccagcaagcagttcctgcagatgcggcgccagcagccgccccagcacgacgggctccggccccgggccgggccgccgggccccaccgacgacttctccgtggagtacctggtggtggggaaccgcaaccccagccgtgccgcctgccagatgctgtgccgctggctggacgcgtgtctggccggtagtcgcagctcgcacccctgcgggatcatgcagaccccctgcgcctgcctgggcggcgaggcgggcggccctgccgcgggacccctggccccccgcggggatgtctgcttgagagatgcggtggctggtggccctgaaaactgcctcaccagcctgacccaggaccggggcgggcacggcgccacaggcggctggaagctgtggtccctgtggggcgaatgcacgcgggactgcgggggaggcctccagacgcggacgcgcacctgcctgcccgcgccgggcgtggagggcggcggctgcgagggggtgctggaggagggtcgccagtgcaaccgcgaggcctgcggccccgctgggcgcaccagctcccggagccagtccctgcggtccacagatgcccggcggcgcgaggagctgggggacgagctgcagcagtttgggttcccagccccccagaccggtgacccagcagccgaggagtggtccccgtggagcgtgtgctccagcacctgcggcgagggctggcagacccgcacgcgcttctgcgtgtcctcctcctacagcacgcagtgcagcggacccctgcgcgagcagcggctgtgcaacaactctgccgtgtgcccagtgcatggtgcctgggatgagtggtcgccctggagcctctgctccagcacctgtggccgtggctttcgggatcgcacgcgcacctgcaggcccccccagtttgggggcaacccctgtgagggccctgagaagcaaaccaagttctgcaacattgccctgtgccctggccgggcagtggatggaaactggaatgagtggtcgagctggagcgcctgctccgccagctgctcccagggccgacagcagcgcacgcgtgaatgcaacgggccttcctacgggggtgcggagtgccagggccactgggtggagacccgagactgcttcctgcagcagtgcccagtggatggcaagtggcaggcctgggcgtcatggggcagttgcagcgtcacgtgtggggctggcagccagcgacgggagcgtgtctgctctgggcccttcttcgggggagcagcctgccagggcccccaggatgagtaccggcagtgcggcacccagcggtgtcccgagccccatgagatctgtgatgaggacaactttggtgctgtgatctggaaggagaccccagcgggagaggtggctgctgtccggtgtccccgcaacgccacaggactcatcctgcgacggtgtgagctggacgaggaaggcatcgcctactgggagccccccacctacatccgctgtgtttccattgactacagaaacatccagatgatgacccgggagcacctggccaaggctcagcgagggctgcctggggagggggtctcggaggtcatccagacactggtggagatctctcaggacgggaccagctacagtggggacctgctgtccaccatcgatgtcctgaggaacatgacagagattttccggagagcgtactacagccccacccctggggacgtacagaactttgtccagatccttagcaacctgttggcagaggagaatcgggacaagtgggaggaggcccagctggcgggccccaacgccaaggagctgttccggctggtggaggactttgtggacgtcatcggcttccgcatgaaggacctgagggatgcataccaggtgacagacaacctggttctcagcatccataagctcccagccagcggagccactgacatcagcttccccatgaagggctggcgggccacgggtgactgggccaaggtgccagaggacagggtcactgtgtccaagagtgtcttctccacggggctgacagaggccgatgaagcatccgtgtttgtggtgggcaccgtgctctacaggaacctgggcagcttcctggccctgcagaggaacacgaccgtcctgaattctaaggtgatctccgtgactgtgaaacccccgcctcgctccctgcgcacacccttggagatcgagtttgcccacatgtataatggcaccaccaaccagacctgtatcctgtgggatgagacggatgtaccctcctcctccgcccccccgcagctcgggccctggtcgtggcgcggctgccgcacggtgcccctcgacgccctccggacgcgctgcctctgtgaccggctctccaccttcgccatcttagcccagctcagcgccgacgcgaacatggagaaggcgactctgccgtcggtgacgctcatcgtgggctgtggcgtgtcctctctcaccctgctcatgctggtcatcatctacgtgtccgtgtggaggtacattcgctcagagcgttctgtcatcctcatcaacttctgcctgtccatcatctcctccaatgccctcatcctcatcgggcagacccagacccgcaacaaggtggtgtgcacgctggtggccgccttcctgcacttcttcttcctgtcctccttctgctgggtgctcaccgaggcctggcagtcctacatggcggtgacgggccacctccggaaccgcctcatccgcaagcgcttcctctgcctgggctgggggctccctgcactggttgtggccatttctgtgggattcaccaaggccaaagggtacagcaccatgaactactgctggctctccctggaggggggactgctctatgccttcgtgggacctgccgctgccgttgtgctggtgaacatggtcattgggatcctggtgttcaacaagctcgtgtccaaagacggcatcacggacaagaagctgaaggagcgggcaggggcctccctgtggagctcctgcgtggtgctgccgctgctggcgctgacctggatgtcggctgtgctcgccgtcaccgaccgccgctccgccctcttccagatcctcttcgctgtcttcgactcgctggagggcttcgtcatcgtcatggtgcactgtatcctccgtagagaggtccaggacgctgtgaaatgccgtgtggttgaccggcaggaggagggcaacggggactcagggggctccttccagaacggccacgcccagctcatgaccgacttcgagaaggacgtggatctggcctgtagatcagtgctgaacaaggacatcgcggcctgccgcactgccaccatcacgggcacactgaagcggccgtctctgcccgaggaggagaagctgaagctggcccatgccaaggggccgcccaccaatttcaacagcctgccggccaacgtgtccaagctgcacctgcacggctcaccccgctatcccggcgggcccctgcccgacttccccaaccactcactgaccctcaagagggacaaggcgcccaagtcctccttcgtcggtgacggggacatcttcaagaagctggactcggagctgagccgggcccaggagaaggctctggacacgagctacgtgatcctgcccacggccacggccacgctgcggcccaagcccaaggaggagcccaagtacagcatccacattgaccagatgccgcagacccgcctcatccacctcagcacggcccccgaggccagcctccccgcccgcagcccgccctcccgccagccccccagcggcgggccccccgaggcaccccctgcccagcccccaccgcctccgcccccaccgccaccacctccccagcagcccctgcccccaccgcccaatctggagccggcaccccccagcctgggggatcccggggagcctgccgcccatccgggacccagcacggggcccagcaccaagaacgagaatgtcgccaccttgtctgtgagctccctggagcggcggaagtcgcggtatgcagaactggactttgagaagatcatgcacacccggaagcggcaccaagacatgttccaggacctgaaccggaagctgcagcacgcagcggagaaggacaaggaggtgctggggccggacagcaagccggaaaagcagcagacgcccaacaagaggccctgggagagcctccggaaagcccacgggacgcccacgtgggtgaagaaggagctggagccgctgcagccgtcgccgctggagcttcgcagcgtggagtgggagaggtcgggcgccacgatcccgctggtgggccaggacatcatcgacctccagaccgaggtctgagcgggtgggcggcggccacgcactgggccacggaggagggatgctgctccgcccgctcctgccgcagacgggcacagacacgctcgcgggcagcgggccaggcccgcaccccggcctcagggcgctcagacggcggccaggcacagggcccgcagtgctgggaccagagccagatgcaggacaggaggcggcccggccagcgggcacagggcaccagaggccgaaggtgcctcagactccgccctcctcgggccgaggcccagcgggcagatgggcggacggctgtggaccgtggacaggcccagcgcggccagcgtcccagggtacccgcctgagctcctgctgcggaggagctgcctgcttggcccggccggcctggcaccgttttttaaacacccccatccctcgggaagcagccagctccccacaccttccagggccctaggcccctcctagacccaggtggagggcacagccctccgaccctcatggcccccaggggcaggactgagtcccctccaggaagaagcaggggggaatctattttttctctccttttcttttcttcaataaaaagaattaaaaacccaaaaaaaa

SEQ ID NO: 1032 - protein, 1584 aa, Homo sapiens
MRGQAAAPGPVWILAPLLLLLLLLGRRARAAAGADAGPGPEPCATLVQGKFFGYFSAAAVFPANASRCSWTLRNPDPRRYTLYMKVAKAPVPCSGPGRVRTYQFDSFLESTRTYLGVESFDEVLRLCDPSAPLAFLQASKQFLQMRRQQPPQHDGLRPRAGPPGPTDDFSVEYLVVGNRNPSRAACQMLCRWLDACLAGSRSSHPCGIMQTPCACLGGEAGGPAAGPLAPRGDVCLRDAVAGGPENCLTSLTQDRGGHGATGGWKLWSLWGECTRDCGGGLQTRTRTCLPAPGVEGGGCEGVLEEGRQCNREACGPAGRTSSRSQSLRSTDARRREELGDELQQFGFPAPQTGDPAAEEWSPWSVCSSTCGEGWQTRTRFCVSSSYSTQCSGPLREQRLCNNSAVCPVHGAWDEWSPWSLCSSTCGRGFRDRTRTCRPPQFGGNPCEGPEKQTKFCNIALCPGRAVDGNWNEWSSWSACSASCSQGRQQRTRECNGPSYGGAECQGHWVETRDCFLQQCPVDGKWQAWASWGSCSVTCGAGSQRRERVCSGPFFGGAACQGPQDEYRQCGTQRCPEPHEICDEDNFGAVIWKETPAGEVAAVRCPRNATGLILRRCELDEEGIAYWEPPTYIRCVSIDYRNIQMMTREHLAKAQRGLPGEGVSEVIQTLVEISQDGTSYSGDLLSTIDVLRNMTEIFRRAYYSPTPGDVQNFVQILSNLLAEENRDKWEEAQLAGPNAKELFRLVEDFVDVIGFRMKDLRDAYQVTDNLVLSIHKLPASGATDISFPMKGWRATGDWAKVPEDRVTVSKSVFSTGLTEADEASVFVVGTVLYRNLGSFLALQRNTTVLNSKVISVTVKPPPRSLRTPLEIEFAHMYNGTTNQTCILWDETDVPSSSAPPQLGPWSWRGCRTVPLDALRTRCLCDRLSTFAILAQLSADANMEKATLPSVTLIVGCGVSSLTLLMLVIIYVSVWRYIRSERSVILINFCLSIISSNALILIGQTQTRNKVVCTLVAAFLHFFFLSSFCWVLTEAWQSYMAVTGHLRNRLIRKRFLCLGWGLPALVVAISVGFTKAKGYSTMNYCWLSLEGGLLYAFVGPAAAVVLVNMVIGILVFNKLVSKDGITDKKLKERAGASLWSSCVVLPLLALTWMSAVLAVTDRRSALFQILFAVFDSLEGFVIVMVHCILRREVQDAVKCRVVDRQEEGNGDSGGSFQNGHAQLMTDFEKDVDLACRSVLNKDIAACRTATITGTLKRPSLPEEEKLKLAHAKGPPTNFNSLPANVSKLHLHGSPRYPGGPLPDFPNHSLTLKRDKAPKSSFVGDGDIFKKLDSELSRAQEKALDTSYVILPTATATLRPKPKEEPKYSIHIDQMPQTRLIHLSTAPEASLPARSPPSRQPPSGGPPEAPPAQPPPPPPPPPPPPQQPLPPPPNLEPAPPSLGDPGEPAAHPGPSTGPSTKNENVATLSVSSLERRKSRYAELDFEKIMHTRKRHQDMFQDLNRKLQHAAEKDKEVLGPDSKPEKQQTPNKRPWESLRKAHGTPTWVKKELEPLQPSPLELRSVEWERSGATIPLVGQDIIDLQTEV

SEQ ID NO: 1033 - DNA, 2985 bp, Homo sapiens
tcgggcacggcgtcctccctccgcagcagccgagccggacctgcctccccgggcgtgctccgccggccccgccgccggcccgcagcgacagacaggcgctccccgcagctccgcacgggacccaggccgccggaccccagcgccggaccaccctctgtccgccccgaggagtttgccgcctgccggagcacctgcgcacagatggagctggaccaccggaccagcggcgggctccacgcctaccccgggccgcggggcgggcaggtggccaagcccaacgtgatcctgcagatcgggaagtgccgggccgagatgctggagcacgtgcggcggacgcaccggcacctgctggccgaggtgtccaagcaggtggagcgcgagctgaaggggctgcaccggtcggtcgggaagctggagagcaacctggacggctacgtgcccacgagcgactcgcagcgctggaagaagtccatcaaggcctgcctgtgccgctgccaggagaccatcgccaacctggagcgctgggtcaagcgcgagatgcacgtgtggcgcgaggtgttctaccgcctggagcgctgggccgaccgcctggagtccacgggcggcaagtacccggtgggcagcgagtcagcccgccacaccgtttccgtgggcgtggggggtcccgagagctactgccacgaggcagacggctacgactacaccgtcagcccctacgccatcaccccgcccccagccgctggcgagctgcccgggcaggagcccgccgaggcccagcagtaccagccgtgggtccccggcgaggacgggcagcccagccccggcgtggacacgcagatcttcgaggaccctcgagagttcctgagccacctagaggagtacttgcggcaggtgggcggctctgaggagtactggctgtcccagatccagaatcacatgaacgggccggccaagaagtggtgggagttcaagcagggctccgtgaagaactgggtggagttcaagaaggagttcctgcagtacagcgagggcacgctgtcccgagaggccatccagcgcgagctggacctgccgcagaagcagggcgagccgctggaccagttcctgtggcgcaagcgggacctgtaccagacgctctacgtggacgcggacgaggaggagatcatccagtacgtggtgggcaccctgcagcccaagctcaagcgtttcctgcgccaccccctgcccaagaccctggagcagctcatccagaggggcatggaggtgcaggatgacctggagcaggcggccgagccggccggcccccacctcccggtggaggatgaggcggagaccctcacgcccgcccccaacagcgagtccgtggccagtgaccggacccagcccgagtagagggcatcccggagcccccagcctgcccactacatccagcctgtggctttgcccaccaggacttttgagctggggctgactcctgcaggggaagccctggtccagctgggtgccccctcgagctccgggcggactcgcacacactcgtgtcatccagatgtgagcaccgcacccagcggcaaagagccctcccccctgcagggctccacccatcaccctccctccgtctgtctttccggcctggaccccaccctccacactctcaggccatcacagaacaccccagcttcctcattctgctacaacacccaggccctctggacatccagaaaaccaagtgtccggatggcaggggccagcggccaccaagctcatgggacacccagagcagaagctagggcagagccaatgctgagggagcctcgacttccggcgccgccgccctctcccggcatccgcagagccagctgacgccctccctgcctcccagggcagctggccagcctcgggcagcgcggccccctcctcccaggggagagtagaagtcgcacacgcagcagagcagacctgatgtcccggtgcttcctggcccctcagctccagtgattcacgcccgcctggagaagaatcagagctcagctcatgactcacccatggcaggcggagggtcccagaggggctgagtcctcaaatccggctgaggcagcagctggcaccatcagagccaggagagtgacaacaggtctcaaggttcccacaaagtctttgctgctgtgctgggcaccacccacccctcaccttgcaggctgcctgcgtgggaggcgaagtcccaggacagcccagaggggggctacagagaggagtcggctgcagcagagggcaggagccccagcttagccctgagcgccagcgcgaggaccagggcctgccactaagcccgccccgctggccgccagctgcccgtccccagagccactgcagcaggagtcgggccctgcctccctcccagcagggaaaccccgcccgctgccaggccatcctctctgccagaggctttcatgagccccaaggctggggccacagctcctacccctgcccagcagccctgagctcagctgcaggaaggacatcccagaagccatggctcctggggcgcttccaggcattctgccctgccccgacaccagaaccctggtgctggtgggccactagcgtctgcagcctaagcaggtgctggctcagggttcatcgttctgccttgtccactgggggaccagccctgcagaccactctgacaagtcttcagcccacaccctgccagccccacagattttatttttgcacataagccataaccaatcctcaaggctggcacaggctttggggaagccctggagcctgtgaagaccctggaaacctcatgaggctgtggccaacccctgccccttgccccacacagaccaggccttaaatgtcggtccaggccctgtgcaccttaccccagagacagactctttttgtaagattttgttaataaaacactgaaacttcaaaaaaaaaaaaaaaaaaaaaaaaaaaaaaaaaaaaaaaaaa

SEQ ID NO: 1034 - protein, 396 aa, Homo sapiens
MELDHRTSGGLHAYPGPRGGQVAKPNVILQIGKCRAEMLEHVRRTHRHLLAEVSKQVERELKGLHRSVGKLESNLDGYVPTSDSQRWKKSIKACLCRCQETIANLERWVKREMHVWREVFYRLERWADRLESTGGKYPVGSESARHTVSVGVGGPESYCHEADGYDYTVSPYAITPPPAAGELPGQEPAEAQQYQPWVPGEDGQPSPGVDTQIFEDPREFLSHLEEYLRQVGGSEEYWLSQIQNHMNGPAKKWWEFKQGSVKNWVEFKKEFLQYSEGTLSREAIQRELDLPQKQGEPLDQFLWRKRDLYQTLYVDADEEEIIQYVVGTLQPKLKRFLRHPLPKTLEQLIQRGMEVQDDLEQAAEPAGPHLPVEDEAETLTPAPNSESVASDRTQPE

SEQ ID NO: 1035 - DNA, 9116 bp, Homo sapiens
gaaccgagtggccggcacttccggccggcggcggctgctccgggtgagcaggcccctgaagtgctgtgcctggagataccattgtggaccctggagaggcacctgctgcttatgcggtaaaacctctaccaccccaaacctggtcagtttgaggggagccgctgccatagtatccacagagaaggccggagttccagccgtgtggagcagcagaggggagtctgacagggtcacctcctacacagagagaattggcagctgactgcactgccaggagccaaggcctaggtgtgtggagcctggaagaccagggatacctgaggcaggaggtgcagcgtgtggagtgagaaacccgagagggactggggcctgtgctcaggatcagcagagcaggcaggcagagtggagagggagagacggagccccagaaggggagcaggaggagagggaagtagtggcagcagcccaggccaggcgtgtgtcctgcaagtgctaggaccagccacccctccccatggcctccaagccggctgccgggaagagcagaggggagaagcggaagagggtggtgctgacactgaaggagaagattgacatctgcacgcgcctggagaagggcgagagccggaaggcactgatgcaggagtacaatgtgggcatgtccaccctctacgacatcagggcccacaaggcgcagctgctccggttcttcgccagctcggactccaacaaggcgctggagcagcggcgcacgctgcacacgcccaagctggagcacctggaccgcgtcctgtacgagtggttcctggggaagcgctccgagggcgtccccgtgtcaggccccatgctcatcgagaaggccaaggacttctacgagcagatgcagctcactgagccctgcgtgttctccggagggtggctttggcgctttaaggccagacacggcattaaaaagctagatgcatccagtgaaaagcagtcagccgaccaccaggccgcggagcagttctgtgcgtttttcaggagcttggctgctgagcacgggctgtccgccgagcaggtttacaacgctgatgagaccggccttttctggcggtgcctgccaaatcccactccggaaggcggggctgtgcctggccccaagcagggcaaggaccggctgaccgtgctgatgtgtgccaacgccacgggctcccacaggctcaagcccttggccatcgggaagtgcagcggtcccagggctttcaaaggcatccagcacctgcccgtcgcctataaggcccaggggaatgcctgggtggacaaggagattttttccgattggttccatcatatctttgtgccctcggtgagagagcacttcagaaccataggtttgccggaagacagcaaagccgttctcttgctggacagctcccgggctcacccgcaggaggccgagctggtgtccagtaacgttttcaccatcttcctgcctgccagcgtggcctcattggtgcagcccatggagcagggcattcggagagatttcatgaggaacttcattaaccctccggtccccctgcagggcccccatgcccgctacaacatgaacgatgccatattcagcgtggcctgtgcctggaacgcagtccctagccacgtcttcaggcgggcctggaggaagctgtggccgtcggttgcgtttgccgaaggctcctcctctgaggaggagttggaggcagagtgcttcccagtgaagccccacaacaagtcctttgcacacatcctggagcttgtgaaggaaggctcctcctgcccgggccagcttcgccagcgccaggccgccagctggggggtagcgggaagggaggcagaagggggacggccccctgctgccacgtcgccagcagaggttgtgtggagttcagaaaagactccaaaagctgaccaggacggcggaggagatcctggtgagggcgaggaggtggcctgggagcaggcggccgtggcctttgacgcagtcctgcgctttgcggagcggcagccatgcttcagtgcgcaggaagtggggcagctgcgggcgctgcgtgccgtgttccggagccagcagcaggtgaggaggcggcgtggtgccctcggggctgtggtcaaggttgaagccctccaggagggccctggtggctgtggggccacagctcagtctcccttgccctgctcatccacagcaggtgacaactgatggcttctctgccctgccctggccactggccctgtttctccccacaccctggagtggcatggtcctgtgccccgaccccacctgaggcaggagggcatgtgcagacactcaagagcccttccaggagtgggtcgcccacgggtgtggctcgggtgcccaggacggtctgtgcccgaggttcctgtcaatacaggttttattttatcacttgccgtgtcatccgaaagtgaggaaatgttttggaagggtccaccctagcctagaacaagccagagccgcaccctggctggaatgggggccaggctgagccgatctggtctcgtgttcgctggctgatcattgcagtatcagagggtggagatgtcagtctgtccacgtggagagaagttgccctccaggccgacaggaggccatgcccaccgcccctggacaggcttcgtctcagaaggctctatctgctgggctggcggccatccccgtgttgggtggaccccgagcacggttgcctgaggtccgatggcccgagagctgggactcagttcttggcctgctagcggctgaacaggccgcacatctcacttcagttgtggcctcattcagcagaatgactctggaaccatcctctgttacccgcagatcctgtcccatgggctctggccccaagatgttggggggccccacggagagttgacttggtagagttcctttctgggaagaaagtaggagtggctgaccaggccctgctcatcacccggatagaggacacggaccctgtgtggtattttggcattttggctcagagtccaatgtaccatgttgcccagaatttcatacttacggcctttacatgaatacgtcttgatcagacattcagagattagtcttaggtttccacgtaagtcactgaaaacagtaaaacaggctgcttagatttctagcagtatgtgtgctcttatccccagctgttagcacgttagtaatacttttggggaggagttgtctgtcctggtcagttttcacagaggcggttgtaagaggatgtggttattttctccatgtctgtagttgctttgcggcatctccatttcacgggcaacactcactgcctgcagctgagattccagaacgccctgtgtccacagtgattagcctcgtctttcagcgagcataaaataggtgcattgtccttttcttttcttgaggcagggtctcactctgttgaccaggctggagtgaagtggtgtgatcccagctcactgcagcctcgacctccctggcttgagtgatcctcccgccccagcctcctgagtagctgggactagaggcacgcaccaccgcgcctacctttttattttttttgtagagacagggtctcactgtgttgcccaggctggtcttgaactcttggcctcaagcgatcctccttcctcatccttctaaagtgctgggattacaggtgtgagccacagcactcggcctaaataggtttttcttgctatgttattttcagtgctttgcccttgaattcttttcctctcttaaattcatatcatttggccgagtcagcacgtagtttgcattccagcgtctgctgttgattccactgaaacctctgttctcatgaaggagaggatttggctcgctgtggtttctcgtactttcacatctctgtagatacaggggcaaaagtcattgctgacagagccctatctatgtcctggaagtgtgtgtttcttgctttgaatgcatgtgtgaagattataaaagccaaatagtttttaaagatctcggtgctgaacgacagtcccagttcccatttgtgtcccattgtctttgtggtgtcacccgcactgtttgcttcattgtctggggaacttctgcacatccatgtactttgtgccatttctgggctcacgtgtcactcctaatagagcctcttaaccaagactgctggattgcagctgcttgaggcaacacaggaggttagaacatgtcccgagggctctgaaacagtaggacatcctgggtgggtggagctggggagggcatgggcaggccagctggccgagctcctggctggctctcctgagtcctctggacatggcttgtccctgtgagactgtagctcttcaggacctgagctcttcccgttcttgacctgctcttgtgctgactgtgctgggctgatgggtaggcgcttgtccccagtgagtggctgtgtcctcagggtgcccctcttccagaccaactgcagcaaggcctggagcctgactctaggtgcagcccttgtggctggaatcccttgtgccacccaggggactcgggccctgctcctcctgcagcccctcctcacctgggctcgctgctggagtgaggtttttagggagcccagagcgtactcatctctgagctgctgggcccagctgcctggtgcatacctcttgcctcggtcctgtcccccagaacgctttatggagactgccgtgtcctccgagcactttgttttcacttcctgacccgtctcagaagctcaagtggttgaatgttttagcctcagaatctttttccccaagccctctcaggtggagccccgctgtaccagacaccacagcacagctctgtgaggctgtgtctcttcactctgtttctggggctgctgaggcccctgggaagccctggagcttgccagagcagagcgagaaagtctctggtcctgtttaaatgcctccgcgttttatctgtgagcaccaggctggagccactccctgtcttctcacagtgcccctgcaagttgcagcctcagttttccagtggctcgtggggtagcaggtgctgcgtcatatggtttgggacctctgtggctgcttccagcctgctaatagaacctctttccaccactgccttcatctttggggtggcacccctgagtgctcaggcctgagggcgctcctgtgtcctcactcgggacaggcagcctccactctgggagctcccatccctcgggatgcccaggagaggccatactttcagggtggcatggtgaattcaggggttaggatgggtaggtggtctttcagccccttctgcgttggggttggtttacagaacacctgtcctgcctgtgccagcctggccttctgcgagcaccccaggcacgctgtcctggaagttgtctgtctcctgcataggagggtctagagcagaccttgccctgggcctgtctgtgcgtgacttccatatgcttcattcgtgctcagccatggctgagcatgcgatggagagcacctggaccgcccctgacgtcgcaggccactgttcttatccagtgggccaagtgattgattgctagtggtggggttgattggaagaaaggaagtcgcagcccctgcccacggcttccccagctcgctggggttggaggactgtcatcagttgtccccagttaaagtccatttggaggaggttcagggtcccagtggctggatgtgcttgtggagggacacggtttgaggcaggggtttgcagaaggtgtagactgcatccattcttgggaggctgtggcacagggcagtgacaacttgggacaaatcaagacccgtccacactgcacctcagggacctcacctcacgccccacataaatgtgcttattggggggccgggtgtggtggcttctgcctgaaatcccagtactctggaaggccacggcaggaggatcactttagttcaggagtttgaaaccagcctgggcaacatagggagaccccatctctacagaaagtaaaagaaaatgagccaggtgtggtggcatgtgcctgtaaccccagctactcaggaggccgaggcgggaggatccccaagcccaggagtttgaggctgcagtgagttatggcctctgcactccagcctgggtgacagagtgagagacctaatctctaaaaacaaaaaataacaaaatgtgctttggggtcaggtgtggagatcagggtcggggaggtcatgaggtaggtaggggtcaggatgtggacagtcatgggctggtgggtgtggcagccgtgaggggtgggtggtggcctgggaggcagggcctgggcagggcttctgcacttctgctgcttacccagccccctctgggttcgaggactctccttgacaagggctgagctctcgggcactgcgttggactcagctgcctactgggaggctggggagaatggacctgtgagaccttgtttgtcctcttccctgcccagctcttgtagaccccaggcctggctgtccgcagggccaggagctgcagccatggcagccaccagcctcccacatgagccccagctcccagccccacacgcccactcctttgcccatgtggtgtcagctctggcctccgcttccacacatggaccctcagaccttgcacatctgttgtttcccttgcagggcagtgatgatgacatgaaatgaggtggggtcactcctgtttagggatgagactggggcccagggaggggcaggtgtgaagttgctgagggcagagggagacccagggctacctgctcctaatgaccagcctcacgttctccactgctcactccctgccgttcaccagctgcatgaccttgagcagtgcactcaactgtaaacagaggtgaaaacactcctttaccaactgttttaggggccactcttgtttgaggccttgaacctcctttcagttccgtggtggtcctgagcctctgaatctgggtatggcccctgctgggtcctggtctcttaggcagcacgatggcctccctgctcaaggccctgcacccaggggcagattgtgggaggcccactggccatggctgggccctatcgcagagagcctgtcagcacggccatttccacacccaggctggctgggaagcaagctacgaggtgctcaaaggccctctatgtctgcaggtagccccgtcccacacaggcgaggatcgttgggcctccttagtagccaaaggaactgaggtccagagcagggaatgtgttgcccagtgtcagcatggtctgctctggggtcaggcgtcttgccctggtcctaagccaccccaagccaaggcatgtccctgggcccatttcctctctcgaggtcttgggttccctatttctgatgtgtgtgaaaggaaggcctgtcttctggggtgaccatgaggctcagtgggaggagctgccaggcttgagctgggacttggcacctggccagccttttttctatttcattgtaccttgatgggctgtcagttctgaagagaaaaaatacactaggaatccattcttcctccaccattctccctggcagagggaagtgactacacccctatggtgtggacatactgacgctcctccatgaagcagcaaagttctgttgtttcaggagactgtgggccttgaggatgtggtagtgacctcaccagaggagttggcaattcctaagtgctgcctggaggcctctacagagacataatgttggagaacttctgccacatggcagtgctgggtaagacccctctgtccccaccagtgcccttgaggttatgggtgttggtaggtctgtggcctccatttccatgacgatggtgttaaggactgcatgtttgtgtccccccccaaagtttatatgttgaaaccctgacccccaggagggtggtattaggaggtggggcctttgggaggtgactaggcttaggtgagatcgtgagggtggggctcgccgatgagatcgagtccttataagaaaaggaaggaactagagcgaggtcactttgtgctgtgtgagcatacaagaaaactgccatcttcaagctgggtgcagtggctcacgcctgtaatcccagcactggaaggccaaggcattaggattgcatgagtccaggagttcgagaccagcctaggcatgataagaccttattgctaaaaaaaaaaaaaggaaataaaatagaaaattgccatctgcaaatgagaaagccttcagccgacaccagactgccagtgcctttgattttggactttcagtccccagatctgtgaaaaattaatttatgttgtttaagacacctagcctgtggtattttgttatcgcaatccaaactgactgagacaggcagtaaggagagaacagaggttccagcctgcttcaggtccaggcagttctgccattgcccctaactcctcagtgccagtcatgggccaggcccctgggggacttggaatgagtaaaacatgcacctattgttaaggttcacctggtccagaaggggaggcagacccacctgcccaccatgacccggacagaggcgataaatacggagcacctcatggccagggcctggaggattcccaccataccctacccagcgccaataacagagggaccctggagttgtgtacacaagatagcagttcagtgcttgcacacatactagttgagaagggaaatcagggctaatgaaacagctcaactgtctggcagagccaggctccttctgccatgatacagtttggatgtttgtccctttctaatcttatatggaaatttgatccccagtgttgaaggtggggcctggtgggagatgttcctgttatcgggatggatccttcatgaatagcctggtgccatctttgtggtaacaagtgagttctcacttgattagtttctgtgagaactgtttgttaaaaagagcctggtggcacctccctcccttcttcctccttctcttgctatgtgatgctgctgccctttgccttccgtcatgagtggaagctccctgaagcccccaccagaagcaaatgctggcaccatgctgcttgtacagcctgcagaactgtgagccaaataaacctcttttctttataaatta

SEQ ID NO: 1036 - protein, 568 aa, Homo sapiens
MASKPAAGKSRGEKRKRVVLTLKEKIDICTRLEKGESRKALMQEYNVGMSTLYDIRAHKAQLLRFFASSDSNKALEQRRTLHTPKLEHLDRVLYEWFLGKRSEGVPVSGPMLIEKAKDFYEQMQLTEPCVFSGGWLWRFKARHGIKKLDASSEKQSADHQAAEQFCAFFRSLAAEHGLSAEQVYNADETGLFWRCLPNPTPEGGAVPGPKQGKDRLTVLMCANATGSHRLKPLAIGKCSGPRAFKGIQHLPVAYKAQGNAWVDKEIFSDWFHHIFVPSVREHFRTIGLPEDSKAVLLLDSSRAHPQEAELVSSNVFTIFLPASVASLVQPMEQGIRRDFMRNFINPPVPLQGPHARYNMNDAIFSVACAWNAVPSHVFRRAWRKLWPSVAFAEGSSSEEELEAECFPVKPHNKSFAHILELVKEGSSCPGQLRQRQAASWGVAGREAEGGRPPAATSPAEVVWSSEKTPKADQDGGGDPGEGEEVAWEQAAVAFDAVLRFAERQPCFSAQEVGQLRALRAVFRSQQQVRRRRGALGAVVKVEALQEGPGGCGATAQSPLPCSSTAGDN

SEQ ID NO: 1037 - DNA, 1064 bp, Homo sapiens
tttgaggccatataaagtcacctgaggccctctccaccacagcccaccagtgaccatgaaggctgtgctgcttgccctgttgatggcaggcttggccctgcagccaggcactgccctgctgtgctactcctgcaaagcccaggtgagcaacgaggactgcctgcaggtggagaactgcacccagctgggggagcagtgctggaccgcgcgcatccgcgcagttggcctcctgaccgtcatcagcaaaggctgcagcttgaactgcgtggatgactcacaggactactacgtgggcaagaagaacatcacgtgctgtgacaccgacttgtgcaacgccagcggggcccatgccctgcagccggctgctgccatccttgcgctgctccctgcactcggcctgctgctctggggacccggccagctctaggctctggggggccccgctgcagcccacactgggtgtggtgccccaggcctctgtgccactcctcacacacccggcccagtgggagcctgtcctggttcctgaggcacatcctaacgcaagtctgaccatgtatgtctgcgcccctgtcccccaccctgaccctcccatggccctctccaggactcccacccggcagatcggctctattgacacagatccgcctgcagatggcccctccaaccctctctgctgctgtttccatggcccagcattctccacccttaaccctgtgctcaggcacctcttcccccaggaagccttccctgcccaccccatctatgacttgagccaggtctggtccgtggtgtcccccgcacccagcaggggacaggcactcaggagggcccggtaaaggctgagatgaagtggactgagtagaactggaggacaggagtcgacgtgagttcctgggagtctccagagatggggcctggaggcctggaggaaggggccaggcctcacattcgtggggctccctgaatggcagcctcagcacagcgtaggcccttaataaacacctgttggataagccaaaaaaaaaaaaaaaaaaaaaaaaaaaaaaaaaaaaaaaaaaaaa

SEQ ID NO: 1038 - protein, 123 aa, Homo sapiens
MKAVLLALLMAGLALQPGTALLCYSCKAQVSNEDCLQVENCTQLGEQCWTARIRAVGLLTVISKGCSLNCVDDSQDYYVGKKNITCCDTDLCNASGAHALQPAAAILALLPALGLLLWGPGQL

SEQ ID NO: 1039 - DNA, 1735 bp, Homo sapiens
gttatcagaggtgagcccgtgctcttcagcggagaagatcccctacctggccgccggccactttctgtgggccgtggggtcctcaaggagacggcccttgggctcaggggctgcgtttccacacgcgcctttcccagggctcccgcgcccgttcctgcctggccgccggccgctccaacagcagcacaaggcgggactcagaaccggcgttcagggccgccagcggccgcgaggccctgagatgaggctccaaagaccccgacaggccccggcgggtgggaggcgcgcgccccggggcgggcggggctccccctaccggccagacccggggagaggcgcgcggaggctgcgaaggttccagaagggcggggagggggcgccgcgcgctgaccctccctgggcaccgctggggacgatggcgctgctcgccttgctgctggtcgtggccctaccgcgggtgtggacagacgccaacctgactgcgagacaacgagatccagaggactcccagcgaacggacgagggtgacaatagagtgtggtgtcatgtttgtgagagagaaaacactttcgagtgccagaacccaaggaggtgcaaatggacagagccatactgcgttatagcggccgtgaaaatatttccacgttttttcatggttgcgaagcagtgctccgctggttgtgcagcgatggagagacccaagccagaggagaagcggtttctcctggaagagcccatgcccttcttttacctcaagtgttgtaaaattcgctactgcaatttagaggggccacctatcaactcatcagtgttcaaagaatatgctgggagcatgggtgagagctgtggtgggctgtggctggccatcctcctgctgctggcctccattgcagccggcctcagcctgtcttgagccacgggactgccacagactgagccttccggagcatggactcgctccagaccgttgtcacctgttgcattaaacttgttttctgttgattacctcttggtttgacttcccagggtcttgggatgggagagtggggatcaggtgcagttggctcttaaccctcaagggttctttaactcacattcagaggaagtccagatctcctgagtagtgattttggtgacaagtttttctctttgaaatcaaaccttgtaactcatttattgctgatggccactcttttccttgactcccctctgcctctgagggcttcagtattgatggggagggaggcctaagtaccactcatggagagtatgtgctgagatgcttccgacctttcaggtgacgcaggaacactgggggagtctgaatgattggggtgaagacatccctggagtgaaggactcctcagcatggggggcagtggggcacacgttagggctgcccccattccagtggtggaggcgctgtggatggctgcttttcctcaacctttcctaccagattccaggaggcagaagataactaattgtgttgaagaaacttagacttcacccaccagctggcacaggtgcacagattcataaattcccacacgtgtgtgttcaacatctgaaacttaggccaagtagagagcatcagggtaaatggcgttcatttctctgttaagatgcagccatccatggggagctgagaaatcagactcaaagttccaccaaaaacaaatacaaggggacttcaaaagttcacgaaaaaattgaattaaaagataaaaattaa

SEQ ID NO: 1040 - protein, 223 aa, Homo sapiens
MRLQRPRQAPAGGRRAPRGGRGSPYRPDPGRGARRLRRFQKGGEGAPRADPPWAPLGTMALLALLLVVALPRVWTDANLTARQRDPEDSQRTDEGDNRVWCHVCERENTFECQNPRRCKWTEPYCVIAAVKIFPRFFMVAKQCSAGCAAMERPKPEEKRFLLEEPMPFFYLKCCKIRYCNLEGPPINSSVFKEYAGSMGESCGGLWLAILLLLASIAAGLSLS

SEQ ID NO: 1041 - DNA, 2264 bp, Homo sapiens
ctcggccgccctcgcgctgtggttcgctccgggcgcgctgcgctcgtgagttcccaggaggcctggcgggcaccgtaaccagcgccgcggacaccggcaccggcgccacggactccgcaggaccccgcgcccgccgccgccgctatgctggggctgctggtggcgttgctggccctggggctcgctgtctttgcgctgctggacgtctggtacctggtgcgccttccgtgcgccgtgctgcgcgcgcgcctgctgcagccgcgcgtccgtgacctgctagctgagcagcgcttcccgggccgcgtgctgccctcggacttggacctgctgctgcacatgaacaacgcgcgctacctgcgcgaggccgactttgcgcgcgtcgcgcacctgacccgctgcggggtgctcggggcgctgagggagttgcgggcgcacacggtgctggcggcctcgtgcgcgcgccaccgccgctcgctgcgcctgctggagcccttcgaggtgcgcacccgcctgctgggctgggacgaccgcgcgttctacctggaggcgcgctttgtcagcctgcgggacggcttcgtgtgcgcgctgctgcgcttccggcagcacctgctgggcacctcacccgagcgcgtcgtgcagcacctgtgccagcgcagggtggagccccctgagctgcccgctgatctgcagcactggatctcctacaacgaggccagcagccagctgctccgcatggagagtgggctcagtgatgtcaccaaggaccagtgaccgccaccttcacaccgtctgccctggccaccatcctgggcctgggggctgcccacagatgggcagtctcagccatactctgttccagctggagtagcctcctgaccagcctggcccaccctgctccacccactgggcccccccagttattgatacccctctgtgctgggctccacgctaggcagaaggaggagtggcattggcatcctgacccagctctgccctcaaggtggggatggatgggcaaaggagagtcctgcctggccctacgatgaggccactcatgtgggcctaggtaggggaggatggtgcctggagcagagggacccacaagtgcctcccgagcctagatcctggctcggaccactgcaagggccgaggcagggccagaccagagcatcctgggtacaggcctgggctctccagggcctgggcctgattcaggtgcagtgggcactcctgaagggtcagagcggcatctgccaggcagcccctctggcttccgctgaggtggttgcaggcctggggcagagcctgggtggtcagaggccggggctagaggcagatggaagggaggcatttgctgacagaggacggggcacccgggctccccactgcagtcggccttgcctcctcctcctcctctacctccagtcaggctggacgggagggtagccttgtggctgagaggggtcagactaggtggcacaggggctcctggaaagacagcaggcttcctgctgggcgttcccttgttggagggaatagagtgggggtgggactctgcaggggtgtccttgtccactcgcacccctcgccgcccaccagggccatgctctgtgacttgggctgatccccaccctttctgggcctacagcaccacaggccgctgtacccccttagagctgcccctctctggcctggccggcaggcgtcttcttaactcctctgtcctctatattcagcatgttccttgtcagctgctgggccggccctgccttgcgctagcagagcctctcctggcagcttctcaggtctccctaatggagacaccaggctactaggacactggctggggccaccccctcctgcctaatgcctcaccttacagctggggaaactgaggcctggaatggcccagagtcaccaaggcaaagttggggctggtcccagcctgaggctccagctgatgccctcagctcccagagagggggtgccccatctagctgggtgcaggggtcactgcttgtcagctcagggccctgtgcccgcttgcctgttcccctacatctgtgcctgcacatccagaactgcctccttgccgctgcctccaggaagcccaccttgagccagagtcaagggctgcagcactgcccgatagaacacgcccgccctcactgctgttcttgccttacagccaccatgggaaagctgcaacctttctgttttatttaaagaaagcccaacattaaagggttttcattgcaagcgtg

SEQ ID NO: 1042 - protein, 208 aa, Homo sapiens
MLGLLVALLALGLAVFALLDVWYLVRLPCAVLRARLLQPRVRDLLAEQRFPGRVLPSDLDLLLHMNNARYLREADFARVAHLTRCGVLGALRELRAHTVLAASCARHRRSLRLLEPFEVRTRLLGWDDRAFYLEARFVSLRDGFVCALLRFRQHLLGTSPERVVQHLCQRRVEPPELPADLQHWISYNEASSQLLRMESGLSDVTKDQ

SEQ ID NO: 1043 - DNA, 537 bp, Homo sapiens
ctctcatcacttctgagcacggagcaatggcctctcgctgggctgtgcagctgctgctcgtggcagcctggagcatgggctgtggtgaggccctcaagtgctacacctgcaaggagcccatgaccagtgcttcctgcaggaccattacccgctgcaagccagaggacacagcctgcatgaccacgctggtgacggtggaggcagagtaccccttcaaccagagccccgtggtgacccgctcctgctccagctcctgtgtggccaccgaccccgacagcatcggggccgcccacctgatcttctgctgcttccgagacctctgcaactcggaactctgaacccagggcggcagggcggaaggtgctcctcaggcacctcctctctgacggggcctggctccacctgtgatcacctccccctgcttcctgctgctgtggcacagctcactcatggggtctgaggggagagaagcacaccaggggcgccctctgccttccataccccacgcttataaaacataactaagccaagagtgga

SEQ ID NO: 1044 - protein, 103 aa, Homo sapiens
MASRWAVQLLLVAAWSMGCGEALKCYTCKEPMTSASCRTITRCKPEDTACMTTLVTVEAEYPFNQSPVVTRSCSSSCVATDPDSIGAAHLIFCCFRDLCNSEL

SEQ ID NO: 1045 - DNA, 550 bp, Homo sapiens
ccagtctgtcgccacctcacttggtgtctgctgtccccgccaggcaagcctggggtgagagcacagaggagtgggccgggaccatgcgggggacgcggctggcgctcctggcgctggtgctggctgcctgcggagagctggcgccggccctgcgctgctacgtctgtccggagcccacaggagtgtcggactgtgtcaccatcgccacctgcaccaccaacgaaaccatgtgcaagaccacactctactcccgggagatagtgtaccccttccagggggactccacggtgaccaagtcctgtgccagcaagtgtaagccctcggatgtggatggcatcggccagaccctgcccgtgtcctgctgcaatactgagctgtgcaatgtagacggggcgcccgctctgaacagcctccactgcggggccctcacgctcctcccactcttgagcctccgactgtagagtccccgcccacccccatggccctatgcggcccagccccgaatgccttgaagaagtgccccctgcaccaggaaaaaaaaaaaaaaaaa

SEQ ID NO: 1046 - protein, 125 aa, Homo sapiens
MRGTRLALLALVLAACGELAPALRCYVCPEPTGVSDCVTIATCTTNETMCKTTLYSREIVYPFQGDSTVTKSCASKCKPSDVDGIGQTLPVSCCNTELCNVDGAPALNSLHCGALTLLPLLSLRL

SEQ ID NO: 1047 - DNA, 1352 bp, Homo sapiens
ttagggtagaagaaaaggttttatttttctttctcacattggaaaaaatgaaaactttcggacccatgaaattttattacattttgccaaaaacagaaccaataacataagtattcaaagttatgtaaagataattatttaatatgaacattatgatggtgagagggaccacggagcaaggggctgccttgcaggcctgccttccagctttgctacagggaccagaagcgggagctgagcgcaggggaggcaggcggaggccatgggcagcgaggcgggtgcgccaaagggcgccagttccggagctgctgggcctgggctgcaggagggcggagctggggccgcaaggctggtgccggccgacaaacgacgcggcgcgggcgagtgggcggaggcggctgcggggaaggctgggctgccgcgggacgcggtgaagatagcctgcggagtgtccgggctgaacacggttgcagcactcccagtagaccaggagctccgggaggcagggccggccccacgtcctctgcgcaccaccctgagttggatcctctgtgcgccacctgagttggatccagggctagctgctgttgacctccccactcccacgctgccctcctgcctgcagccatgacgcccctgctcaccctgatcctggtggtcctcatgggcttacctctggcccaggccttggactgccacgtgtgtgcctacaacggagacaactgcttcaaccccatgcgctgcccggctatggttgcctactgcatgaccacgcgcacctctgcagccgaagccatatggtgtcaccagtgcacgggcttcggagggtgctcccatggatccagatgcctgagggactccacccactgtgtcaccactgccacccgggtcctcagcaacaccgaggatttgcctctggtcaccaagatgtgccacataggctgccccgatatccccagcctgggcctgggcccctacgtatccatcgcttgctgccagaccagcctctgcaaccatgactgacggctgccctcctccaggcccccggacgctcagcccccacagcccccacagcctggcgccagggctcacagctgcccctccctcgagactggccagcccacctctcccggcctctgcagccaccgtccagcaccgcttgtcctagggaagtcctgcgtggagtcttgcctcaatctgctgccgtccaagcctggggcccatcgtgcctgccgccccttcaggtcccgacctccccacaataaaatgtgattggatcgtgtggtacaaaaaaaaaaaaaaaaaaaaaaaaaaaaaaaaaaaaaaaaaaaaaaaaaaaaaaaaaaaaaaaa

SEQ ID NO: 1048 - protein, 131 aa, Homo sapiens
MTPLLTLILVVLMGLPLAQALDCHVCAYNGDNCFNPMRCPAMVAYCMTTRTSAAEAIWCHQCTGFGGCSHGSRCLRDSTHCVTTATRVLSNTEDLPLVTKMCHIGCPDIPSLGLGPYVSIACCQTSLCNHD

SEQ ID NO: 1049 - DNA, 4967 bp, Homo sapiens
tttagggtagaagaaaaggttttatttttctttctcacattggaaaaaatgaaaactttcggacccatgaaattttattacattttgccaaaaacagaaccaataacataagtattcaaagttatgtaaagataattatttaatatgaacattatgatggtgagagggaccacggagcaaggggctgccttgcaggcctgccttccagctttgctacagggaccagaagcgggagctgagcgcaggggaggcaggcggaggccatgggcagcgaggcgggtgcgccaaagggcgccagttccggagctgctgggcctgggctgcaggagggcggagctggggccgcaaggctggtgccggccgacaaacgacgcggcgcgggcgagtgggcggaggcggctgcggggaaggctgggctgccgcgggacgcggtgaagatagcctgcggagtgtccgggctgaacacggttgcagcactcccagtagaccaggagctccgggaggcagggccggccccacgtcctctgcgcaccaccctgagttggatcctctgtgcgccacctgagttggatccagggctagctgctgttgacctccccactcccacgctgccctcctgcctgcagccatgacgcccctgctcaccctgatcctggtggtcctcatgggcttacctctggcccaggccttggactgccacgtgtgtgcctacaacggagacaactgcttcaaccccatgcgctgcccggctatggttgcctactgcatgaccacgcgcacctactacacccccaccaggatgaaggtcagtaagtcctgcgtgccccgctgcttcgagactgtgtatgatggctactccaagcacgcgtccaccacctcctgctgccagtacgacctctgcaacggcaccggccttgccaccccggccaccctggccctggcccccatcctcctggccaccctctggggtctcctctaaagcccccgaggcagacccactcaagaacaaagctctcgagacacactgctacaccctcgcacccagctcaccctgcctcaccctccacactccctgcgacctcctcagccatgcccagggtcaggactgtgggcaagaagacacccgacctcccccaaccaccacacgacctcacttcgaggccttgacctttcgatgctgtgtgggatcccaaaagtgtccggctttgatgggctgatcagcccctcgcctgtccagggctatttatggggaggggcccagtcaggcagggagcactgagcagatgggagctgtggccaagcccaccttctgggaagccctaggagaggcccctgcctcagtctgcccctggtgtgctggggcagggggaagacaaggaatgcccgcaggtggggtggtggggagactcttaggaggaaaggctcctccaggcctagtcacgcttcctactgaggccaggagctgccaggaccggtacgggatcagggctgtgggaggagggcctttggcaccggcccctgtgctaggaagtctgccaggcccgagttggagccaccccctgcaggggagggggcggctctgcctcagcaggccccagggcccccgaagtcacagaagctttttcgggtccagcaaggggtgtgtgtcctctcagtcaaaccccttgacgtttcccaccccctcacggggagggcaccaggcctgaagctggcaggagctagggccatgctatatttggtgggtcctggacgctgacccggccagcgctattctgggcagggagggaaaggggcagagcaggtggtcccccgagtcctggtccccaaccacagcaggacccagccgagcaaggcaaaagacgcaggactgggggatgcgcgcacaggctgggggttgggagcagcctggggccggcgcgggcctgggcgtgggaaggcggagcatgccaccctctcgtggccgtgcgggggcgggagtggggagggtggggtggggagggcggagacccagcccctcccccgcagcgggatgcgcacagtgagtgggtccctccatcaccttccacctggggatgcacccactgggagggcagggtggaagccccagctgggtgtgtggactcccagggaccccaccccaggcctgggaagcaggggtcagcccaacacgcaccaatccatccccgatgcaggtagcccagggagcacctgcccctgctgtgaatggggcattcgggggcgtgagaccttttggtgccagcggtcacgctgcacctgaggcccccacctgaccagtgctcccagctctggtgtcctgagaaacccttcaagccatcccgcatgggcaggatggtgacatatccatgtggtaggattgtcccggccccaaagtatggccctggtcaggggagcccctgctggaaattgcatctccagagctttgatgcaggacccctgggggatcagggaatgagggtctccaccccaggggtctccttgcagtgagtctatatgcaggcctgcgttctgctcctggggctggttctgagtgcccagcttcagtctcctgagaacatgaggatgggagggggcagagtcttgctgagggcacacccagttcccgctggaggaggacagtgccagtcttctgcaaagggaccttgggtgggaacgggcccggagcgggaggaacgtgactccccagagggaagatgggcatcatactgggcccagagctgggaaggagttgctgccagcacagggtgggcctggactcccctcgcccctacccccagtggttgtggctgtagccctaagcctggagagcaggaccggcccggggtgtctgggaggctgccaggtgcctcccagagctcccaagggcccccacctgcaagtgccagcctcagggcagtgcccaaatgaggccctctcagctgcagccagcgatgccttgggatgcttaccgggagggaggcggctttgggctcctaagtccttgggagaggctgggagcagtcactgcgcggcttgcgcaagcccattgtcgggttgggtggcttcctcagccagggctgggagggactccaggatcaggtcctccctgtctcgagtctcagtggggtgatggggaggagacctggccacccatggctcaggggcagctgagaacaaggacctgctggagctggaagtgctgtggtgttgaggggtggggtgggcagcttctcacacctgcctcctgcctccttctgtccacctttccaccaccctgacctgtcccagccccacacatggttctgcctggctggcctgcccttggcacctggcgtagagcacacagaaggcactcagctaatgctgggcaggcccactcatggggagtgcgtggctgtgcagcaccagggaaccggcacagcagcgccggcagaaatcacagcagtaaacttgtccgggttgtatgcatcaaggtggcgatggacgtgggtccccccactgcactgtggccctgagcactgtatagcagcccggcaatgggagccattatcttgcccctttgacagaggaggacacagaggcacagggaggtgaagtagctgccccacactagtgcctcctcgctcactcaccaccccctgcaccacagtgcagccgcttctcccaccagctggggttccttggacccccaagcctgggaagggggaggtgagtttacaaaatggaaagcttaaaaggagaaaagtggaaccagaggtttgagaagccctgagtggtagagtaaggcctccagcgctgcctctgggtgcagggcagagtggcagaggagagggggagaggcactgggcaccatgggggcccagttcccacttcggggatctctctcgcagaaccgagggtccccttcatgggggtagatgcccagggctagctgttgccactgtctgtgtggacctgagtcctggacatgcccgagtgactcaggagtggctgcttgggcgggctctgtcaccctaggatgttatacattctgggaactggacaggagtggctgcttgggcgggctctggcaccctgggatgttatacattctgggaactggacaggagtggctgcttgggtgggctctggcaccctgggatgttatacattctgggaactgcaatcagccactagagaagtcggagctacaggaagtgaccctggggtgggacctggggacatggccaggtcagcatggggacacccggctccagcaggagctctggtctgtcctggggtctttgggggcagggctgcggccctgggcaggcttcctccaggcggaggtcctggggaagtgggggagccaggccagctgccgcctcccccactatgtagcatctgattcgtcatctctcatgaaggcgatttggttcataactctgaaactctgaaaaaggtcaaaagaagcagagaggccctcggtggatatgccagcttttctgccggtgctttctcccactactctgggtggtctgctctcctcttcaaacctcagctcgcagggagggcctgaatctgccagcccctcaggatctccttccctctgggccctccccagccttaaggagcctcccagacagaagggtggacagagccacctgggcagcccgagagacacacgggggtcctccctgtggacagccctgccagcttccgcccagccctgagcttcatttgcatcttgaggagtaaggggtggtgaaatgggaatgctggtctggctcagctggtcgtgggcataagtgcccgctgaatggatggcatctctccctcctgtcttatgttctggggtccaggtgcttcccagggccatgcccctgctgctaatgcttgccctaacccttaccctaaccagcgtccagcgtcgtctcaccgagccgtaaataaatcaacagattcgcattgtcaaaaaaaaaaaaaaaaaa

SEQ ID NO: 1050 - protein, 116 aa, Homo sapiens
MTPLLTLILVVLMGLPLAQALDCHVCAYNGDNCFNPMRCPAMVAYCMTTRTYYTPTRMKVSKSCVPRCFETVYDGYSKHASTTSCCQYDLCNGTGLATPATLALAPILLATLWGLL

SEQ ID NO: 1051 - DNA, 589 bp, Homo sapiens
agcccgacctcaccaggagaacatgcagctcggcactgggctcctgctggccgccgtcctgagcctgcagctggctgcagccgaagccatatggtgtcaccagtgcacgggcttcggagggtgctcccatggatccagatgcctgagggactccacccactgtgtcaccactgccacccgggtcctcagcaacaccgaggatttgcctctggtcaccaagatgtgccacataggctgccccgatatccccagcctgggcctgggcccctacgtatccatcgcttgctgccagaccagcctctgcaaccatgactgacggctgccctcctccaggcccccggacgctcagcccccacagcccccacagcctggcgccagggctcacagctgcccctccctcgagactggccagcccacctctcccggcctctgcagccaccgtccagcaccgcttgtcctagggaagtcctgcgtggagtcttgcctcaatctgctgccgtccaagcctggggcccatcgtgcctgccgccccttcaggtcccgacctccccacaataaaatgtgattggatcgtgtggtacaaaaaaaa

SEQ ID NO: 1052 - protein, 97 aa, Homo sapiens
MQLGTGLLLAAVLSLQLAAAEAIWCHQCTGFGGCSHGSRCLRDSTHCVTTATRVLSNTEDLPLVTKMCHIGCPDIPSLGLGPYVSIACCQTSLCNHD

SEQ ID NO: 1053 - DNA, 4609 bp, Homo sapiens
agggggttgggaagctcgaagccgcaggcctgactctggcctttggcatcctggggttggcctgggcaaatgtgtcgtgagagacggatttgttgttctcgggaaggcggttgcagcactcccagtagaccaggagctccgggaggcagggccggccccacgtcctctgcgcaccaccctgagttggatcctctgtgcgccacctgagttggatccagggctagctgctgttgacctccccactcccacgctgccctcctgcctgcagccatgacgcccctgctcaccctgatcctggtggtcctcatgggcttacctctggcccaggccttggactgccacgtgtgtgcctacaacggagacaactgcttcaaccccatgcgctgcccggctatggttgcctactgcatgaccacgcgcacctactacacccccaccaggatgaaggtcagtaagtcctgcgtgccccgctgcttcgagactgtgtatgatggctactccaagcacgcgtccaccacctcctgctgccagtacgacctctgcaacggcaccggccttgccaccccggccaccctggccctggcccccatcctcctggccaccctctggggtctcctctaaagcccccgaggcagacccactcaagaacaaagctctcgagacacactgctacaccctcgcacccagctcaccctgcctcaccctccacactccctgcgacctcctcagccatgcccagggtcaggactgtgggcaagaagacacccgacctcccccaaccaccacacgacctcacttcgaggccttgacctttcgatgctgtgtgggatcccaaaagtgtccggctttgatgggctgatcagcccctcgcctgtccagggctatttatggggaggggcccagtcaggcagggagcactgagcagatgggagctgtggccaagcccaccttctgggaagccctaggagaggcccctgcctcagtctgcccctggtgtgctggggcagggggaagacaaggaatgcccgcaggtggggtggtggggagactcttaggaggaaaggctcctccaggcctagtcacgcttcctactgaggccaggagctgccaggaccggtacgggatcagggctgtgggaggagggcctttggcaccggcccctgtgctaggaagtctgccaggcccgagttggagccaccccctgcaggggagggggcggctctgcctcagcaggccccagggcccccgaagtcacagaagctttttcgggtccagcaaggggtgtgtgtcctctcagtcaaaccccttgacgtttcccaccccctcacggggagggcaccaggcctgaagctggcaggagctagggccatgctatatttggtgggtcctggacgctgacccggccagcgctattctgggcagggagggaaaggggcagagcaggtggtcccccgagtcctggtccccaaccacagcaggacccagccgagcaaggcaaaagacgcaggactgggggatgcgcgcacaggctgggggttgggagcagcctggggccggcgcgggcctgggcgtgggaaggcggagcatgccaccctctcgtggccgtgcgggggcgggagtggggagggtggggtggggagggcggagacccagcccctcccccgcagcgggatgcgcacagtgagtgggtccctccatcaccttccacctggggatgcacccactgggagggcagggtggaagccccagctgggtgtgtggactcccagggaccccaccccaggcctgggaagcaggggtcagcccaacacgcaccaatccatccccgatgcaggtagcccagggagcacctgcccctgctgtgaatggggcattcgggggcgtgagaccttttggtgccagcggtcacgctgcacctgaggcccccacctgaccagtgctcccagctctggtgtcctgagaaacccttcaagccatcccgcatgggcaggatggtgacatatccatgtggtaggattgtcccggccccaaagtatggccctggtcaggggagcccctgctggaaattgcatctccagagctttgatgcaggacccctgggggatcagggaatgagggtctccaccccaggggtctccttgcagtgagtctatatgcaggcctgcgttctgctcctggggctggttctgagtgcccagcttcagtctcctgagaacatgaggatgggagggggcagagtcttgctgagggcacacccagttcccgctggaggaggacagtgccagtcttctgcaaagggaccttgggtgggaacgggcccggagcgggaggaacgtgactccccagagggaagatgggcatcatactgggcccagagctgggaaggagttgctgccagcacagggtgggcctggactcccctcgcccctacccccagtggttgtggctgtagccctaagcctggagagcaggaccggcccggggtgtctgggaggctgccaggtgcctcccagagctcccaagggcccccacctgcaagtgccagcctcagggcagtgcccaaatgaggccctctcagctgcagccagcgatgccttgggatgcttaccgggagggaggcggctttgggctcctaagtccttgggagaggctgggagcagtcactgcgcggcttgcgcaagcccattgtcgggttgggtggcttcctcagccagggctgggagggactccaggatcaggtcctccctgtctcgagtctcagtggggtgatggggaggagacctggccacccatggctcaggggcagctgagaacaaggacctgctggagctggaagtgctgtggtgttgaggggtggggtgggcagcttctcacacctgcctcctgcctccttctgtccacctttccaccaccctgacctgtcccagccccacacatggttctgcctggctggcctgcccttggcacctggcgtagagcacacagaaggcactcagctaatgctgggcaggcccactcatggggagtgcgtggctgtgcagcaccagggaaccggcacagcagcgccggcagaaatcacagcagtaaacttgtccgggttgtatgcatcaaggtggcgatggacgtgggtccccccactgcactgtggccctgagcactgtatagcagcccggcaatgggagccattatcttgcccctttgacagaggaggacacagaggcacagggaggtgaagtagctgccccacactagtgcctcctcgctcactcaccaccccctgcaccacagtgcagccgcttctcccaccagctggggttccttggacccccaagcctgggaagggggaggtgagtttacaaaatggaaagcttaaaaggagaaaagtggaaccagaggtttgagaagccctgagtggtagagtaaggcctccagcgctgcctctgggtgcagggcagagtggcagaggagagggggagaggcactgggcaccatgggggcccagttcccacttcggggatctctctcgcagaaccgagggtccccttcatgggggtagatgcccagggctagctgttgccactgtctgtgtggacctgagtcctggacatgcccgagtgactcaggagtggctgcttgggcgggctctgtcaccctaggatgttatacattctgggaactggacaggagtggctgcttgggcgggctctggcaccctgggatgttatacattctgggaactggacaggagtggctgcttgggtgggctctggcaccctgggatgttatacattctgggaactgcaatcagccactagagaagtcggagctacaggaagtgaccctggggtgggacctggggacatggccaggtcagcatggggacacccggctccagcaggagctctggtctgtcctggggtctttgggggcagggctgcggccctgggcaggcttcctccaggcggaggtcctggggaagtgggggagccaggccagctgccgcctcccccactatgtagcatctgattcgtcatctctcatgaaggcgatttggttcataactctgaaactctgaaaaaggtcaaaagaagcagagaggccctcggtggatatgccagcttttctgccggtgctttctcccactactctgggtggtctgctctcctcttcaaacctcagctcgcagggagggcctgaatctgccagcccctcaggatctccttccctctgggccctccccagccttaaggagcctcccagacagaagggtggacagagccacctgggcagcccgagagacacacgggggtcctccctgtggacagccctgccagcttccgcccagccctgagcttcatttgcatcttgaggagtaaggggtggtgaaatgggaatgctggtctggctcagctggtcgtgggcataagtgcccgctgaatggatggcatctctccctcctgtcttatgttctggggtccaggtgcttcccagggccatgcccctgctgctaatgcttgccctaacccttaccctaaccagcgtccagcgtcgtctcaccgagccgtaaataaatcaacagattcgcattgtcaaaaaaaaaaaaaaaaaa

SEQ ID NO: 1054 - protein, 116 aa, Homo sapiens; identical to SEQ ID NO: 1050

SEQ ID NO: 1055 - DNA, 4724 bp, Homo sapiens
ggggccggggcaggcctggggcggggcctgcggtgagctcgcgctgggcgggctgttccgggggcgggactgggctgggcctgcggtgagcatcaggcgatgcggcacgggtgctgcgggacacacagacacgcctacgattagactcaggcaggcacctaccggcgagcggccgcgggtgactcccaggcgcggcggtacctcacggtggtgaaggtcacagggttgcagcactcccagtagaccaggagctccgggaggcagggccggccccacgtcctctgcgcaccaccctgagttggatcctctgtgcgccacctgagttggatccagggctagctgctgttgacctccccactcccacgctgccctcctgcctgcagccatgacgcccctgctcaccctgatcctggtggtcctcatgggcttacctctggcccaggccttggactgccacgtgtgtgcctacaacggagacaactgcttcaaccccatgcgctgcccggctatggttgcctactgcatgaccacgcgcacctactacacccccaccaggatgaaggtcagtaagtcctgcgtgccccgctgcttcgagactgtgtatgatggctactccaagcacgcgtccaccacctcctgctgccagtacgacctctgcaacggcaccggccttgccaccccggccaccctggccctggcccccatcctcctggccaccctctggggtctcctctaaagcccccgaggcagacccactcaagaacaaagctctcgagacacactgctacaccctcgcacccagctcaccctgcctcaccctccacactccctgcgacctcctcagccatgcccagggtcaggactgtgggcaagaagacacccgacctcccccaaccaccacacgacctcacttcgaggccttgacctttcgatgctgtgtgggatcccaaaagtgtccggctttgatgggctgatcagcccctcgcctgtccagggctatttatggggaggggcccagtcaggcagggagcactgagcagatgggagctgtggccaagcccaccttctgggaagccctaggagaggcccctgcctcagtctgcccctggtgtgctggggcagggggaagacaaggaatgcccgcaggtggggtggtggggagactcttaggaggaaaggctcctccaggcctagtcacgcttcctactgaggccaggagctgccaggaccggtacgggatcagggctgtgggaggagggcctttggcaccggcccctgtgctaggaagtctgccaggcccgagttggagccaccccctgcaggggagggggcggctctgcctcagcaggccccagggcccccgaagtcacagaagctttttcgggtccagcaaggggtgtgtgtcctctcagtcaaaccccttgacgtttcccaccccctcacggggagggcaccaggcctgaagctggcaggagctagggccatgctatatttggtgggtcctggacgctgacccggccagcgctattctgggcagggagggaaaggggcagagcaggtggtcccccgagtcctggtccccaaccacagcaggacccagccgagcaaggcaaaagacgcaggactgggggatgcgcgcacaggctgggggttgggagcagcctggggccggcgcgggcctgggcgtgggaaggcggagcatgccaccctctcgtggccgtgcgggggcgggagtggggagggtggggtggggagggcggagacccagcccctcccccgcagcgggatgcgcacagtgagtgggtccctccatcaccttccacctggggatgcacccactgggagggcagggtggaagccccagctgggtgtgtggactcccagggaccccaccccaggcctgggaagcaggggtcagcccaacacgcaccaatccatccccgatgcaggtagcccagggagcacctgcccctgctgtgaatggggcattcgggggcgtgagaccttttggtgccagcggtcacgctgcacctgaggcccccacctgaccagtgctcccagctctggtgtcctgagaaacccttcaagccatcccgcatgggcaggatggtgacatatccatgtggtaggattgtcccggccccaaagtatggccctggtcaggggagcccctgctggaaattgcatctccagagctttgatgcaggacccctgggggatcagggaatgagggtctccaccccaggggtctccttgcagtgagtctatatgcaggcctgcgttctgctcctggggctggttctgagtgcccagcttcagtctcctgagaacatgaggatgggagggggcagagtcttgctgagggcacacccagttcccgctggaggaggacagtgccagtcttctgcaaagggaccttgggtgggaacgggcccggagcgggaggaacgtgactccccagagggaagatgggcatcatactgggcccagagctgggaaggagttgctgccagcacagggtgggcctggactcccctcgcccctacccccagtggttgtggctgtagccctaagcctggagagcaggaccggcccggggtgtctgggaggctgccaggtgcctcccagagctcccaagggcccccacctgcaagtgccagcctcagggcagtgcccaaatgaggccctctcagctgcagccagcgatgccttgggatgcttaccgggagggaggcggctttgggctcctaagtccttgggagaggctgggagcagtcactgcgcggcttgcgcaagcccattgtcgggttgggtggcttcctcagccagggctgggagggactccaggatcaggtcctccctgtctcgagtctcagtggggtgatggggaggagacctggccacccatggctcaggggcagctgagaacaaggacctgctggagctggaagtgctgtggtgttgaggggtggggtgggcagcttctcacacctgcctcctgcctccttctgtccacctttccaccaccctgacctgtcccagccccacacatggttctgcctggctggcctgcccttggcacctggcgtagagcacacagaaggcactcagctaatgctgggcaggcccactcatggggagtgcgtggctgtgcagcaccagggaaccggcacagcagcgccggcagaaatcacagcagtaaacttgtccgggttgtatgcatcaaggtggcgatggacgtgggtccccccactgcactgtggccctgagcactgtatagcagcccggcaatgggagccattatcttgcccctttgacagaggaggacacagaggcacagggaggtgaagtagctgccccacactagtgcctcctcgctcactcaccaccccctgcaccacagtgcagccgcttctcccaccagctggggttccttggacccccaagcctgggaagggggaggtgagtttacaaaatggaaagcttaaaaggagaaaagtggaaccagaggtttgagaagccctgagtggtagagtaaggcctccagcgctgcctctgggtgcagggcagagtggcagaggagagggggagaggcactgggcaccatgggggcccagttcccacttcggggatctctctcgcagaaccgagggtccccttcatgggggtagatgcccagggctagctgttgccactgtctgtgtggacctgagtcctggacatgcccgagtgactcaggagtggctgcttgggcgggctctgtcaccctaggatgttatacattctgggaactggacaggagtggctgcttgggcgggctctggcaccctgggatgttatacattctgggaactggacaggagtggctgcttgggtgggctctggcaccctgggatgttatacattctgggaactgcaatcagccactagagaagtcggagctacaggaagtgaccctggggtgggacctggggacatggccaggtcagcatggggacacccggctccagcaggagctctggtctgtcctggggtctttgggggcagggctgcggccctgggcaggcttcctccaggcggaggtcctggggaagtgggggagccaggccagctgccgcctcccccactatgtagcatctgattcgtcatctctcatgaaggcgatttggttcataactctgaaactctgaaaaaggtcaaaagaagcagagaggccctcggtggatatgccagcttttctgccggtgctttctcccactactctgggtggtctgctctcctcttcaaacctcagctcgcagggagggcctgaatctgccagcccctcaggatctccttccctctgggccctccccagccttaaggagcctcccagacagaagggtggacagagccacctgggcagcccgagagacacacgggggtcctccctgtggacagccctgccagcttccgcccagccctgagcttcatttgcatcttgaggagtaaggggtggtgaaatgggaatgctggtctggctcagctggtcgtgggcataagtgcccgctgaatggatggcatctctccctcctgtcttatgttctggggtccaggtgcttcccagggccatgcccctgctgctaatgcttgccctaacccttaccctaaccagcgtccagcgtcgtctcaccgagccgtaaataaatcaacagattcgcattgtcaaaaaaaaaaaaaaaaaa

SEQ ID NO: 1056 - protein, 116 aa, Homo sapiens; identical to SEQ ID NO: 1050

SEQ ID NO: 1057 - DNA, 806 bp, Homo sapiens
gcccacccccgcccagcccgtgcctataaggccttggcaatgcaggggcccgcactgctcccagacgacatcagagatgaggacagcattgctgctccttgcagccctggctgtggctacagggccagcccttaccctgcgctgccacgtgtgcaccagctccagcaactgcaagcattctgtggtctgcccggccagctctcgcttctgcaagaccacgaacacagtggagcctctgagggggaatctggtgaagaaggactgtgcggagtcgtgcacacccagctacaccctgcaaggccaggtcagcagcggcaccagctccacccagtgctgccaggaggacctgtgcaatgagaagctgcacaacgctgcacccacccgcaccgccctcgcccacagtgccctcagcctggggctggccctgagcctcctggccgtcatcttagcccccagcctgtgaccttccccccagggaaggcccctcatgcctttccttccctttctctggggattccacacctctcttccccagccgcaacgggggtgccaggagccccaggctgagggcttccccgaaagtctgggaccaggtccaggtgggcatggaatgctgatgacttggagcaggccccacagaccccacagaggatgaagccaccccacagaggatgcagcccccagctgcatggaaggtggaggacagaagccctgtggatccccggatttcacactccttctgttttgttgccgtttatttttgtactcaaatctctacatggagataaatgatttaaaccagaaaa

SEQ ID NO: 1058 - protein, 128 aa, Homo sapiens
MRTALLLLAALAVATGPALTLRCHVCTSSSNCKHSVVCPASSRFCKTTNTVEPLRGNLVKKDCAESCTPSYTLQGQVSSGTSSTQCCQEDLCNEKLHNAAPTRTALAHSALSLGLALSLLAVILAPSL

SEQ ID NO: 1059 - DNA, 722 bp, Homo sapiens
gtcggcgcgggaggctcaaatggctggaggcggcgggcacgcacactgcgggctccgaggggcacaggtccaggctcctgcgtgaagtgatgctcctctttgccttactcctagccatggagctcccattggtggcagccagtgccaccatgcgcgctcagtggacttacagtttgagatgccatgactgtgcggtcataaatgacttcaactgtcccaacattagagtatgtccgtatcatattaggcgctgtatgacaatctccattcgcataaattctcgtgaactacttgtttataagaactgtacaaacaactgcacatttgtatatgcagctgaacagcctcctgaagccccaggaaaaatcttcaaaactaatagcttctactgggtttgttgttgtaatagcatggtttgcaatgcaggaggacctactaatcttgaaagggacatgttacccgatgaagtaactgaggaggagcttccagaaggaactgtgaggctgggggtatcaaaactgttgctgagttttgcctctatcatagtcagcaatatattgccatgaggaccccaccttggagggtctgaccatcttcacctgttccgcagagaaatgttgctctccattattcccttctaagccagagacccttatccactgctcctctaggtggcccatttatggtttgttgtaagagaaaaattaaaaaaatattgttta

SEQ ID NO: 1060 - protein, 158 aa, Homo sapiens
MLLFALLLAMELPLVAASATMRAQWTYSLRCHDCAVINDFNCPNIRVCPYHIRRCMTISIRINSRELLVYKNCTNNCTFVYAAEQPPEAPGKIFKTNSFYWVCCCNSMVCNAGGPTNLERDMLPDEVTEEELPEGTVRLGVSKLLLSFASIIVSNILP

SEQ ID NO: 1061 - DNA, 309 bp, Homo sapiens
atggagaagcaacgggtgctggactgggccacctggcagcgtcacatcaactggcagctagaagtcctggagaatgacaacttccaggacgacccccatgccctgctggaggagcagaacttgagtgtggccaagggccccaactacctgatagcctgtgcagagtccctgtcgcagccacagcgttccttctgtgctgtctgcagcttcccctccccctacacctgtgtcagctgtggtgcctggtattgcaccgtgtgctgtctggggacccaccaggagaccagatatctgaagtggaccatgtga

SEQ ID NO: 1062 - protein, 102 aa, Homo sapiens
MEKQRVLDWATWQRHINWQLEVLENDNFQDDPHALLEEQNLSVAKGPNYLIACAESLSQPQRSFCAVCSFPSPYTCVSCGAWYCTVCCLGTHQETRYLKWTM

SEQ ID NO: 1063 - DNA, 3551 bp, Homo sapiens
cattggaatggcactcagggcaaaggcagaggtgtgcatggcagtgccctggctgtccctgcaaagggcacaggcactgggcacgagagccgcccgggtccccaggacagtgctgccctttgaagccatgccccggcgtccaggcaacaggtggctgaggctgctgcagatctggagggagcagggttatgaggacctgcacctggaagtacaccagaccttccaggaactagggcccattttcaggtacgacttgggaggagcaggcatggtgtgtgtgatgctgccggaggacgtggagaagctgcaacaggtggacagcctgcatccccacaggatgagcctggagccctgggtggcctacagacaacatcgtgggcacaaatgtggcgtgttcttgctgaatgggcctgaatggcgcttcaaccgattgcggctgaatccagaagtgctgtcgcccaacgctgtgcagaggttcctcccgatggtggatgcagtggccagggacttctcccaggccctgaagaagaaggtgctgcagaacgcccgggggagcctgaccctggacgtccagcccagcatcttccactacaccatagaagccagcaacttggctctttttggagagcggctgggcctggttggccacagccccagttctgccagcctgaacttcctccatgccctggaggtcatgttcaaatccaccgtccagctcatgttcatgcccaggagcctgtctcgctggaccagccccaaggtgtggaaggagcactttgaggcctgggactgcatcttccagtacggcgacaactgtatccagaaaatctatcaggaactggccttcagccgccctcaacagtacaccagcatcgtggcggagctcctgttgaatgcggaactgtcgccagatgccatcaaggccaactctatggaactcactgcagggagcgtggacacgacggtgtttcccttgctgatgacgctctttgagctggctcggaaccccaacgtgcagcaggccctgcgccaggagagcctggccgccgcagccagcatcagtgaacatccccagaaggcaaccaccgagctgcccttgctgcgtgcggccctcaaggagaccttgcggctctaccctgtgggtctgtttctggagcgagtggcgagctcagacttggtgcttcagaactaccacatcccagctgggacattggtgcgcgtgttcctctactctctgggtcgcaaccccgccttgttcccgaggcctgagcgctataacccccagcgctggctagacatcaggggctccggcaggaacttctaccacgtgccctttggctttggcatgcgccagtgccttgggcggcgcctggcagaggcagagatgctgctgctgctgcaccatgtgctgaaacacctccaggtggagacactaacccaagaggacataaagatggtctacagcttcatattgaggcccagcatgttccccctcctcaccttcagagccatcaactaatcacgtctctgcacccagggtcccagcctggccaccagcctccctttctgcctgaccccaggccacccctcttctctcccacatgcacagcttcctgagtcacccctctgtctaaccagccccagcacaaatggaactcccgagggcctctaggaccagggtttgccaggctaagcagcaatgccagggcacagctggggaagatcttgctgaccttgtccccagccccacctggccctttctccagcaagcactgtcctctgggcagtttgcccccatccctcccagtgctggctccaggctcctcgtgtggccatacaagggtgctgtggttttgtcccttgccttcctgcctagtctcacatgtccctgttcctcttcccctggccagggcccctgcgcagactgtcagagtcattaagcgggatcccagcatctcagagtccagtcaagttccctcctgcagcctgacccctaggcagctcgagcatgccctgagctctctgaaagttgtcaccctggaatagggtcctgcagggtagaataaaaaggcccctgtggtcacttgtcctgacatccccattttcaagtgatacaactgagtctcgagggacgtgtgttccccagctgatcgtgtcagcctcatgccccaggcctcatctttcatggaccaggccttgttccaggagtgggtgttgggtcctctgcttcctgtgctgtcccctggggaaggtcccgaggatgctgtcaggagatggaagagtcatgtggggtgggaacctggggtgtggttccagaaatgtttttggcaacaggagagacaggattgggccaacaaggactcagacgagttttattgactcatttctctggttgatacggagccatgtcatgtgccacgacctggggtgggcacagggaggctgcagtttcctgcgtgaacctgccttgggcctcatctgctcctagcccagcagagagagttgacccctcctgaactggccactccccagtgctcccgtgcagggagaggaagcacccagtttgagagtgtacccagccagactgtctttatctccatggattttcatcagggcaaagatcacagcagccagctcctggtggctgatgaggatcagagcatttgttcccccatgaaaggggaaatccctatggcatcattccagtggtggtcagtagatccaggacgccctgcaggactcagcctgtacagggagatgaagtgccccaggttgggagcacacctagctagagttatttgtgttaatctattcaggatgctctaagaaaacgccatagactgggttgctgacaaacatcagaattctatttctcatggttctgaaggcttagaaggctaagatcaaggtgtcagcaggttctgtgtctggtgaggacccacctcttgtttcatagataaaaccttcttgctgtgtcctcacatggtggaaaagggcaagacagctcacagagacctcttttataaggacgccagttccattcaagagggcactgcctgcattcccttcccccctcaaaggcccggccctgctattatcgtcaccttggtgactagatttcagcctatgaattctggaggcggacacaaaaattcagattaaactactctgcttctgtttctctaaaatctacatccttctcatatacaaaatacatgcatttctccccagtagccccaaatatcaactcattttagcatcaactttaaaattgtagtccaaagtgtgatttaaatgttatctgagtcaaacatgggtaagactcaaggtacaatttatcctgagtccaactgttcttgctgcgaacctatgaaatcaaacatgttatgtgcttccaaaatacagtggttggagaggcataggataaacattcccattccagaaaggagaaacaggaaagaagaaaggagtaacaagtttcaagcaactccaaaattgaatgtgacaaacagtattaaaccttaagcctcaagaaaaaaaaaaaaaaaaaa

SEQ ID NO: 1064 - protein, 503 aa, Homo sapiens
MALRAKAEVCMAVPWLSLQRAQALGTRAARVPRTVLPFEAMPRRPGNRWLRLLQIWREQGYEDLHLEVHQTFQELGPIFRYDLGGAGMVCVMLPEDVEKLQQVDSLHPHRMSLEPWVAYRQHRGHKCGVFLLNGPEWRFNRLRLNPEVLSPNAVQRFLPMVDAVARDFSQALKKKVLQNARGSLTLDVQPSIFHYTIEASNLALFGERLGLVGHSPSSASLNFLHALEVMFKSTVQLMFMPRSLSRWTSPKVWKEHFEAWDCIFQYGDNCIQKIYQELAFSRPQQYTSIVAELLLNAELSPDAIKANSMELTAGSVDTTVFPLLMTLFELARNPNVQQALRQESLAAAASISEHPQKATTELPLLRAALKETLRLYPVGLFLERVASSDLVLQNYHIPAGTLVRVFLYSLGRNPALFPRPERYNPQRWLDIRGSGRNFYHVPFGFGMRQCLGRRLAEAEMLLLLHHVLKHLQVETLTQEDIKMVYSFILRPSMFPLLTFRAIN

SEQ ID NO: 1065 - DNA, 3353 bp, Homo sapiens
cattggaatggcactcagggcaaaggcagaggtgtgcatggcagtgccctggctgtccctgcaaagggcacaggcactgggcacgagagccgcccgggtccccaggacagtgctgccctttgaagccatgccccggcgtccaggcaacaggtggctgaggctgctgcagatctggagggagcagggttatgaggacctgcacctggaagtacaccagaccttccaggaactagggcccattttcaggtacgacttgggaggagcaggcatggtgtgtgtgatgctgccggaggacgtggagaagctgcaacaggtggacagcctgcatccccacaggatgagcctggagccctgggtggcctacagacaacatcgtgggcacaaatgtggcgtgttcttgctgaatgggcctgaatggcgcttcaaccgattgcggctgaatccagaagtgctgtcgcccaacgctgtgcagaggttcctcccgatggtggatgcagtggccagggacttctcccaggccctgaagaagaaggtgctgcagaacgcccgggggagcctgaccctggacgtccagcccagcatcttccactacaccatagaagccagcaacttggctctttttggagagcggctgggcctggttggccacagccccagttctgccagcctgaacttcctccatgccctggaggtcatgttcaaatccaccgtccagctcatgttcatgcccaggagcctgtctcgctggaccagccccaaggtgtggaaggagcactttgaggcctgggactgcatcttccagtacggcgacaactgtatccagaaaatctatcaggaactggccttcagccgccctcaacagtacaccagcatcgtggcggagctcctgttgaatgcggaactgtcgccagatgccatcaaggccaactctatggaactcactgcagggagcgtggacacgacggtgtttcccttgctgatgacgctctttgagctggctcggaaccccaacgtgcagcaggccctgcgccaggagagcctggccgccgcagccagcatcagtgaacatccccagaaggcaaccaccgagctgcccttgctgcgtgcggccctcaaggagaccttgcggctctaccctgtgggtctgtttctggagcgagtggcgagctcagacttggtgcttcagaactaccacatcccagctggggtgctgaaacacctccaggtggagacactaacccaagaggacataaagatggtctacagcttcatattgaggcccagcatgttccccctcctcaccttcagagccatcaactaatcacgtctctgcacccagggtcccagcctggccaccagcctccctttctgcctgaccccaggccacccctcttctctcccacatgcacagcttcctgagtcacccctctgtctaaccagccccagcacaaatggaactcccgagggcctctaggaccagggtttgccaggctaagcagcaatgccagggcacagctggggaagatcttgctgaccttgtccccagccccacctggccctttctccagcaagcactgtcctctgggcagtttgcccccatccctcccagtgctggctccaggctcctcgtgtggccatacaagggtgctgtggttttgtcccttgccttcctgcctagtctcacatgtccctgttcctcttcccctggccagggcccctgcgcagactgtcagagtcattaagcgggatcccagcatctcagagtccagtcaagttccctcctgcagcctgacccctaggcagctcgagcatgccctgagctctctgaaagttgtcaccctggaatagggtcctgcagggtagaataaaaaggcccctgtggtcacttgtcctgacatccccattttcaagtgatacaactgagtctcgagggacgtgtgttccccagctgatcgtgtcagcctcatgccccaggcctcatctttcatggaccaggccttgttccaggagtgggtgttgggtcctctgcttcctgtgctgtcccctggggaaggtcccgaggatgctgtcaggagatggaagagtcatgtggggtgggaacctggggtgtggttccagaaatgtttttggcaacaggagagacaggattgggccaacaaggactcagacgagttttattgactcatttctctggttgatacggagccatgtcatgtgccacgacctggggtgggcacagggaggctgcagtttcctgcgtgaacctgccttgggcctcatctgctcctagcccagcagagagagttgacccctcctgaactggccactccccagtgctcccgtgcagggagaggaagcacccagtttgagagtgtacccagccagactgtctttatctccatggattttcatcagggcaaagatcacagcagccagctcctggtggctgatgaggatcagagcatttgttcccccatgaaaggggaaatccctatggcatcattccagtggtggtcagtagatccaggacgccctgcaggactcagcctgtacagggagatgaagtgccccaggttgggagcacacctagctagagttatttgtgttaatctattcaggatgctctaagaaaacgccatagactgggttgctgacaaacatcagaattctatttctcatggttctgaaggcttagaaggctaagatcaaggtgtcagcaggttctgtgtctggtgaggacccacctcttgtttcatagataaaaccttcttgctgtgtcctcacatggtggaaaagggcaagacagctcacagagacctcttttataaggacgccagttccattcaagagggcactgcctgcattcccttcccccctcaaaggcccggccctgctattatcgtcaccttggtgactagatttcagcctatgaattctggaggcggacacaaaaattcagattaaactactctgcttctgtttctctaaaatctacatccttctcatatacaaaatacatgcatttctccccagtagccccaaatatcaactcattttagcatcaactttaaaattgtagtccaaagtgtgatttaaatgttatctgagtcaaacatgggtaagactcaaggtacaatttatcctgagtccaactgttcttgctgcgaacctatgaaatcaaacatgttatgtgcttccaaaatacagtggttggagaggcataggataaacattcccattccagaaaggagaaacaggaaagaagaaaggagtaacaagtttcaagcaactccaaaattgaatgtgacaaacagtattaaaccttaagcctcaagaaaaaaaaaaaaaaaaaa

SEQ ID NO: 1066 - protein, 437 aa, Homo sapiens
MALRAKAEVCMAVPWLSLQRAQALGTRAARVPRTVLPFEAMPRRPGNRWLRLLQIWREQGYEDLHLEVHQTFQELGPIFRYDLGGAGMVCVMLPEDVEKLQQVDSLHPHRMSLEPWVAYRQHRGHKCGVFLLNGPEWRFNRLRLNPEVLSPNAVQRFLPMVDAVARDFSQALKKKVLQNARGSLTLDVQPSIFHYTIEASNLALFGERLGLVGHSPSSASLNFLHALEVMFKSTVQLMFMPRSLSRWTSPKVWKEHFEAWDCIFQYGDNCIQKIYQELAFSRPQQYTSIVAELLLNAELSPDAIKANSMELTAGSVDTTVFPLLMTLFELARNPNVQQALRQESLAAAASISEHPQKATTELPLLRAALKETLRLYPVGLFLERVASSDLVLQNYHIPAGVLKHLQVETLTQEDIKMVYSFILRPSMFPLLTFRAIN

SEQ ID NO: 1067 - DNA, 2936 bp, Homo sapiens
ggaatggcactcagggcaaaggcagaggtgtgcgtggcagcgccctggctgtccctgcaaagggcacgggcactgggcactagagccgctcgggcccctaggacggtgctgccgtttgaagccatgccccagcatccaggcaacaggtggctgaggctgctgcagatctggagggagcagggttatgagcacctgcacctggagatgcaccagaccttccaggagctggggcccattttcaggtacaacttgggaggaccacgcatggtgtgtgtgatgctgccggaggatgtggagaagctgcaacaggtggacagcctgcatccctgcaggatgatcctggagccctgggtggcctacagacaacatcgtgggcacaaatgtggcgtgttcttgttgaatgggcctgaatggcgcttcaaccgattgcggctgaacccagatgtgctgtcgcccaaggccgtgcagaggttcctcccgatggtggatgcagtggccagggacttctcccaggccctgaagaagaaggtgctgcagaacgcccgggggagcctgaccctggacgtccagcccagcatcttccactacaccatagaagccagcaacttagctctttttggagagcggctgggcctggttggccacagccccagttctgccagcctgaacttcctccatgccctggaggtcatgttcaaatccaccgtccagctcatgttcatgcccaggagcctgtctcgctggatcagccccaaggtgtggaaggagcactttgaggcctgggactgcatcttccagtacggtgacaactgtatccagaaaatctaccaggaactggccttcaaccgccctcaacactacacaggcatcgtggcggagctcctgttgaaggcggaactgtcactagaagccatcaaggccaactctatggaactcactgcagggagcgtggacacgacagcgtttcccttgctgatgacgctctttgagctggctcggaaccccgacgtgcagcagatcctgcgccaggagagcctggccgccgcagccagcatcagtgaacatccccagaaggcaaccaccgagctgcccttgctgcgggcggccctcaaggagaccttgcggctctaccctgtgggtctgtttttggagcgagtggtgagctcagacttggtgcttcagaactaccacatcccagctgggacattggtacaggttttcctctactcgctgggtcgcaatgccgccttgttcccgaggcctgagcggtataatccccagcgctggctagacatcaggggctccggcaggaacttccaccacgtgccctttggctttggcatgcgccagtgcctcgggcggcgcctggcagaggcagagatgctgctgctgctgcaccacgtgctgaagcacttcctggtggagacactaactcaagaggacataaagatggtctacagcttcatattgaggcctggcacgtcccccctcctcactttcagagcgattaactagtcttgcatctgcacccagggtcccagcctggccaccagcttccctctgcctgaccccaggccacctgtcttctctcccacgtgcacagcttcctgagtcacccctctgtccagccagctcctgcacaaatggaactccccagggcctccaggactggggcttgccaggcttgtcaaatagcaaggccagggcacagctggagacgatcttgctggcagggcctggccttgtccccagctccacctggccccttctccagcaagcagtgccctctggacagcttgactctactcccagcgctggctccaggctcctcatgaggccatgcaagggtgctgtgattttgtcccttgccttcctgcctagtctcacatgtccctgtccctctcgccctggccagggcctctgtgcagacagtgtcagagtcattaagcgggatcccagcatctcagagtccagtcaagttccctcctgcagcctgaccccaggcagctcgagcatgccctgagctctctgaaagttgtcaccctggaatacgatcctgcagggtagactaaaaaggcccctgtggtcacttatcctgacacattttcaagtgatacaactgagtctcgaggggcgtgtgttccccagctgatcatgtcagcctcatgccccaggcctcgtctttcatggaccaggtcttgttcaagcagcgagtgttgggtcctctgcttcctgagctgtcccctggagaaggtcccgaggatgctgtcaggagatggaagagtcatgtggggtgggaacctggggtgtggttccagaaatgtttttggcaacaggagagacaggattgggccaacaaggactcagatgagttttattgactcattcctctggttgatacggagccatgtcatgtgccacgacctggggtgggcacagggaggctgcagttccctacgtgaacctgccttgggcctcatctgctcctagcccagcagagagagttgacccctcctgaactggccactccccagtgctcctgtgcagggataggaagtgccccagggtgagaacgtgcccagccacatcatctttatctcctgggattttcattagggcaaagatctcagcagccagctcctggtagctgatgaggatcagagcgtttgttcccccatgaaaggggaaatacttaggtaatcattccaggtgtgttcagtagttccaggactcagggactcaggccagtcaccctgtgaccgcaggttgctttcccaccctgggcaatgcagtgcagcatgggaaaggaataagggggcaacaaggtgcacagacctcagagatggcttccttgtttatggggctctcacagatacccatccaactcctctagtcagcactagatcatgggatcctaaaataaaccttggaaaaat

SEQ ID NO: 1068 - protein, 503 aa, Homo sapiens
MALRAKAEVCVAAPWLSLQRARALGTRAARAPRTVLPFEAMPQHPGNRWLRLLQIWREQGYEHLHLEMHQTFQELGPIFRYNLGGPRMVCVMLPEDVEKLQQVDSLHPCRMILEPWVAYRQHRGHKCGVFLLNGPEWRFNRLRLNPDVLSPKAVQRFLPMVDAVARDFSQALKKKVLQNARGSLTLDVQPSIFHYTIEASNLALFGERLGLVGHSPSSASLNFLHALEVMFKSTVQLMFMPRSLSRWISPKVWKEHFEAWDCIFQYGDNCIQKIYQELAFNRPQHYTGIVAELLLKAELSLEAIKANSMELTAGSVDTTAFPLLMTLFELARNPDVQQILRQESLAAAASISEHPQKATTELPLLRAALKETLRLYPVGLFLERVVSSDLVLQNYHIPAGTLVQVFLYSLGRNAALFPRPERYNPQRWLDIRGSGRNFHHVPFGFGMRQCLGRRLAEAEMLLLLHHVLKHFLVETLTQEDIKMVYSFILRPGTSPLLTFRAIN

SEQ ID NO: 1069 - DNA, 1145 bp, Homo sapiens
gctccggccagccgcggtccagagcgcgcgaggttcggggagctccgccaggctgctggtacctgcgtccgcccggcgagcaggacaggctgctttggtttgtgacctccaggcaggacggccatcctctccagaatgaagatcttcttgccagtgctgctggctgcccttctgggtgtggagcgagccagctcgctgatgtgcttctcctgcttgaaccagaagagcaatctgtactgcctgaagccgaccatctgctccgaccaggacaactactgcgtgactgtgtctgctagtgccggcattgggaatctcgtgacatttggccacagcctgagcaagacctgttccccggcctgccccatcccagaaggcgtcaatgttggtgtggcttccatgggcatcagctgctgccagagctttctgtgcaatttcagtgcggccgatggcgggctgcgggcaagcgtcaccctgctgggtgccgggctgctgctgagcctgctgccggccctgctgcggtttggcccctgaccgcccagaccctgtcccccgatcccccagctcaggaaggaaagcccagccctttctggatcccacagtgtatgggagcccctgactcctcacgtgcctgatctgtgcccttggtcccaggtcaggcccaccccctgcacctccacctgccccagcccctgcctctgcccaagtgggccagctgccctcacttctggggtggatgatgtgaccttccttgggggactgcggaagggacgagggttccctggagtcttacggtccaacatcagaccaagtcccatggacatgctgacagggtccccagggagaccgtgtcagtagggatgtgtgcctggctgtgtacgtgggtgtgcagtgcacgtgagagcacgtggcggcttctgggggccatgtttggggagggaggtgtgccagcagcctggagagcctcagtccctgtagccccctgccctggcacagctgcatgcacttcaagggcagcctttgggggttggggtttctgccacttccgggtctaggccctgcccaaatccagccagtcctgccccagcccacccccacattggagccctcctgctgctttggtgcctcaaataaatacagatgtcccc

SEQ ID NO: 1070 - protein, 131 aa, Homo sapiens
MKIFLPVLLAALLGVERASSLMCFSCLNQKSNLYCLKPTICSDQDNYCVTVSASAGIGNLVTFGHSLSKTCSPACPIPEGVNVGVASMGISCCQSFLCNFSAADGGLRASVTLLGAGLLLSLLPALLRFGP

SEQ ID NO: 1071 - DNA, 1875 bp, Homo sapiens
tgcgtggtatcaagaggtgcattgaggcgctcctgcagcctcctcccggcacgggactcctcacaacccccagcctcagcttccctgacagggcaggggctcactcttctccactccgggccaggaacgcagcctgcttgccttttgtccaattgggtgctctttctttgcgactgatacaaagtgggaacaaactccgcttccggtgatgcccgggccccaggaggctgggggagaagtgcacgctgcccagccttcaacctgaactgcccccagcacttccgagccccgacccctgcagctgtgagggaagccccgacctctgccctggccacatccttcccctgatctcatggctgaaaagccacaccagaattcctgcaattcagtgaggcagctcttcaaaaccaagcagctggtgacgcacagggacagagggagctgtacgcacagggcccaggggctgctggctgccaggaccaccgcattgcagaggtctcccttgcagcaagagatctgggagtccacaacggcacttaacctgccctctgccctggcaccccagggactcactgccaaagacgctcactttctgggagacacagaccccatccaggaaggggcacgagaccacgctgcaggaggccccttccaagaccgccaagcatctgtagcagcgcagaccctgagctgggagagagggcaaggattctctcggcaccacgggaaccaccttctctactctcactgaacacccctgggatgtatctgtaaaaattggaacacctttcggctagaaaccagaggaagccgctcatgacacccgggagctcacagaggctctgaagtttctattcaagaaaacaactccagatggggctgatctggaagacaagtaacatcttccttttcttggtgctcgcctgccgtgctctaggtgcttttagagatgctggtctgtgtgctagggaagcgatgaaccatactgttagtctattaaacataactcaacctggctggctttccatgactaccaaacgctgggaatatgccagacctgtgcccgtggaagactctggcctcccagcacacctccaggaacaaactccctggcctgcaggatagggatagcagccccaaccgtcaatacaaagggattttactgagtgggctcatgggttctttaagttccccctcttaacgatcaacggtaattcaaacgtcccaaaaggagaaatgctttcttagcatatcttttacctggagtatttccccttctgcctttacagcaatcatgccagttctaccacttttgcaagaaagctccaagagagtcagtgtagctgaaactttgtcactgggtcacctatctagtccatatgtctgcaggaattatactgataaatggacaactcaccatgcaatcaatctcccgctctatcctgttccctgaccggcatggtttctacttcctgtcagcacaactaggacgtctggtttctgctgggctgccctctcatgggaagcctttaatcactctagctcaatatatcctctggggaccatcaacatttcctattaaagataactacacctggccgagcgcggtggctaacgcctgtaatcccagaactttgggaagccaaggcgggtggatcacaaagtcgggagatcaagaccatcctggctaacacagtgaaacccctcctctactaaaaatacaaaaaattagccaggcgtggtggtgggtgcctgtaatcccagctacttgggaggctgaggcaagagaatggcgaacctaggaggcagagtttgcagtgagctgagatggtgccactgcactccagcctgggggacagagctacactccatccc

SEQ ID NO: 1072 - protein, 132 aa, Homo sapiens
MAEKPHQNSCNSVRQLFKTKQLVTHRDRGSCTHRAQGLLAARTTALQRSPLQQEIWESTTALNLPSALAPQGLTAKDAHFLGDTDPIQEGARDHAAGGPFQDRQASVAAQTLSWERGQGFSRHHGNHLLYSH

SEQ ID NO: 1073 - DNA, 267 bp, Homo sapiens
atggctgtctcctcaaacagggaccccggggacgacggctgtctcctcaaacagggaccccggggacgacggctgtctcctcaaacagggaccccggggacgatggctgtctcctcaaacaggaatcccgaggacgacggctgtctcctcaaacaggagccctggggacaacggctgtctcctcgaacaggaaccccgaggatgatggctgtcttctcaaacaggagccccggggatgacggctgtctcctcaaacagggaccatga

SEQ ID NO: 1074 - protein, 88 aa, Homo sapiens
MAVSSNRDPGDDGCLLKQGPRGRRLSPQTGTPGTMAVSSNRNPEDDGCLLKQEPWGQRLSPRTGTPRMMAVFSNRSPGDDGCLLKQGP

SEQ ID NO: 1075 - DNA, 3820 bp, Homo sapiens
ctttgcgcgagtgtcttggttgagcgcagcgcccattcattgcccgcgagcgtccatccatctgtccggccgactgtccagcgaaaggggctccaggccgggcgcagccgccacccgggggaccgaggccaggagaggggccaagagcgcggctgacccttgcgggccggggcaggggacggtggccgcggccatgcagtcctgtgccagggcgtgggggctgcgcctgggccgcggggtcgggggcggccgccgcctggctgggggatcggggccgtgctgggcgccgcggagccgggacagcagcagtggcggcggggacagcgccgcggctggggcctcgcgcctcctggagcgccttctgcccagacacgacgacttcgctcggaggcacatcggccctggggacaaagaccagagagagatgctgcagaccttggggctggcgagcattgatgaattgatcgagaagacggtccctgccaacatccgtttgaaaagacccttgaaaatggaagaccctgtttgtgaaaatgaaatccttgcaactctgcatgccatttcaagcaaaaaccagatctggagatcgtatattggcatgggctattataactgctcagtgccacagacgattttgcggaacttactggagaactcaggatggatcacccagtatactccataccagcctgaggtgtctcaggggaggctggagagtttactcaactaccagaccatggtgtgtgacatcacaggcctggacatggccaatgcatccctgctggatgaggggactgcagccgcagaggcactgcagctgtgctacagacacaacaagaggaggaaatttctcgttgatccccgttgccacccacagacaatagctgttgtccagactcgagccaaatatactggagtcctcactgagctgaagttaccctgtgaaatggacttcagtggaaaagatgtcagtggagtgttgttccagtacccagacacggaggggaaggtggaagactttacggaactcgtggagagagctcatcagagtgggagcctggcctgctgtgctactgaccttttagctttgtgcatcttgaggccacctggagaatttggggtagacatcgccctgggcagctcccagagatttggagtgccactgggctatgggggaccccatgcagcattttttgctgtccgagaaagcttggtgagaatgatgcctggaagaatggtgggggtaacaagagatgccactgggaaagaagtgtatcgtcttgctcttcaaaccagggagcaacacattcggagagacaaggctaccagcaacatctgtacagctcaggccctcttggcgaatatggctgccatgtttgcaatctaccatggttcccatgggctggagcatattgctaggagggtacataatgccactttgattttgtcagaaggtctcaagcgagcagggcatcaactccagcatgacctgttctttgataccttgaagattcagtgtggctgctcagtgaaggaggtcttgggcagggccgctcagcggcagatcaattttcggctttttgaggatggcacacttggtatttctcttgatgaaacagtcaatgaaaaagatctggacgatttgttgtggatctttggttgtgagtcatctgcagaactggttgctgaaagcatgggagaggagtgcagaggtattccagggtctgtgttcaagaggaccagcccgttcctcacccatcaagtgttcaacagctaccactctgaaacaaacattgtccggtacatgaagaaactggaaaataaagacatttcccttgttcacagcatgattccactgggatcctgcaccatgaaactgaacagttcgtctgaactcgcacctatcacatggaaagaatttgcaaacatccacccctttgtgcctctggatcaagctcaaggatatcagcagcttttccgagagcttgagaaggatttgtgtgaactcacaggttatgaccaggtctgtttccagccaaacagcggagcccagggagaatatgctggactggccactatccgagcctacttaaaccagaaaggagaggggcacagaacggtttgcctcattccgaaatcagcacatgggaccaacccagcaagtgcccacatggcaggcatgaagattcagcctgtggaggtggataaatatgggaatatcgatgcagttcacctcaaggccatggtggataagcacaaggagaacctagcagctatcatgattacatacccatccaccaatggggtgtttgaagagaacatcagtgacgtgtgtgacctcatccatcaacatggaggacaggtctacctagacggggcaaatatgaatgctcaggtgggaatctgtcgccctggagacttcgggtctgatgtctcgcacctaaatcttcacaagaccttctgcattccccacggaggaggtggtcctggcatggggcccatcggagtgaagaaacatctcgccccgtttttgcccaatcatcccgtcatttcactaaagcggaatgaggatgcctgtcctgtgggaaccgtcagtgcggccccatggggctccagttccatcttgcccatttcctgggcttatatcaagatgatgggaggcaagggtcttaaacaagccacggaaactgcgatattaaatgccaactacatggccaagcgattagaaacacactacagaattcttttcaggggtgcaagaggttatgtgggtcatgaatttattttggacacgagacccttcaaaaagtctgcaaatattgaggctgtggatgtggccaagagactccaggattatggatttcacgcccctaccatgtcctggcctgtggcagggaccctcatggtggagcccactgagtcggaggacaaggcagagctggacagattctgtgatgccatgatcagcattcggcaggaaattgctgacattgaggagggccgcatcgaccccagggtcaatccgctgaagatgtctccacactccctgacctgcgttacatcttcccactgggaccggccttattccagagaggtggcagcattcccactccccttcgtgaaaccagagaacaaattctggccaacgattgcccggattgatgacatatatggagatcagcacctggtttgtacctgcccacccatggaagtttatgagtctccattttctgaacaaaagagggcgtcttcttagtcctctgtccctaagtttaaaggactgatttgatgcctctccccagagcatttgataagcaagaaagatttcatctcccaccccagcctcaagtaggagttttatatactgtgtatatctctgtaatctctgtcaaggtaaatgtaaatacagtagctggagggagtcgaagctgatggttggaagacggatttgctttggtattctgcttccacatgtgccagttgcctggattgggagccattttgtgttttgcgtagaaagttttaggaactttaacttttaatgtggcaagtttgcagatgtcatagaggctatcctggagacttaatagacatttttttgttccaaaagagtccatgtggactgtgccatctgtgggaaatcccagggcaaatgtttacattttgtataccctgaagaactctttttcctctaatatgcctaatctgtaatcacatttctgagtgttctcctctttttctgtgtgaggtttttttttttttaatctgcatttattagtattctaataaaagcatcttgatcggaagaaaaaaaaaaaaa

SEQ ID NO: 1076 - protein, 1020 aa, Homo sapiens
MQSCARAWGLRLGRGVGGGRRLAGGSGPCWAPRSRDSSSGGGDSAAAGASRLLERLLPRHDDFARRHIGPGDKDQREMLQTLGLASIDELIEKTVPANIRLKRPLKMEDPVCENEILATLHAISSKNQIWRSYIGMGYYNCSVPQTILRNLLENSGWITQYTPYQPEVSQGRLESLLNYQTMVCDITGLDMANASLLDEGTAAAEALQLCYRHNKRRKFLVDPRCHPQTIAVVQTRAKYTGVLTELKLPCEMDFSGKDVSGVLFQYPDTEGKVEDFTELVERAHQSGSLACCATDLLALCILRPPGEFGVDIALGSSQRFGVPLGYGGPHAAFFAVRESLVRMMPGRMVGVTRDATGKEVYRLALQTREQHIRRDKATSNICTAQALLANMAAMFAIYHGSHGLEHIARRVHNATLILSEGLKRAGHQLQHDLFFDTLKIQCGCSVKEVLGRAAQRQINFRLFEDGTLGISLDETVNEKDLDDLLWIFGCESSAELVAESMGEECRGIPGSVFKRTSPFLTHQVFNSYHSETNIVRYMKKLENKDISLVHSMIPLGSCTMKLNSSSELAPITWKEFANIHPFVPLDQAQGYQQLFRELEKDLCELTGYDQVCFQPNSGAQGEYAGLATIRAYLNQKGEGHRTVCLIPKSAHGTNPASAHMAGMKIQPVEVDKYGNIDAVHLKAMVDKHKENLAAIMITYPSTNGVFEENISDVCDLIHQHGGQVYLDGANMNAQVGICRPGDFGSDVSHLNLHKTFCIPHGGGGPGMGPIGVKKHLAPFLPNHPVISLKRNEDACPVGTVSAAPWGSSSILPISWAYIKMMGGKGLKQATETAILNANYMAKRLETHYRILFRGARGYVGHEFILDTRPFKKSANIEAVDVAKRLQDYGFHAPTMSWPVAGTLMVEPTESEDKAELDRFCDAMISIRQEIADIEEGRIDPRVNPLKMSPHSLTCVTSSHWDRPYSREVAAFPLPFVKPENKFWPTIARIDDIYGDQHLVCTCPPMEVYESPFSEQKRASS

SEQ ID NO: 1077 - DNA, 306 bp, Homo sapiens
atggggaatagcctgtgcctgacatatcctcctgttcccgcgcgaaccgctttaccctggatccctggaatcgtgcctaggcacccgggcggcggggtccgcccaggccgcgtcaggcagctctgggccggtgggtgccgggtctcccctcctcccgccccatctggcgcgcccgcagcgccgccgccgccgccgcttctctccccagcgggcgctcggagcatcccgcgccgcgttctccccgccccggcccccgcccgccggagcggggcccacgccgctggcagccatcaagtggctcgttaa

SEQ ID NO: 1078 - protein, 101 aa, Homo sapiens
MGNSLCLTYPPVPARTALPWIPGIVPRHPGGGVRPGRVRQLWAGGCRVSPPPAPSGAPAAPPPPPLLSPAGARSIPRRVLPAPAPARRSGAHAAGSHQVAR

SEQ ID NO: 1079 - DNA, 5747 bp, Homo sapiens
ctcttttccctcacagcccgggcgccgggcggcgagtgcgttagtcggccgggacgcggagctgtgtgcatctcctacgcgggctcgctcgctcccgggagccgcgcagcttccccggcggtggcaggagcggcgaagagcgccatcagcgggcccttacggccccaggcctcgcggcgcgcggtccgctcgccctcctcgtccgcccaacctgcggcctgtggaggcgtgaggcgacgacaggcgagcgcctcgagcagcgttagccgctgcggccgccggtcctccctccacctcctcctcggccccccctcgcttccctcctcccacttcccgagctccggcgtgtcccggccacgctcgacgctgctgcaggaacaaaggaagaccccgcggcggcggcggcgccacctccgcctgctgctccgacccgctcccggcccgcggcggcggcaccagggcgcccggctcagccttcccggaggcctcggcccggcctcatcgtgccggcttcgcgcgcgaacccggctttcgcatttgggaccctgcaggaaaaatatggctcaggagactaaccagaccccggggcccatgctgtgtagcacaggatgtggcttttatggaaatcctaggacaaatggaatgtgttcagtttgctacaaagaacatcttcagaggcagcaaaatagtggcagaatgagcccaatgggaacagctagtggttccaacagtcctacctcagattctgcatctgtacagagagcagacactagcttaaacaactgtgaaggtgctgctggcagcacatctgaaaaatcaagaaatgtgcctgtggctgccttgcctgtaactcagcaaatgacagaaatgagcatttcaagagaggacaaaataactaccccgaaaacagaggtgtcagagccagttgtcactcagcccagtccatcagtttctcagcccagtacttctcagagtgaagaaaaagctcctgaattgcccaaaccaaagaaaaacagatgtttcatgtgcagaaagaaagttggtcttacagggtttgactgccgatgtggaaatttgttttgtggacttcaccgttactctgacaagcacaactgtccgtatgattacaaagcagaagctgcagcaaaaatcagaaaagagaatccagttgttgtggctgaaaaaattcagagaatataaattacttcttgtgaagagactgaaactttgtttttattttaatatatcgtaggaaaacattaaagagcagatgcatggccatttttctttgatgttctccagagttttacattacacttgtctgtcttataattgatattttaggatgtttgggtgtttgttacaggcagaattggatagatacagccctacaaatgtatatgccctcccctgaaaaaaattggatgaaaatctgcacagcaaagtgaaacacacagataataggaacaaaatgtagttcccatgtgccaaacaaaataaatgaaatctctgcatgtttgcagcatatctgccttttgggaatgtaatcaaggtataatctttggctagtgttatgtgcctgtatttttttaaaatggtacaccagaaaaggactggcagtctacttctaccatagttaaacttcaccctctttaatttcacaacatattctttggaagcaggaagaaatgctcataaagaggatcagaccttctttcccgtgaaaccagtatttggcgccatatataagcctggttaaattggtcatctaaagctgtcaaataagacattctgtgaaaggtaaacatcgaaactggttataagtaaaaccatcaagccaacaacagggtcttgagataacctttgaagcttattgtactggcctgcaccagaagatgtctgcattactcattgctaaaaatgtgtagcacagaactgcactaggattaatttgtttacaagaagaaatttaaactctacgtttggttttcacatacagcagctctattgaataacatgcatctgaattttaagttgcaaaggtatctgaataatttttcatgtgcatcttttgtcgaatgttttggttcaagaaagaatgtttaaagctttttaaaagacttcagttcttaatgtaactgtacccttctgcatggaaaatcataaccaacatggctgcagtagacttcttagtggtatccagcaccacttgcagagggctgctttatcatattgtacttgggtgtaggactctagtgttcttgggtgtattgcatgggctgcattatctacagcattgtacaataacaactagaaaaggcagtatacttcactgatgcttgtctggtaataatcacttctgtgttataatggaaggttttttgtgatgtatgaaacttgtgttttttatatataaatgagtatagttagtgttgtggtaatgcctgttttcatctgtaaatagttaagtatgtacacgaggcactacttctgatttattgcaatgttcagtcctagtttttacttttattcttaaagcattcagttttgctttcaattttatgtaccttagttctgagttagacctgcagatgtgtacagatagttcatatttatgtattgcacataatcatgctattcagcattgatgctatattgtattatgtaaataataaaagccatgtacagagggaaacttcacttgttcattgggtttttaagccatagttggagtcctaaagggggaaaattagaaaatgttactttacatggctatataattttttttcctttgccatcgctgaacttgttcaagtgataatcaagagatattagaagcatttgcaggtatgatacctgataggcagtttatttttgaagaattcaataggcacctttgggattaaaacaattttaaaatttgagaaagatgaaatttgaacaattatggcctacctcgcttctccatgttgtaaaagatgatgttttatgacaattctgaagaagaaagtaggtatgacttagtttacaaaaagagttctgttttatttctgttttgggtttggctctaatacagagattcacccatggacttggtctctgtagcgtttatgccagatcataaagaacaaggggtgacaggtacatgttgactttacctggggtaaatgattaccagagtgcaactgttgcttctctgtgatggagtttggggtggaaataccctagttttatctgtcagttctttgcatgctgctacttttgcttcaagttagggaggtacatatgtatgtcaaagttcctatactgacatagggtagtatttctctgaatatgaaaagtcacaattgagttgaaaatttagaagttgaagatttagaagggcaacttaatttttcaagttaaaaatggaagtaagagtggtatagagaaggtaagatgagccctcggactccatcactctgaaggtctgagtagtagcaagagatagatttttgtttggccaggctgcagtgcaatggcgtaatcttggctcactgcaacctctgcctcctgggttcaagtgattctcctgcctctgcctcctaagtagctgggatcacaggcaccagccaccacgcccagctaatttttgtatttttaatagagacagtttctccatgttggtcaggctggtcttgaactcctgacctcaggtgagctgcccgcctcggcctcccaaagtgctgggattacaggcgtgaggcaccgcacccggccaatcagttttttttgttttttttttgtttgtttgttttacaagaaacattaaaccagatcagaacaaagatttgtcagggttgtccattgactggggagaaagggaatcagtgtgtaaggcacctgagaggactcagttctacccaaattcttgcattcaaacctgaatgcaaggccatgaagtcctttgaaatgtacagatattaagcaatttaataatataccatgtttcccttacataagcagacaaatatttacacccccatgacctgaagttttgttaggctgtgaccacatgaattcgcagtataaatgggtgagtcctttttgaaaacctcatcttcagtgtgcctgatctgtaaaactagagcctcaggtttgatcctaggtaggcttcccacaacgtggggaaaattagtttgtgagggaaagctgtttctgagcattatggcatagtgattaagatgagggaccctggaaccagcccgtgattttgggcaagttattttaggtccactttggactgcttcatctcttaaatgaagacagcaaccaccttcaggagtgtgaaggtgacaacacttaaaactgtgcctggcacattgtatttgctattgtcttaatgttctggaataatggtttccataacttgggaagaaaactttgagaacaggattggttacatcaagttgtatagtgaaaagataaagatttgttatttaaacttgcagtttaaagtcattagaatcattcttttccgtaaggctttctttgcaagagatctgcattaaataaagttgctaggaaataactaaaattggggaaataatctaataatagcaagatgttaagcatactattattgtattttgggggttggtaataacattcacatggatttatcaatacacactgagaagcaaagcctctcaagctgtcccatatcctccatttcaaaggcacacatacattttaggtaactcataatttagaaaggttatttaatcttttccacatgtaaatatttgaatatgtacaaagacttgatttgactcttgtctgtttttgttttgttttgtttgtttgagacagaggctccgtcgcccaggctggagtaaaatggcatggtctcagctcactgcaagttccgcctcccgggttcacgccattctcctggctcagcctccggagtagttgggactacaggcacccgtcaccacacctggctaatgttttttgttttttgggtttttttgtatttttagtagagagagggtttcaccgtgttagccagggtggtctcgatctcctgacctcatgatccgcccaccccggcctcccaaaatgctgggattacaggtgtgagccactgcgcctggccgactcttgtctgtttgaatgcaaagttctcaatagtggtttttgtccataagtattaacttataattttggagagtgataggtatggttgctggttgattagcaataagattatgtagccttaaactagctagaagagtttgcatgggtgaggcaacaggctgttaacaaaaagaaactggaaatacagtttcccctgtttgtttctcctgtttgtacaatctgctttaaaaacaagtgaacatgcaccatgtcagtcatggtgaatcggccaacagccagcccttgccagttgacatcacagtctaagatgggaaactggtacagatagacatgaagagagcttagcagtggttgaggtggtgactaaatatacagtcattgaataaataccgtgtagcaaatgtaaaaaaaaaaaaaaaagtacaacagaatacaaaagtgccatttaatattttatagctatttctatgcacaagtgctggttttaaatttatataaaagcaaagactgtttctgtgttttcttccagagtatttctgttacagccatagaagtaaagttaataaatgtaagactttttttgtttaaaaaaaaaaaaaaaaaaa

SEQ ID NO: 1080 - protein, 213 aa, Homo sapiens
MAQETNQTPGPMLCSTGCGFYGNPRTNGMCSVCYKEHLQRQQNSGRMSPMGTASGSNSPTSDSASVQRADTSLNNCEGAAGSTSEKSRNVPVAALPVTQQMTEMSISREDKITTPKTEVSEPVVTQPSPSVSQPSTSQSEEKAPELPKPKKNRCFMCRKKVGLTGFDCRCGNLFCGLHRYSDKHNCPYDYKAEAAAKIRKENPVVVAEKIQRI

SEQ ID NO: 1081 - DNA, 3201 bp, Homo sapiens
cagaaactatgagggcagaacccagcaatctgtgctttctttcacaagccctccaggagttgctgaaatttaggaatcattgccccaaaaagtggccctcataatgatgccagatgggatcttactctgttgcccaggctggagtgcagtggtgcgatctcggctctctgcaacctccgcctcccaggttcaagtgattctcctgcctcggcctcctgagtagctgggatttcaggccatgaaagatcactgttttagtctgcgtggtgcagtggaacagatagacctcggtttgaatctcagctctactgtttactagacatgaaatggggaaatctaaaatgagatgccagaagcctcaaaaatggaaaaccccctgtgcttcacatctgaaaatctctgctgggggcagcaactttgagcctgtggggaaggaactgtccacgtggagtggtctggtgaatgcttaaggagctgcagaagggaagtccctctccaaactagccagccactgagaccttctgacaggacacccccaggatgtcacccaaaaaagtacaaatcaaagtggaggaaaaagaagacgagactgaggaaagctcaagtgaagaggaagaggaggtggaagataagctacctcgaagagagagcttgagaccaaagaggaaacggaccagagatgttatcaatgaggatgacccagaacctgaaccagaggatgaagaaacaaggaaggcaagagaaaaagagaggaggaggaggctaaagagaggagcagaagaagaagaaattgatgaagaggaattggaaagattgaaggcagagttagatgagaaaagacaaataattgctactgtcaaatgcaaaccatggaagatggagaagaaaattgaagttctcaaggaggcaaaaaaatttgtgagtgaaaatgaaggggctcttgggaaaggaaaaggaaaacggtggtttgcatttaagatgatgatggccaagaaatgggcaaaattcctccgtgattttgagaacttcaaagctgcgtgtgtcccatgggaaaataaaatcaaggctattgaaagtcagtttggctcctcagtggcctcatacttcctcttcttgagatggatgtatggagtcaatatggttctctttatcctgacatttagcctcatcatgttgccagagtacctctggggtttgccatatggcagtttacctaggaaaaccgttcccagagccgaagaggcatcggcagcaaactttggtgtgttgtacgacttcaatggtttggcacaatattccgttctcttttatggctattatgacaataaacgaacaattggatggatgaatttcaggttgccgctctcctattttctagtggggattatgtgcattggatacagctttctggttgtcctcaaagcaatgaccaaaaacattggtgatgatggaggtggagatgacaacactttcaatttcagctggaaggtctttaccagctgggactacctgatcggcaatcctgaaacagcagacaacaaatttaattctatcacaatgaactttaaggaagctatcacagaagaaaaagcagcccaagtagaagaaaacgtccacttgatcagattcctgaggtttctggctaacttcttcgtgtttctaacacttggagggagtggatacctcatcttttgggctgtgaagcgatcccaggaatttgcacagcaagatcctgacacccttgggtggtgggaaaaaaatgaaatgaacatggttatgtccctcctagggatgttctgtccaacattgtttgacttatttgctgaattagaagactaccatcctctcatcgctttgaaatggctactgggacgcatttttgctcttcttttaggcaatttatacgtatttattcttgcattaatggatgagattaacaacaagattgaagaggagaagctagtaaaggccaatattaccctttgggaagccaatatgatcaaggcctacaatgcatcattctctgaaaatagcactggaccacccttttttgttcaccctgcagatgtacctcgaggaccttgctgggaaacaatggtgggacaggagtttgtgaggctgacagtctctgatgttctgaccacctacgtcacaatcctcattggggactttctaagggcatgttttgtgaggttttgcaattattgctggtgctgggacttggagtatggatatccttcatacaccgaattcgacatcagtggcaacgtcctcgctctgatcttcaaccaaggcatgatctggatgggctccttctttgctcccagcctcccaggcatcaatatccttcgactccatacatccatgtacttccagtgctgggccgttatgtgctgcaatgttcctgaggccagggtcttcaaagcttccagatcaaataacttctacctgggcatgctactgctcatcctcttcctgtccacaatgcctgtcttgtacatgatcgtgtccctcccaccatcttttgattgtggtccattcagtggcaaaaatagaatgtttgaagtcattggagagaccctggagcacgatttcccaagctggatggcgaagatcttgagacagctttcaaaccctgggctggtcattgctgtcattttggtgatggttttggccatctattatctcaatgctactgccaagggccagaaggcagcgaatctggatctcaaaaagaagatgaaaatgcaagctttggagaacaaaatgcgaaacaagaaaatggcagctgcacgagcagctgcagctgctggtcgccagtaataagtatcctgagagcccagaaaaggtacactttgccttgctgtttaaaagtaatgcaatatgtgaacgcccagagaacaagcactgtggaactgctattttcctgttctacccttgatggattttcaaggtcatgctggccaattaaggcatcatcagtcctacctgagcaacaagaatctaaactttattccaagtcagaaactgtttctgcagagccactctctcccctgctccatttcgtgactttttttttttttttaacaaattgagtttagaagtgagtgtaatccagcaatacagtttactggtttagttggtgggttaattaaaaaaaatttgctcatatgaactttcattttatatgtttcttttgcc

SEQ ID NO: 1082 - protein, 760 aa, Homo sapiens
MSPKKVQIKVEEKEDETEESSSEEEEEVEDKLPRRESLRPKRKRTRDVINEDDPEPEPEDEETRKAREKERRRRLKRGAEEEEIDEEELERLKAELDEKRQIIATVKCKPWKMEKKIEVLKEAKKFVSENEGALGKGKGKRWFAFKMMMAKKWAKFLRDFENFKAACVPWENKIKAIESQFGSSVASYFLFLRWMYGVNMVLFILTFSLIMLPEYLWGLPYGSLPRKTVPRAEEASAANFGVLYDFNGLAQYSVLFYGYYDNKRTIGWMNFRLPLSYFLVGIMCIGYSFLVVLKAMTKNIGDDGGGDDNTFNFSWKVFTSWDYLIGNPETADNKFNSITMNFKEAITEEKAAQVEENVHLIRFLRFLANFFVFLTLGGSGYLIFWAVKRSQEFAQQDPDTLGWWEKNEMNMVMSLLGMFCPTLFDLFAELEDYHPLIALKWLLGRIFALLLGNLYVFILALMDEINNKIEEEKLVKANITLWEANMIKAYNASFSENSTGPPFFVHPADVPRGPCWETMVGQEFVRLTVSDVLTTYVTILIGDFLRACFVRFCNYCWCWDLEYGYPSYTEFDISGNVLALIFNQGMIWMGSFFAPSLPGINILRLHTSMYFQCWAVMCCNVPEARVFKASRSNNFYLGMLLLILFLSTMPVLYMIVSLPPSFDCGPFSGKNRMFEVIGETLEHDFPSWMAKILRQLSNPGLVIAVILVMVLAIYYLNATAKGQKAANLDLKKKMKMQALENKMRNKKMAAARAAAAAGRQ

SEQ ID NO: 1083 - DNA, 3604 bp, Homo sapiens
tctctcccctctctttctctctcgctgctcccttcctccctgtaactgaacagtgaaaattcacattgtggatccgctaacaggcacagatgtcatgtgaaaacgcacatgctctgccatccacaccgcctttctttcttttctttctgtttccttttttcccccttgttccttctccctcttctttgtaactaacaaaaccaccaccaactcctcctcctgctgctgcccttcctcctcctcctcagtccaagtgatcacaaaagaaatcttctgagccggaggcggtggcattttttaaaaagcaagcacattggagagaaagaaaaagaaaaacaaaaccaaaacaaaacccaggcaccagacagccagaacatttttttttcacccttcctgaaaacaaacaaacaaacaaacaatcatcaaaacagtcaccaccaacatcaaaactgttaacatagcggcggcggcggcaaacgtcaccctgcagccacggcgtccgcctaaagggatggttttctcggcagagcagctcttcgccgaccaccttcttcactcgtgctgagcgggatttttgggctctccggggttcgggctgggagcagcttcatgactacgcggagcgggagagcggccacaccatgcgagcacaaattgaagtgataccatgcaaaatttgtggcgataagtcctctgggatccactacggagtcatcacatgtgaaggctgcaagggattctttaggaggagccagcagaacaatgcttcttattcctgcccaaggcagagaaactgtttaattgacagaacgaacagaaaccgttgccaacactgccgactgcagaagtgtcttgccctaggaatgtcaagagatgctgtgaagtttgggaggatgtccaagaagcaaagggacagcctgtatgctgaggtgcagaagcaccagcagcggctgcaggaacagcggcagcagcagagtggggaggcagaagcccttgccagggtgtacagcagcagcattagcaacggcctgagcaacctgaacaacgagaccagcggcacttatgccaacgggcacgtcattgacctgcccaagtctgagggttattacaacgtcgattccggtcagccgtcccctgatcagtcaggacttgacatgactggaatcaaacagataaagcaagaacctatctatgacctcacatccgtacccaacttgtttacctatagctctttcaacaatgggcagttagcaccagggataaccatgactgaaatcgaccgaattgcacagaacatcattaagtcccatttggagacatgtcaatacaccatggaagagctgcaccagctggcgtggcagacccacacctatgaagaaattaaagcatatcaaagcaagtccagggaagcactgtggcaacaatgtgccatccagatcactcacgccatccaatacgtggtggagtttgcaaagcggataacaggcttcatggagctctgtcaaaatgatcaaattctacttctgaagtcaggttgcttggaagtggttttagtgagaatgtgccgtgccttcaacccattaaacaacactgttctgtttgaaggaaaatatggaggaatgcaaatgttcaaagccttaggttctgatgacctagtgaatgaagcatttgactttgcaaagaatttgtgttccttgcagctgaccgaggaggagatcgctttgttctcatctgctgttctgatatctccagaccgagcctggcttatagaaccaaggaaagtccagaagcttcaggaaaaaatttattttgcacttcaacatgtgattcagaagaatcacctggatgatgagaccttggcaaagttaatagccaagataccaaccatcacggcagtttgcaacttgcacggggagaagctgcaggtatttaagcaatctcatccagagatagtgaatacactgtttcctccgttatacaaggagctctttaatcctgactgtgccaccggctgcaaatgaaggggacaagagaactgtctcatagtcatggaatgcatcaccattaagacaaaagcaatgtgttcatgaagacttaagaaaaatgtcactactgcaacattaggaatgtcctgcacttaatagaattatttttcaccgctacagtttgaagaatgtaaatatgcacctgagtggggctcttttatttgtttgtttgtttttgaaatgaccataaatatacaaatataggacactgggtgttatcctttttttaattttattcgggtatgttttgggagacaactgtttatagaattttattgtagatatatacaagaaaagagcggtactttacatgattacttttcctgttgattgttcaaatataatttaagaaaattccacttaataggcttacctatttctatgtttttaggtagttgatgcatgtgtaaatttgtagctgtcttggaaagtactgtgcatgtatgtaataagtatataatatgtgagaatattatatatgactattacttatacatgcacatgcactgtggcttaaataccatacctactagcaatggaggttcagtcaggctctcttctatgatttaccttctgtgttatatgttacctttatgttagacaatcaggattttgttttcccagccagagttttcatctatagtcaatggcaggacggtaccaactcagagttaagtctacaaaggaataaacataatgtgtggcctctatatacaaactctatttctgtcaatgacatcaaagccttgtcaagatggttcatattgggaaggagacagtattttaagccattttcctgtttcaagaattaggccacagataacattgcaaggtccaagacttttttgaccaaacagtagatattttctatttttcaccagaacacataaaaacactttttttcttttggatttctggttgtgaaacaagcttgatttcagtgcttattgtgtcttcaactgaaaaatacaatctgtggattatgactaccagcaatttttttctaggaaagttaaaagaataaatcagaacccagggcaacaatgccatttcatgtaaacattttctctctcaccatgttttggcaagaaaaggtagaaagagaagacccagagtgaagaagtaattctttatattcctttctttaatgtatttgttaggaaaagtggcaataaagggggaggcatattataaaatgctataatataaaaatgtagcaaaaacttgacagactagaaaaaaaaagatctgtgttattctagggaactaatgtaccccaaagccaaaactaattcctgtgaagtttacagttacatcatccatttaccctagaattatttttttagcaacttttagaaataaagaatacaactgtgacattaggatcagagattttagacttccttgtacaaattctcacttctccacctgctcaccaatgaaattaatcataagaaaagcatatattccaagaaatttgttctgcctgtgtcctggaggcctatacctctgttattttctgatacaaaataaaacttaaaaaaaagaaaacaagctaa

SEQ ID NO: 1084 - protein, 459 aa, Homo sapiens
MRAQIEVIPCKICGDKSSGIHYGVITCEGCKGFFRRSQQNNASYSCPRQRNCLIDRTNRNRCQHCRLQKCLALGMSRDAVKFGRMSKKQRDSLYAEVQKHQQRLQEQRQQQSGEAEALARVYSSSISNGLSNLNNETSGTYANGHVIDLPKSEGYYNVDSGQPSPDQSGLDMTGIKQIKQEPIYDLTSVPNLFTYSSFNNGQLAPGITMTEIDRIAQNIIKSHLETCQYTMEELHQLAWQTHTYEEIKAYQSKSREALWQQCAIQITHAIQYVVEFAKRITGFMELCQNDQILLLKSGCLEVVLVRMCRAFNPLNNTVLFEGKYGGMQMFKALGSDDLVNEAFDFAKNLCSLQLTEEEIALFSSAVLISPDRAWLIEPRKVQKLQEKIYFALQHVIQKNHLDDETLAKLIAKIPTITAVCNLHGEKLQVFKQSHPEIVNTLFPPLYKELFNPDCATGCK

SEQ ID NO: 1085 - DNA, 12602 bp, Homo sapiens
ggagggagcagtcggtcgctgcgccccggcgggccactttcccgggaccccgctcgtcttccttgggccgagattttccactgcgcccctccgagtacccgggttccaaacccctagccacgacatggaagaatttttgcaacgcgccaaatctaaactgaatcgaagcaaacgcttggagaaggtccatgtggttattgggcctaaatcgtgtgacttggattctctcatttctaccttcacatatgcttactttctagacaaggtcagtccaccaggggttctgtgtttaccagtgctgaacataccaagaactgaattcaactacttcaccgagacgaggtttattttagaagagctaaatatttccgaatcattccacatattccgggatgaaattaacctgcatcagctaaatgatgaagggaagttatcgataacacttgttggcagcagtgtgctggcgagtgaagacaaaactttagaatcagcagttgtcaaagtcattaatccggttgagcagagcgatgccaacgttgagttccgagagtcttcctcttctctcgtgctaaaggagattctccaagaggctcctgagctcatcaccgagcaactggctcatcgcctcagaggtagcattcttttcaagtggatgaccatggaatcagagaagatctcagagaagcaggaggaaattctttctatcctggaagaaaaatttcctaacttgcctccaagagaggacatcatcaacgtcctacaggagacccagttcagtgctcagggtttaagtattgaacagacaatgttgaaagatctaaaggagctgtcagatggagaaataaaagtggccattagtactgtgagcatgaaccttgagaattgtctatttcacagcaatattaccagtgacttgaaagcatttacagacaagtttggttttgatgtcctcatcctgttctccagctatctgtcagaggagcagcagccgagacgacagattgctgtgtactcagaaaacatggagctgtgcagtcagatttgctgtgagctggaagagtgtcagaacccttgcctagaactggagccctttgactgtggctgtgatgagatcctggtgtaccaacaagaggacccttcagtgacttgtgatcaggtggttctcgttgtcaaggaagtcatcaacaggaggtgtccagagatggtctccaatagccggacatcctcaacagaagccgtggcaggcagtgcccccctctcccaggggtcttctgggattatggaattgtatggttctgacatagagccacaacccagctctgtgaatttcatagagaaccctccagatctcaatgattctaaccaggctcaggtggatgccaatgtagaccttgttagcccagacagcggactggctaccattaggagcagccgctcatccaaggagagctctgttttcctcagtgacgacagccccgtgggagaaggtgctgggcctcaccacacccttctcccagggcttgactcctacagccccatccctgaaggggcggtggcggaggaacatgcatggtctggagaacacggtgagcacttcgacctcttcaattttgacccagcacccatggcttctgggcagtcccagcaatcttctcattctgcagactactccccagcagatgacttcttccccaacagtgacctgtcagaaggacagctccccgctgggcctgaaggacttgatggcatgggaaccaacatgtctaattattcatccagttcacttttgtcaggggctggcaaagatagccttgtggaacatgatgaggagtttgtccagagacaagacagtcccagagataactctgaaagaaatttgagcctgacagattttgtgggagatgaatccccttccccagaaaggctaaaaaatactggaaagaggatcccaccaacacccatgaatagtttagtagaaagctcgccatccactgaagaaccagcctcactctatacagaagatatgacccaaaaagcaactgacacaggtcacatggggccacctcagacccatgcacggtgcagcagctggtggggtggtttggaaattgactccaaaaatattgcagatgcgtggagttccagtgaacaggaatctgttttccagagccctgaatcatggaaagagcataagccaagctccattgataggagagcctcagattctgtatttcaaccaaagagcctcgaatttacaaagtcaggtccctgggagtctgaatttggtcagcctgaactgggtagcaatgatattcaagacaaaaatgaggaaagcttgccgttccagaacctgcccatggagaagtcacctttgccaaatacatctccccaaggaacaaaccacctgatagaagactttgcttctttgtggcattctggtcgctctcccacagccatgcccgagccctggggaaatcctacagatgatggtgaaccagcagctgtggcgccattcccagcctggagtgcatttggtaaagaagatcatgatgaagctttaaaaaatacctggaatttgcacccaacaagcagcaagacaccttctgttagggacccgaatgagtgggccatggcaaaaagtgggtttgccttttcttcttcagaactactggacaattcacccagtgagataaacaatgaagcagctccagaaatctggggcaagaaaaacaatgactccagggatcacatctttgcacctggaaatcccagttctgatctggatcacacatggactaattctaagccaccaaaagaagatcagaatggtttagtggatcctaaaactaggggcaaggtatatgaaaaggtagattcctggaacctttttgaggagaatatgaagaaaggagggtcagatgtcctagttccttgggaagattccttcttatcttacaaatgttctgattacagtgcatccaacctaggagaagattcggtgccttcccccttagataccaattattccacctcagactcttacacatcaccaacatttgctggagacgaaaaggaaactgaacacaagccatttgctaaagaggaaggttttgagtcaaaagatggtaactccacggcagaggagactgacattcctcctcagtcactgcaacagtcatctcgaaatcgaatcagttcaggtcctgggaacctagacatgtgggcttcacctcatacagataacagttctgaaataaataccactcacaacctggatgaaaatgaactcaagacagagcacacagatggtaagaatatctccatggaggatgacgtcggggaaagcagccagtccagttacgacgaccccagcatgatgcaactgtacaatgaaacaaaccgacaactcacacttttgcacagcagcaccaactcccggcagacggcccctgacagtctcgacttgtggaacagagtgattttggaggatactcagtccactgcaacgatctcagatatggacaatgatttggactgggatgactgcagtgggggtgcggcaatccccagtgatggtcaaacagaaggatacatggctgaaggttccgagccggaaacccgatttacagtgagacagctggaaccctggggcttggagtatcaggaagcaaatcaggtagattgggagctccctgcctctgatgagcataccaaggacagtgctcccagtgaacatcacacattgaatgagaaaagtgggcagctaattgcaaacagtatttgggattctgtcatgagagataaagacatgtcatcattcatgttaccaggctcctcacatatcacagattcagagcaaagggaattgcctcctgaaatccccagccattcagcaaatgttaaagacactcattccccagatgcgccagcagcctctggaaccagtgaatcagaggcacttatatctcatcttgacaagcaggacacagagagggaaaccctgcaaagtgatgcagcatccttggcgactaggcttgagaatccagggtattttccacacccagatccatggaaaggtcatggcgatggacaaagtgaaagtgagaaggaagcccagggagccactgacagggggcaccttgatgaagaggaggtgatcgcctctggtgtggagaatgcctcagggatttctgaaaaagggcagagtgaccaggaactgtcttctctggttgcatctgaacatcaggaaatctgcattaaatcaggcaaaatcagctctcttgctgtcactttcagtcctcaaaccgaggaaccagaggaagttttagagtatgaggaggggtcttacaatctagactcccgtgatgtgcaaacagggatgtccgcagataacctgcagccaaaagatacccatgaaaaacacctcatgagtcaaagaaattcaggtgaaactactgagacttcagatgggatgaatttcacaaaatatgtatctgtacctgaaaaggatcttgagaaaactgaagaatgtaactttctagagccagagaacgtgggtggagggccacctcacagagttccccgaagtcttgattttggggacgtccctatagacagtgatgtgcatgtcagcagcacatgttctgagataaccaaaaatcttgacgttaaggggtctgaaaatagccttccaggagccggttcgtctggaaattttgacagagatactatttctagtgagtatactcattcaagtgcatcaagtcctgagttaaatgactcttcagttgcactgtcctcctggggccagcaacccagttctgggtatcaagaagaaaaccaaggcaactggagtgaacagaatcaccaagaatctgaactaattaccactgatggccaagtagaaatagttaccaaagtgaaggatttagagaaaaacagaataaatgagtttgaaaagagctttgatcgcaaaactcctacatttttagagatctggaatgactcagttgatggtgattccttttcctctttatccagtcctgaaacaggcaaatattctgaacattcagggacacatcaggaaagcaatctaattgctagctaccaggagaaaaatgaacatgacatttctgcaactgtgcagccagaggatgccagggtcatttcaacaagctcaggttctgatgatgacagtgtcggtggtgaagagtcaatagaggaagagatccaggtggccaactgccacgttgctgaggatgaatccagagcttgggattcattgaatgaatctaataagttcttggtcacagctgatcctaagtctgaaaatatttatgactacctagacagctcagagccagcagagaatgagaataagtcaaacccattctgtgacaatcaacaaagcagccctgatccctggactttctcaccattaacggagactgaaatgcagattacagcagtggagaaggagaagagatcttctccagaaacagggacaacaggagatgttgcatggcaaatatctcccaaagcttcgttcccaaagaacgaagataattctcaactggaaatgctgggcttctcagctgatagcactgagtggtggaaggcctcaccccaggaagggagactaattgaaagtccatttgaaagggagctgtctgactccagtggtgtgttggagataaattcttcagtacaccaaaatgccagtccctggggagtaccagttcagggtgatattgagcccgtggaaacacactatactaatccttttagtgacaaccatcagtcaccctttctggaaggtaatgggaagaactcccatgagcaactctggaacattcaaccaaggcagccagacccagatgctgacaagttcagccagcttgtaaaattagaccaaattaaagaaaaggactcaagagagcaaacctttgtgtctgctgctggtgatgagctgactcctgaaacacctacccaagagcagtgtcaggacaccatgctgccagtctgtgatcatccggacacagcctttactcacgcagaggaaaatagttgtgttacatctaatgtttcaactaatgaaggtcaagaaacaaatcagtgggaacaagaaaaatcatacctaggtgagatgacaaattcaagcattgccacagaaaattttcctgctgtcagttctcccacccaactgataatgaagccaggctctgaatgggatggctctaccccaagtgaggactcccgaggtacctttgtgccagatattttacatggcaactttcaagagggtgggcagctggcctctgccgcgcctgacttgtggatagatgctaagaagcccttcagtttgaaagcagatggtgagaatcctgatatcctgacgcactgcgaacatgacagcaattctcaggcttccgacagccctgatatatgtcacgattctgaagcaaagcaagagactgagaagcacctcagtgcttgcatgggacctgaagtggaatccagtgagctttgtctcactgagccagagatagatgaagaacccatttatgagcctggacgggagtttgtcccatccaatgcagaactcgattctgaaaacgcaactgtgctgcctccaattggctatcaagcagacataaagggctcctctcagcccgcctctcataaaggttcacctgaaccttctgaaataaacggtgacaacagtacaggtttacaagtatcagaaaaaggagccagcccagatatggcaccaattttggaaccagttgacagaagaatcccaaggattgaaaatgtggcaactagcatttttgtaactcaccaagagccaactccagaaggtgacggttcttggatatcagacagcttttctcctgaaagtcagcctggtgcaagagctttgtttgatggtgatccacatttatccacagagaatcctgccttggttcctgatgctttgctagcctcagacacttgtctggatataagcgaagctgcctttgaccacagtttcagcgatgcctcaggtctcaacacatccacgggaacaatagatgacatgagtaaactgacattatccgaaggccatccggaaacgccagttgatggggacctagggaagcaagatatctgctcatctgaagcctcgtggggtgattttgaatatgatgtaatgggccagaatatcgatgaagatttactgagagagcctgaacacttcctgtatggtggtgaccctcctttggaggaagattctctgaagcagtcgctggcaccgtacacacctccctttgatttgtcttatctcacagaacctgcccagagtgctgaaacaatagaggaagctgggtctccagaggatgaatctctgggatgcagagcagcagagatagtgctttctgcacttcctgatcgaagaagtgagggaaaccaggctgagaccaaaaacagactgcctggatcccagctggctgtgctgcatattcgtgaagaccctgagtccgtttatttgccggtaggagcaggctccaacattttgtctccatcaaacgttgactgggaagtagaaacagataattctgatttaccagcaggtggagacataggaccaccaaatggtgccagcaaggaaatatcagaattggaagaagaaaaaacaattcctaccaaagagcctgagcagataaaatcagaatacaaggaagaaagatgtacagagaagaatgaagatcgtcatgcactacacatggattacatacttgtaaaccgtgaagaaaattcacactcaaagccagagacctgtgaagaaagagaaagcatagctgaattagaattgtatgtaggttccaaagaaacagggctgcagggaactcagttagcaagcttcccagacacatgtcagccagcctccttaaatgaaagaaaaggtctctctgcagagaaaatgtcttctaaaagcgatacgagatcatcttttgaaagccctgcacaagaccagagttggatgttcttgggccatagtgaggttggtgatccatcactggatgccagggactcagggcctgggtggtctggcaagactgtggagccgttctctgaactcggcttgggtgagggtccccagctgcagattctggaagaaatgaagcctctagaatctttggcactagaggaagcctctggtccagtcagccaatcacagaagagtaagagccgaggcagggctggcccggatgcagttacgttgcaggctgtcacccatgacaatgaatgggaaatgctttcaccacagcctgttcagaaaaacatgatccctgacacggaaatggaggaggagacagagttccttgagctcggaaccaggatatcaagaccaaatggactactgtcagaggatgtaggaatggacatcccctttgaagagggcgtgctgagtcccagtgctgcagacatgaggcctgaacctcctaattctctggatcttaatgacactcatcctcggagaatcaagctcacagccccaaatatcaatctttctctggaccaaagtgaaggatctattctctctgatgataacttggacagtccagatgaaattgacatcaatgtggatgaacttgatacccccgatgaagcagattcttttgagtacactggccatgatcccacagccaacaaagattctggccaagagtcagagtctattccagaatatacggccgaagaggaacgggaggacaaccggctttggaggacagtggtcattggagaacaagagcagcgcattgacatgaaggtcatcgagccctacaggagagtcatttctcacggaggatactatggggacggtctaaatgccatcattgtgtttgccgcctgttttctgccagacagcagtcgggcggattaccactatgtcatggaaaatcttttcctatatgtaataagtactttagagttgatggtagctgaagactatatgattgtgtacttgaatggtgcaaccccaagaaggaggatgccagggctaggctggatgaagaaatgctaccagatgattgacagacggttgaggaagaatttgaaatcattcatcattgttcatccatcttggttcatcagaacaatccttgctgtgacacgaccttttataagttcaaaattcagcagtaaaattaaatatgtcaatagcttatcagaactcagtgggctgatcccaatggattgcatccacattccagagagcatcatcaaactggatgaagaactgagggaagcatcagaggcagctaaaactagctgcctttacaatgatccagaaatgtcttctatggagaaggatattgacttgaagctgaaagaaaagccttagttggccatgctggaagaagaggatgcttttctggttcatggttctgttgaaacatatctacctgaaagagacagggctgatgttacctttttccactttgcactacctggtgccattctaaatttctaaggggaaaaatagaaagtttgtttactcttaagatattttatgaaattgtgtgtactttcctattttgccaattatgtgcctcaaagattttagttgagccttagcaagaaagtaggaccttccatttcaatacttcattaacacggtgtagtgatactttgtcccttagactggtgtttaccagtaagatacctttaatccactgttaagtatgagtggatttgtttccatagattagctggatttccttttggtgattgcattaggtttaaagtacacaggtctcaactctccccaggaaagtttcccctgtttgactccacctttaaaatcctaagcctgactaggacagccacaaaccacacaaggtgtaaaaccatcatcagctaagtgcccgttttgttcttgtttaccagaatctcctttaacttctcaaagggaagccgggctttctaatccacgtcaactttattttagttgtcaaattgggcattatattttatgtaaattggtcttttaacatcattttcctgatgaatgttggtgaccaccacattgtgaaatttaagaatccgtgttgcatgtttggtagctctctgagtttcaggccataaactcagctccagaggttaccttttaagtgccaagaactcaagtgcaaggtggcctactcaaaaatcatttggtagcattcagttattcatgaattcctctctcgcatgcattataaaaagtgatctgctttaaaacaccgtaatctgatcataggcttaaaattaaatatgagtattactttcatgtacaaaatatttcctttatagtcttcatatgccctttaaaatgccaacaagatttcaagtctgtaggcctctagtgaggtggggtggcaaaccacagctaagtctcgctcaccactgcaagctaagaatggtttttacattttgggttggaaaaattttttttgaatatttcatgacacatgaaaattattcaaatgttagtgccgataaataaagtggtactgaaacacagccacacaaacttgtttttgtactgtctacagctactttcacactacagccgcagagctgagcagttcagcagaccgtatgtcccacaatgcctaaaacattgactatgtttacagaaaaagtttgctgacccctgctctagcaaacgcatcctttcctactccaccccaatttgtatttagatagtttctctaacagaacggacaaatgaggctgcaaactaatttatttttgtcaaaaatcaatgttttgacatccacagacagtgaaataaaagaaatggcttgctgaaaaacatgaggagtcctagccacaaaatcactgcttaggttgcaattgccaaaatgaagccttcttagaagcacttctttagtatatacaggtgttggctgaagtccgtgcctcactctgggaaccattcttagtctccagtgtctcctattacaaagaagctggcagaaataaaaatgaaggggtgagagcggttccaccctagtctcatggtggaaaattcattggggagagctgtccaggatatttggagtcctgggtagaaggagcttgtaactactttaaagtcgacatctttgcacaggtgattgagtttctctgacctcattgcttcacctctgtctcctcccgtccttccgcacgtgcccacacacacgcagttcagccctctttcctccataagcctccatcgttttctcttttctcctcttgatcctttcaagcgagtatcttgttgaattgtatgttctgttggatctcctccttcataacatctggcttgttggacagaaaaaccctacagcccaccccctcccacagcccacctccacttttgaaagcccaaattacacctctcccagaacacagtgttgacgtaaatacagttacccaatattcctgtttgttcacctatttgctactttcactcagtagcatcccattttgtaaaatgaattccatggtcaccctgtcacaggaagtaatgaaaaatccagtgttcagtgtagtggtgcaaacctgagggcatagagctgttcatagagggctcttgttatagccaaacagacacagcaacaatctcaccatttatatatatatttttaacttgtccagctcatctatggaaaactactcaggtggtatgctgtttgaagcctcatcttcctacatgaaaattatgggcatttgtcccaatgattttgtttcagctgttctgtaggctgcataaccactctgatatttaggtatctgctattttattatcttaaaagacaaattaatttaattgcatgtgctagggaaaagctaccatgtacattcaccccaagtaaatagaatcctagatgaatcctagaaaaataatccctaagcagataggtagacagaggtaaacattcacatgatttagctctctagctcttgcactctgaacattcttgctttggttctgacttctgggaactgctttgcatttctcctatagatctgtagttaagggaaccaaggggtcattggggcaaaagcattgtttctcaaagctccttgattaagagaaagaacagaaatttgcacagaagatagtgtcaaggagtgagaaagtttgtttgagggcagtagctcagtgtggaagaaaatcctgaagtttctgttgaagccatacaatgttctatggggttactctctaagacattctctgaggtgtgtgaggaagtcactactcctagcctttgttaagatgtaattttaaatattcagttatggtactatgtttgcaactctcgtcttatcacaatgcctcagtagtttgttcccttagaaacatttagatgtgcacaaattaatcttttatatatctaaaggtttttctatcatgcattggattgctcagaataaagtgtctgttagacttcgttttggtaaataaattctccataatgtagattaataatataaaagtctttaatgacacaatatatctatatagcctcactgtataattcagaaataaaaattgattctgcaaaaaaaaaaaaaaaaaa

SEQ ID NO: 1086 - protein, 3088 aa, Homo sapiens
MEEFLQRAKSKLNRSKRLEKVHVVIGPKSCDLDSLISTFTYAYFLDKVSPPGVLCLPVLNIPRTEFNYFTETRFILEELNISESFHIFRDEINLHQLNDEGKLSITLVGSSVLASEDKTLESAVVKVINPVEQSDANVEFRESSSSLVLKEILQEAPELITEQLAHRLRGSILFKWMTMESEKISEKQEEILSILEEKFPNLPPREDIINVLQETQFSAQGLSIEQTMLKDLKELSDGEIKVAISTVSMNLENCLFHSNITSDLKAFTDKFGFDVLILFSSYLSEEQQPRRQIAVYSENMELCSQICCELEECQNPCLELEPFDCGCDEILVYQQEDPSVTCDQVVLVVKEVINRRCPEMVSNSRTSSTEAVAGSAPLSQGSSGIMELYGSDIEPQPSSVNFIENPPDLNDSNQAQVDANVDLVSPDSGLATIRSSRSSKESSVFLSDDSPVGEGAGPHHTLLPGLDSYSPIPEGAVAEEHAWSGEHGEHFDLFNFDPAPMASGQSQQSSHSADYSPADDFFPNSDLSEGQLPAGPEGLDGMGTNMSNYSSSSLLSGAGKDSLVEHDEEFVQRQDSPRDNSERNLSLTDFVGDESPSPERLKNTGKRIPPTPMNSLVESSPSTEEPASLYTEDMTQKATDTGHMGPPQTHARCSSWWGGLEIDSKNIADAWSSSEQESVFQSPESWKEHKPSSIDRRASDSVFQPKSLEFTKSGPWESEFGQPELGSNDIQDKNEESLPFQNLPMEKSPLPNTSPQGTNHLIEDFASLWHSGRSPTAMPEPWGNPTDDGEPAAVAPFPAWSAFGKEDHDEALKNTWNLHPTSSKTPSVRDPNEWAMAKSGFAFSSSELLDNSPSEINNEAAPEIWGKKNNDSRDHIFAPGNPSSDLDHTWTNSKPPKEDQNGLVDPKTRGKVYEKVDSWNLFEENMKKGGSDVLVPWEDSFLSYKCSDYSASNLGEDSVPSPLDTNYSTSDSYTSPTFAGDEKETEHKPFAKEEGFESKDGNSTAEETDIPPQSLQQSSRNRISSGPGNLDMWASPHTDNSSEINTTHNLDENELKTEHTDGKNISMEDDVGESSQSSYDDPSMMQLYNETNRQLTLLHSSTNSRQTAPDSLDLWNRVILEDTQSTATISDMDNDLDWDDCSGGAAIPSDGQTEGYMAEGSEPETRFTVRQLEPWGLEYQEANQVDWELPASDEHTKDSAPSEHHTLNEKSGQLIANSIWDSVMRDKDMSSFMLPGSSHITDSEQRELPPEIPSHSANVKDTHSPDAPAASGTSESEALISHLDKQDTERETLQSDAASLATRLENPGYFPHPDPWKGHGDGQSESEKEAQGATDRGHLDEEEVIASGVENASGISEKGQSDQELSSLVASEHQEICIKSGKISSLAVTFSPQTEEPEEVLEYEEGSYNLDSRDVQTGMSADNLQPKDTHEKHLMSQRNSGETTETSDGMNFTKYVSVPEKDLEKTEECNFLEPENVGGGPPHRVPRSLDFGDVPIDSDVHVSSTCSEITKNLDVKGSENSLPGAGSSGNFDRDTISSEYTHSSASSPELNDSSVALSSWGQQPSSGYQEENQGNWSEQNHQESELITTDGQVEIVTKVKDLEKNRINEFEKSFDRKTPTFLEIWNDSVDGDSFSSLSSPETGKYSEHSGTHQESNLIASYQEKNEHDISATVQPEDARVISTSSGSDDDSVGGEESIEEEIQVANCHVAEDESRAWDSLNESNKFLVTADPKSENIYDYLDSSEPAENENKSNPFCDNQQSSPDPWTFSPLTETEMQITAVEKEKRSSPETGTTGDVAWQISPKASFPKNEDNSQLEMLGFSADSTEWWKASPQEGRLIESPFERELSDSSGVLEINSSVHQNASPWGVPVQGDIEPVETHYTNPFSDNHQSPFLEGNGKNSHEQLWNIQPRQPDPDADKFSQLVKLDQIKEKDSREQTFVSAAGDELTPETPTQEQCQDTMLPVCDHPDTAFTHAEENSCVTSNVSTNEGQETNQWEQEKSYLGEMTNSSIATENFPAVSSPTQLIMKPGSEWDGSTPSEDSRGTFVPDILHGNFQEGGQLASAAPDLWIDAKKPFSLKADGENPDILTHCEHDSNSQASDSPDICHDSEAKQETEKHLSACMGPEVESSELCLTEPEIDEEPIYEPGREFVPSNAELDSENATVLPPIGYQADIKGSSQPASHKGSPEPSEINGDNSTGLQVSEKGASPDMAPILEPVDRRIPRIENVATSIFVTHQEPTPEGDGSWISDSFSPESQPGARALFDGDPHLSTENPALVPDALLASDTCLDISEAAFDHSFSDASGLNTSTGTIDDMSKLTLSEGHPETPVDGDLGKQDICSSEASWGDFEYDVMGQNIDEDLLREPEHFLYGGDPPLEEDSLKQSLAPYTPPFDLSYLTEPAQSAETIEEAGSPEDESLGCRAAEIVLSALPDRRSEGNQAETKNRLPGSQLAVLHIREDPESVYLPVGAGSNILSPSNVDWEVETDNSDLPAGGDIGPPNGASKEISELEEEKTIPTKEPEQIKSEYKEERCTEKNEDRHALHMDYILVNREENSHSKPETCEERESIAELELYVGSKETGLQGTQLASFPDTCQPASLNERKGLSAEKMSSKSDTRSSFESPAQDQSWMFLGHSEVGDPSLDARDSGPGWSGKTVEPFSELGLGEGPQLQILEEMKPLESLALEEASGPVSQSQKSKSRGRAGPDAVTLQAVTHDNEWEMLSPQPVQKNMIPDTEMEEETEFLELGTRISRPNGLLSEDVGMDIPFEEGVLSPSAADMRPEPPNSLDLNDTHPRRIKLTAPNINLSLDQSEGSILSDDNLDSPDEIDINVDELDTPDEADSFEYTGHDPTANKDSGQESESIPEYTAEEEREDNRLWRTVVIGEQEQRIDMKVIEPYRRVISHGGYYGDGLNAIIVFAACFLPDSSRADYHYVMENLFLYVISTLELMVAEDYMIVYLNGATPRRRMPGLGWMKKCYQMIDRRLRKNLKSFIIVHPSWFIRTILAVTRPFISSKFSSKIKYVNSLSELSGLIPMDCIHIPESIIKLDEELREASEAAKTSCLYNDPEMSSMEKDIDLKLKEKP

SEQ ID NO: 1087 - DNA, 1264 bp, Homo sapiens
ggagggagcagtcggtcgctgcgccccggcgggccactttcccgggaccccgctcgtcttccttgggccgagattttccactgcgcccctccgagtacccgggttccaaacccctagccacgacatggaagaatttttgcaacgcgccaaatctaaactgaatcgaagcaaacgcttggagaaggtccatgtggttattgggcctaaatcgtgtgacttggattctctcatttctaccttcacatatgcttactttctagacaaggtcagtccaccaggggttctgtgtttaccagtgctgaacataccaagaactgaattcaactacttcaccgagacgaggtttattttagaagagctaaatatttccgaatcattccacatattccgggatgaaattaacctgcatcagctaaatgatgaagggaagttatcgataacacttgttggcagcagtgtgctggcgagtgaagacaaaactttagaatcagcagttgtcaaagtcattaatccggttgagcagagcgatgccaacgttgagttccgagagtcttcctcttctctcgtgctaaaggagattctccaagaggctcctgagctcatcaccgagcaactggctcatcgcctcagaggtagcattcttttcaagtggatgaccatggaatcagagaagatctcagagaagcaggaggaaattctttctatcctggaagaaaaatttcctaacttgcctccaagagaggacatcatcaacgtcctacaggagacccagttcagtgctcagggtttaagtattgaacagacaatgttgaaagatctaaaggagctgtcagatggagaaataaaagtggccattagtactgtgagcatgaaccttgaggtaagggtgggaatgcttttttagcattgattgatttcccacaattgcagtctgagcaactggaatgtaactctctccattggataagtccatgatagtcctttgcttctttgtgatacatttgacttggaatatagtggcaggttattatttgggtgaaaacactatgctaagtcaatgaaaaatgccaaacctggattctcaagatgaatgctctttcattcatctcagtaaaacaaagcctaaaacaaacactcagatgtgggtgtatatttaacctgtttaatagcaattatgatatgtgtgattaggttcacttccatattttctgtgtaccaccctgtattgttcatagaacttttcttaaaaaaaaaaaaaaaaaaa

SEQ ID NO: 1088 - protein, 259 aa, Homo sapiens
MEEFLQRAKSKLNRSKRLEKVHVVIGPKSCDLDSLISTFTYAYFLDKVSPPGVLCLPVLNIPRTEFNYFTETRFILEELNISESFHIFRDEINLHQLNDEGKLSITLVGSSVLASEDKTLESAVVKVINPVEQSDANVEFRESSSSLVLKEILQEAPELITEQLAHRLRGSILFKWMTMESEKISEKQEEILSILEEKFPNLPPREDIINVLQETQFSAQGLSIEQTMLKDLKELSDGEIKVAISTVSMNLEVRVGMLF

SEQ ID NO: 1089 - DNA, 7111 bp, Homo sapiens
gcgtcagccctcacgtcacttcgccagcagtagcagaggcggcggcggcggctcccggaattgggttggagcaggagcctcgctggctgcttcgctcgcgctctacgcgctcagtccccggcggtagcaggagcctggacccaggcgccgccggcgggcgtgaggcgccggagcccggcctcgaggtgcataccggacccccattcgcatctaacaaggaatctgcgccccagagagtcccgggagcgccgccggtcggtgcccggcgcgccgggccatgcagcgacggccgccgcggagctccgagcagcggtagcgcccccctgtaaagcggttcgctatgccggggccactgtgaaccctgccgcctgccggaacactcttcgctccggaccagctcagcctctgataagctggactcggcacgcccgcaacaagcaccgaggagttaagagagccgcaagcgcagggaaggcctccccgcacgggtgggggaaagcggccggtgcagcgcggggacaggcactcgggctggcactggctgctagggatgtcgtcctggataaggtggcatggacccgccatggcgcggctctggggcttctgctggctggttgtgggcttctggagggccgctttcgcctgtcccacgtcctgcaaatgcagtgcctctcggatctggtgcagcgacccttctcctggcatcgtggcatttccgagattggagcctaacagtgtagatcctgagaacatcaccgaaattttcatcgcaaaccagaaaaggttagaaatcatcaacgaagatgatgttgaagcttatgtgggactgagaaatctgacaattgtggattctggattaaaatttgtggctcataaagcatttctgaaaaacagcaacctgcagcacatcaattttacccgaaacaaactgacgagtttgtctaggaaacatttccgtcaccttgacttgtctgaactgatcctggtgggcaatccatttacatgctcctgtgacattatgtggatcaagactctccaagaggctaaatccagtccagacactcaggatttgtactgcctgaatgaaagcagcaagaatattcccctggcaaacctgcagatacccaattgtggtttgccatctgcaaatctggccgcacctaacctcactgtggaggaaggaaagtctatcacattatcctgtagtgtggcaggtgatccggttcctaatatgtattgggatgttggtaacctggtttccaaacatatgaatgaaacaagccacacacagggctccttaaggataactaacatttcatccgatgacagtgggaagcagatctcttgtgtggcggaaaatcttgtaggagaagatcaagattctgtcaacctcactgtgcattttgcaccaactatcacatttctcgaatctccaacctcagaccaccactggtgcattccattcactgtgaaaggcaaccccaaaccagcgcttcagtggttctataacggggcaatattgaatgagtccaaatacatctgtactaaaatacatgttaccaatcacacggagtaccacggctgcctccagctggataatcccactcacatgaacaatggggactacactctaatagccaagaatgagtatgggaaggatgagaaacagatttctgctcacttcatgggctggcctggaattgacgatggtgcaaacccaaattatcctgatgtaatttatgaagattatggaactgcagcgaatgacatcggggacaccacgaacagaagtaatgaaatcccttccacagacgtcactgataaaaccggtcgggaacatctctcggtctatgctgtggtggtgattgcgtctgtggtgggattttgccttttggtaatgctgtttctgcttaagttggcaagacactccaagtttggcatgaaaggttttgttttgtttcataagatcccactggatgggtagctgaaataaaggaaaagacagagaaaggggctgtggtgcttgttggttgatgctgccatgtaagctggactcctgggactgctgttggcttatcccgggaagtgctgcttatctggggttttctggtagatgtgggcggtgtttggaggctgtactatatgaagcctgcatatactgtgagctgtgattggggaacaccaatgcagaggtaactctcaggcagctaagcagcacctcaagaaaacatgttaaattaatgcttctcttcttacagtagttcaaatacaaaactgaaatgaaatcccattggattgtacttctcttctgaaaagtgtgctttttgaccctactggacatttattgacttaattgcttctgtttattaaaattgacctgcaaagttaaaaaaaaattaaagttgagaacaggtataagtgcacactgaatagtctaatctacatgtaacacatattttagtgtgattttctatactctaatcagcactgaattcagagggtttgactttttcatctataacacagtgactaaaagagttaagggtatatataccatcactttgggacttggtagtattattaaaaggttatttccttcactgtcaataaaagtccaaatgtttagcttaggtctgagagtcaaacaatgttaaggattgtcttaaagttccttagccagcaaaacaaaacaaaacaaaacaaacaaatgaaaaacgtttaaaaagaagaagaagaaaaaaaacaagaacaagcagcaacagctgttttgttggggctatagatttaagttaggcatagtcaatttcagaataactaagagtggaatatatgcatatggtgaaattataaccttgcccttttttatttgccctctgcgatccacctgctttttagaagtctgccgagtgagaaggccacagtatctcatgctgtttgcattacagaactgcagcttttctactctgaaaaggcctgggagcagaatggctggcctgctgtgagcaggagaggagattctaagaaggatagtcccccctacaacatactgtcatactgctgggttttcatgggtaggaaagcttgtcctgaccccagcagcaaagaggtggcaggtcgctaatgaatatatgctttataatgtccttcttcattgctgagagggcagccttagagctgtggatttctgcatcccccctgagtctgacccatggacacctgtttcattcactttagcatcacagtgacctttgtatgctctgttcagtctgtgtcaggcagtatgcttgtcctgaagagaggtttggctatccccaccccaccccaccccaccctgttccttttttatcaggaggacttcagagccaggcctgcagcattttgtttgaaaacacaatcagctctgacagttagacatgcacacagacgccatagctggattggaaacattgatgttttaaaaatttattttttttggaaatagttgcacaaatgctgcaatttagctttaaggttctatagatttttaactagtccaacacagtcagaaacattgttttgaatcctctgtaaaccaaggcattaatcttaataaaccaggatccatttaggtaccacttgatataaaaaggatatccataatgaatattttatactgcatcctttacattagccactaaatacgttattgcttgatgaagacctttcacagaatcctatggattgcagcatttcacttggctacttcatacccatgccttaaagaggggcagtttctcaaaagcagaaacatgccgccagttctcaagttttcctcctaactccatttgaatgtaagggcagctggcccccaatgtggggaggtccgaacattttctgaattcccattttcttgttcgcggctaaatgacagtttctgtcattacttagattccgatctttcccaaaggtgttgatttacaaagaggccagctaatagcagaaatcatgaccctgaaagagagatgaaattcaagctgtgagccaggcaggagctcagtatggcaaaggttcttgagaatcagccatttggtacaaaaaagatttttaaagcttttatgttataccatggagccatagaaaggctatggattgtttaagaactattttaaagtgttccagacccaaaaaggaaaaataaaaaaaaaggaatatttgtacccaacagctagaaggattgcaaggtagatttttgttttaaaatggagagaagtggacagataaggccatttaatatatcaaagatcagttgacatctcctagggaatgatgaaaacagcaggctattagaaaattatttcatatagttctcgtgttcttttcttttttttaatccctgaagggatgatcagtaacatagcttctcttttctgtactctagaccaccccttttcatcattttgctttttatgtctcccataagaaatgtgctttttagagcttcctaatgcatgtgttgcattattgcagcattagaaaaggagaggtagcatttttgctgaaatcgggcctgtcactctccaataaaggttctggcacttcaatgccaggcaggtctcctaaatgaacagaatgatctgtgtgagccgatgcctgcccttccagaggggccactgtccccagccgcagccaactgtgtcccacaggaatgggagcctaggtttccaaatcttgtgattctttaggagaaacatgaaacctggatttcgtgtgaaatgtcccgattgttaaaaagttggctcaattatttttaaaacattttgtaagccaacaaaagtctgtgggctgccagtttattacttttgtcttaaaacatgatcattgttctctcacggtatccttctgtcttcccgttgcaaattcacttttctttcttcctgacattgccattgagggctttgttaccacaagctaagaaactgagtttaacagcccagttatctgcaacatgtcaattacctttgctcctctcctgtgattcccaccatgctgtgaccctcagctgtctccctttgctgggaattctgcaccaatgtctcccctcaacccattccctggttggtcctactcccgtgtggccagagacatcctagcaaatccttcctcctattatatctgacactaatttcttttcaacagcgctcatgtctcttggcccagtcaggtgctgccaggtttagataggaaagtacatgtcccattttcatgggtgcccttaatgtggtccacgtcctatatcttattatatttactcatggctcaatgggggcctccagagaccctctcaggctgctgagctagactaaggaatgcatccaccgtcatcacatgagacactgactctgtgacgacaaaagtacaaacagtctgaggctaagaaaggttcatctcacaacaggaaaaacaaatctcaacacacattagagataattgattcaggggttttctctcccagtctcccagcagggactgatttcatttctgacccactaggttttctttccagaaataggtagcaaggacaagaactaaacaatcccagccccacccagcaacacagaacacaggagtttgcttttggcttctcactctccaagtaaccctgaattaggcccagaatggctgaggcttggagcatctcctcagacagagcagaggcgacacctcttcaggggtgtgtggagtaaatagctcgaagagctgaagacagaaaaccagtttcacgccaggtgcgagagagagcataatggagggaagcccgctttctctctcctcttcttttctctttatttctttagagcacttgacttttttttctctctctctctagtattctaaactgaccccatgaccaactgagaatttatttttgtttcattggttgtttcacagaattagaacacacacgactttttattcctccattgcaaaatggaatcaagatactacacaagacctgtgctttcttcctttgcatgatttacacctccgcctgttttggtgctagctgtctagaacttctctcttggtttgaatctgattccttcacactacactagaagtttatttcatcttgttttgtctagactccagatacagagggacagctggactgaggacaagcaattccatctagcatagggtctctcagggttggtgcatccagccacatgggcagggccagtcacatctagtctatgtccccagagcccttggagttgcgcagcttagctgacttgactccaaggaaattagtacagaagtaaccactctattaagtgtgttctgctatgttcacatgcctgtagtacctgcaaaccatgccaggttcatctaaagacataggggaagattaaggactcttttggacagaccatgaattgaatttgctgccaggtgctgccagactgaatttggctgacagaactcccagcccaggaaagttccatgacaatgactgtcgcagaaggaaatttcccactaaagtcagtccattttcaagttttggtcttcagagacaaaagaacgtcccagccacctgattttgatggtgaggtaactctaagttgaattcaggctagtgttgcagtatagctttggcatgttcatgagtgagcacccagaatgtgttgaaccaacccccacccctaactactgactatgactgcagtgggtttttatggggaaaaaaagtgtgaaaagcaaaaagaaaggaacagagattttttatcacctttattgtaagacagtccatttatgaattgagtataaacacatacaaagtaacaagagattcctaagaaacgcaaatccttgagtttcacgcacttcatgttcaaccatttgctgtaatccagaggcagcctgtgaatcattctcatgccctgttttttttttttttttcctataatgttctgggtttaaaagccatcttttccacattttctgtaaataatggataatcattttaaaaatttttatttttagtgctgttttaacaatgtagatagatcataaatgtacttgctgaattcaatcatttttaacaagccaataaagtttgataattcatctc

SEQ ID NO: 1090 - protein, 477 aa, Homo sapiens
MSSWIRWHGPAMARLWGFCWLVVGFWRAAFACPTSCKCSASRIWCSDPSPGIVAFPRLEPNSVDPENITEIFIANQKRLEIINEDDVEAYVGLRNLTIVDSGLKFVAHKAFLKNSNLQHINFTRNKLTSLSRKHFRHLDLSELILVGNPFTCSCDIMWIKTLQEAKSSPDTQDLYCLNESSKNIPLANLQIPNCGLPSANLAAPNLTVEEGKSITLSCSVAGDPVPNMYWDVGNLVSKHMNETSHTQGSLRITNISSDDSGKQISCVAENLVGEDQDSVNLTVHFAPTITFLESPTSDHHWCIPFTVKGNPKPALQWFYNGAILNESKYICTKIHVTNHTEYHGCLQLDNPTHMNNGDYTLIAKNEYGKDEKQISAHFMGWPGIDDGANPNYPDVIYEDYGTAANDIGDTTNRSNEIPSTDVTDKTGREHLSVYAVVVIASVVGFCLLVMLFLLKLARHSKFGMKGFVLFHKIPLDG

SEQ ID NO: 1091 - DNA, 5560 bp, Homo sapiens
aagacggattctcagacaaggcttgcaaatgccccgcagccatcatttaactgcacccgcagaatagttacggtttgtcacccgaccctcccggatcgcctaatttgtccctagtgagaccccgaggctctgcccgcgcctggcttcttcgtagctggatgcatatcgtgctccgggcagcgcgggcgcagggcacgcgttcgcgcacaccctagcacacatgaacacgcgcaagagctgaaccaagcacggtttccatttcaaaaagggagacagcctctaccgcgattgtagaagagactgtggtgtgaattagggaccgggaggcgtcgaacggaggaacggttcatcttagagactaattttctggagtttctgcccctgctctgcgtcagccctcacgtcacttcgccagcagtagcagaggcggcggcggcggctcccggaattgggttggagcaggagcctcgctggctgcttcgctcgcgctctacgcgctcagtccccggcggtagcaggagcctggacccaggcgccgccggcgggcgtgaggcgccggagcccggcctcgaggtgcataccggacccccattcgcatctaacaaggaatctgcgccccagagagtcccgggagcgccgccggtcggtgcccggcgcgccgggccatgcagcgacggccgccgcggagctccgagcagcggtagcgcccccctgtaaagcggttcgctatgccggggccactgtgaaccctgccgcctgccggaacactcttcgctccggaccagctcagcctctgataagctggactcggcacgcccgcaacaagcaccgaggagttaagagagccgcaagcgcagggaaggcctccccgcacgggtgggggaaagcggccggtgcagcgcggggacaggcactcgggctggcactggctgctagggatgtcgtcctggataaggtggcatggacccgccatggcgcggctctggggcttctgctggctggttgtgggcttctggagggccgctttcgcctgtcccacgtcctgcaaatgcagtgcctctcggatctggtgcagcgacccttctcctggcatcgtggcatttccgagattggagcctaacagtgtagatcctgagaacatcaccgaaattttcatcgcaaaccagaaaaggttagaaatcatcaacgaagatgatgttgaagcttatgtgggactgagaaatctgacaattgtggattctggattaaaatttgtggctcataaagcatttctgaaaaacagcaacctgcagcacatcaattttacccgaaacaaactgacgagtttgtctaggaaacatttccgtcaccttgacttgtctgaactgatcctggtgggcaatccatttacatgctcctgtgacattatgtggatcaagactctccaagaggctaaatccagtccagacactcaggatttgtactgcctgaatgaaagcagcaagaatattcccctggcaaacctgcagatacccaattgtggtttgccatctgcaaatctggccgcacctaacctcactgtggaggaaggaaagtctatcacattatcctgtagtgtggcaggtgatccggttcctaatatgtattgggatgttggtaacctggtttccaaacatatgaatgaaacaagccacacacagggctccttaaggataactaacatttcatccgatgacagtgggaagcagatctcttgtgtggcggaaaatcttgtaggagaagatcaagattctgtcaacctcactgtgcattttgcaccaactatcacatttctcgaatctccaacctcagaccaccactggtgcattccattcactgtgaaaggcaaccccaaaccagcgcttcagtggttctataacggggcaatattgaatgagtccaaatacatctgtactaaaatacatgttaccaatcacacggagtaccacggctgcctccagctggataatcccactcacatgaacaatggggactacactctaatagccaagaatgagtatgggaaggatgagaaacagatttctgctcacttcatgggctggcctggaattgacgatggtgcaaacccaaattatcctgatgtaatttatgaagattatggaactgcagcgaatgacatcggggacaccacgaacagaagtaatgaaatcccttccacagacgtcactgataaaaccggtcgggaacatctctcggtctatgctgtggtggtgattgcgtctgtggtgggattttgccttttggtaatgctgtttctgcttaagttggcaagacactccaagtttggcatgaaaggcccagcctccgttatcagcaatgatgatgactctgccagcccactccatcacatctccaatgggagtaacactccatcttcttcggaaggtggcccagatgctgtcattattggaatgaccaagatccctgtcattgaaaatccccagtactttggcatcaccaacagtcagctcaagccagacacatttgttcagcacatcaagcgacataacattgttctgaaaagggagctaggcgaaggagcctttggaaaagtgttcctagctgaatgctataacctctgtcctgagcaggacaagatcttggtggcagtgaagaccctgaaggatgccagtgacaatgcacgcaaggacttccaccgtgaggccgagctcctgaccaacctccagcatgagcacatcgtcaagttctatggcgtctgcgtggagggcgaccccctcatcatggtctttgagtacatgaagcatggggacctcaacaagttcctcagggcacacggccctgatgccgtgctgatggctgagggcaacccgcccacggaactgacgcagtcgcagatgctgcatatagcccagcagatcgccgcgggcatggtctacctggcgtcccagcacttcgtgcaccgcgatttggccaccaggaactgcctggtcggggagaacttgctggtgaaaatcggggactttgggatgtcccgggacgtgtacagcactgactactacagggtcggtggccacacaatgctgcccattcgctggatgcctccagagagcatcatgtacaggaaattcacgacggaaagcgacgtctggagcctgggggtcgtgttgtgggagattttcacctatggcaaacagccctggtaccagctgtcaaacaatgaggtgatagagtgtatcactcagggccgagtcctgcagcgaccccgcacgtgcccccaggaggtgtatgagctgatgctggggtgctggcagcgagagccccacatgaggaagaacatcaagggcatccataccctccttcagaacttggccaaggcatctccggtctacctggacattctaggctagggcccttttccccagaccgatccttcccaacgtactcctcagacgggctgagaggatgaacatcttttaactgccgctggaggccaccaagctgctctccttcactctgacagtattaacatcaaagactccgagaagctctcgagggaagcagtgtgtacttcttcatccatagacacagtattgacttctttttggcattatctctttctctctttccatctcccttggttgttcctttttctttttttaaattttctttttcttttttttttcgtcttccctgcttcacgattcttaccctttcttttgaatcaatctggcttctgcattactattaactctgcatagacaaaggccttaacaaacgtaatttgttatatcagcagacactccagtttgcccaccacaactaacaatgccttgttgtattcctgcctttgatgtggatgaaaaaaagggaaaacaaatatttcacttaaactttgtcacttctgctgtacagatatcgagagtttctatggattcacttctatttatttattattattactgttcttattgtttttggatggcttaagcctgtgtataaaaaagaaaacttgtgttcaatctgtgaagcctttatctatgggagattaaaaccagagagaaagaagatttattatgaaccgcaatatgggaggaacaaagacaaccactgggatcagctggtgtcagtccctacttaggaaatactcagcaactgttagctgggaagaatgtattcggcaccttcccctgaggacctttctgaggagtaaaaagactactggcctctgtgccatggatgattcttttcccatcaccagaaatgatagcgtgcagtagagagcaaagatggcttccgtgagacacaagatggcgcatagtgtgctcggacacagttttgtcttcgtaggttgtgatgatagcactggtttgtttctcaagcgctatccacagaacctttgtcaacttcagttgaaaagaggtggattcatgtccagagctcatttcggggtcaggtgggaaagccaagaacttggaaaagataagacaagctataaattcggaggcaagtttcttttacaatgaacttttcagatctcacttccctccgacccctaacttccatgcccacccgtccttttaactgtgcaagcaaaattgtgcatggtcttcgtcgattaataccttgtgtgcagacactactgctccagacgtcgtttccctgataggtagagcagatccataaaaaggtatgacttatacaattaggggaagctaatggagtttattagctgagtatcaatgtctctgcgttgtacggtggtgatgggttttaatgaatatggaccctgaagcctggaaatcctcatccacgtcgaacccacaggactgtgggaagggcagaatcaatccctaagggaaaggaaacctcaccctgagggcatcacatgcactcatgttcagtgtacacaggtcaagtcccttgctctgggctctagttgggagagtggtttcattccaagtgtactccattgtcagtatgctgtttttgtttccttcactccattcaaaaagtcaaaatacaaaatttggcacagcatgccaacgggaggctgtgcccagaccaagcactggaagtgtgcttctaggcatagtcattggttttgcaaaaagagggctcaaatttaaatagaaatttacagctatttgaatggtcagatataccaagaaagaaaaatatttctgttcctcaagaaaacttgctaccctctgtgaggggaattttgctaaacttgacatctttataacatgagccagattgaaagggagtgattttcattcatcttaggtcatgttatttcatatttgtttctgaaggtgcgatagctctgttttaggttttgcttgcgcctgttaattactggaacaccttatttttcattaaaggctttgaaagccaattctcaaaaattcaaaagtgcaaattaacagaacaaaaggaaatccagtagcaactgcagtcaagcgagggagttgacaagataaaccttacgtccattcaagttatatgctggcctatgagagatgagagttgggtcgtttgttctctttgttgatgattt

SEQ ID NO: 1092 - protein, 822 aa, Homo sapiens
MSSWIRWHGPAMARLWGFCWLVVGFWRAAFACPTSCKCSASRIWCSDPSPGIVAFPRLEPNSVDPENITEIFIANQKRLEIINEDDVEAYVGLRNLTIVDSGLKFVAHKAFLKNSNLQHINFTRNKLTSLSRKHFRHLDLSELILVGNPFTCSCDIMWIKTLQEAKSSPDTQDLYCLNESSKNIPLANLQIPNCGLPSANLAAPNLTVEEGKSITLSCSVAGDPVPNMYWDVGNLVSKHMNETSHTQGSLRITNISSDDSGKQISCVAENLVGEDQDSVNLTVHFAPTITFLESPTSDHHWCIPFTVKGNPKPALQWFYNGAILNESKYICTKIHVTNHTEYHGCLQLDNPTHMNNGDYTLIAKNEYGKDEKQISAHFMGWPGIDDGANPNYPDVIYEDYGTAANDIGDTTNRSNEIPSTDVTDKTGREHLSVYAVVVIASVVGFCLLVMLFLLKLARHSKFGMKGPASVISNDDDSASPLHHISNGSNTPSSSEGGPDAVIIGMTKIPVIENPQYFGITNSQLKPDTFVQHIKRHNIVLKRELGEGAFGKVFLAECYNLCPEQDKILVAVKTLKDASDNARKDFHREAELLTNLQHEHIVKFYGVCVEGDPLIMVFEYMKHGDLNKFLRAHGPDAVLMAEGNPPTELTQSQMLHIAQQIAAGMVYLASQHFVHRDLATRNCLVGENLLVKIGDFGMSRDVYSTDYYRVGGHTMLPIRWMPPESIMYRKFTTESDVWSLGVVLWEIFTYGKQPWYQLSNNEVIECITQGRVLQRPRTCPQEVYELMLGCWQREPHMRKNIKGIHTLLQNLAKASPVYLDILG

SEQ ID NO: 1093 - DNA, 8696 bp, Homo sapiens
aagacggattctcagacaaggcttgcaaatgccccgcagccatcatttaactgcacccgcagaatagttacggtttgtcacccgaccctcccggatcgcctaatttgtccctagtgagaccccgaggctctgcccgcgcctggcttcttcgtagctggatgcatatcgtgctccgggcagcgcgggcgcagggcacgcgttcgcgcacaccctagcacacatgaacacgcgcaagagctgaaccaagcacggtttccatttcaaaaagggagacagcctctaccgcgattgtagaagagactgtggtgtgaattagggaccgggaggcgtcgaacggaggaacggttcatcttagagactaattttctggagtttctgcccctgctctgcgtcagccctcacgtcacttcgccagcagtagcagaggcggcggcggcggctcccggaattgggttggagcaggagcctcgctggctgcttcgctcgcgctctacgcgctcagtccccggcggtagcaggagcctggacccaggcgccgccggcgggcgtgaggcgccggagcccggcctcgaggtgcataccggacccccattcgcatctaacaaggaatctgcgccccagagagtcccgggagcgccgccggtcggtgcccggcgcgccgggccatgcagcgacggccgccgcggagctccgagcagcggtagcgcccccctgtaaagcggttcgctatgccggggccactgtgaaccctgccgcctgccggaacactcttcgctccggaccagctcagcctctgataagctggactcggcacgcccgcaacaagcaccgaggagttaagagagccgcaagcgcagggaaggcctccccgcacgggtgggggaaagcggccggtgcagcgcggggacaggcactcgggctggcactggctgctagggatgtcgtcctggataaggtggcatggacccgccatggcgcggctctggggcttctgctggctggttgtgggcttctggagggccgctttcgcctgtcccacgtcctgcaaatgcagtgcctctcggatctggtgcagcgacccttctcctggcatcgtggcatttccgagattggagcctaacagtgtagatcctgagaacatcaccgaaattttcatcgcaaaccagaaaaggttagaaatcatcaacgaagatgatgttgaagcttatgtgggactgagaaatctgacaattgtggattctggattaaaatttgtggctcataaagcatttctgaaaaacagcaacctgcagcacatcaattttacccgaaacaaactgacgagtttgtctaggaaacatttccgtcaccttgacttgtctgaactgatcctggtgggcaatccatttacatgctcctgtgacattatgtggatcaagactctccaagaggctaaatccagtccagacactcaggatttgtactgcctgaatgaaagcagcaagaatattcccctggcaaacctgcagatacccaattgtggtttgccatctgcaaatctggccgcacctaacctcactgtggaggaaggaaagtctatcacattatcctgtagtgtggcaggtgatccggttcctaatatgtattgggatgttggtaacctggtttccaaacatatgaatgaaacaagccacacacagggctccttaaggataactaacatttcatccgatgacagtgggaagcagatctcttgtgtggcggaaaatcttgtaggagaagatcaagattctgtcaacctcactgtgcattttgcaccaactatcacatttctcgaatctccaacctcagaccaccactggtgcattccattcactgtgaaaggcaaccccaaaccagcgcttcagtggttctataacggggcaatattgaatgagtccaaatacatctgtactaaaatacatgttaccaatcacacggagtaccacggctgcctccagctggataatcccactcacatgaacaatggggactacactctaatagccaagaatgagtatgggaaggatgagaaacagatttctgctcacttcatgggctggcctggaattgacgatggtgcaaacccaaattatcctgatgtaatttatgaagattatggaactgcagcgaatgacatcggggacaccacgaacagaagtaatgaaatcccttccacagacgtcactgataaaaccggtcgggaacatctctcggtctatgctgtggtggtgattgcgtctgtggtgggattttgccttttggtaatgctgtttctgcttaagttggcaagacactccaagtttggcatgaaagatttctcatggtttggatttgggaaagtaaaatcaagacaaggtgttggcccagcctccgttatcagcaatgatgatgactctgccagcccactccatcacatctccaatgggagtaacactccatcttcttcggaaggtggcccagatgctgtcattattggaatgaccaagatccctgtcattgaaaatccccagtactttggcatcaccaacagtcagctcaagccagacacatggcccagaggttcccccaagaccgcctgataataatttggtatttggaggctcctgtgtcactgcaggaactaaaggaggctaaatccatgcctgatggaggagaagagttctatggttatctgcaaattctggccagacaacatcttgacgtcactccttagcttccataacctagccaagcaagaagttgcctttccaagacaaagcagtgtgctctaatgactaacccctcaaagtactatgccactttaactatagacccatctcctcgatcaatcaggatggcaagatggagctgaggagctcagcaacatcaagtctggagttggtctttaactcaactagctcgtttagacgtgtctgaacaccacatcacctgacagcacggggtggtttcccagtaaaatttacaaactcagctcaagggcagctgtgttgctttcctttccttgactgctgagaaactttttgacagggaacaatggaaacacaccttctgagctgaaacaaacaaacagaaacaaaacatactaaccagcaaaatccccaaatcatcaatcttgggttctcttgaagggcaggagtgtgttttatcttctcccgtcggagcaaacactatagatgtcctccctaaaattctgtcttccctagagcagccttgtaaattagctagggtcctagggttgaggcctaaatcaacttaaaattgtctctaaatatgtacctggatgtgtttgtacttgcagagcatgccctcttcatgtgcctagggctagtaactccctgtggcagaggcatgtaaagtattctgactttttttttttcaacttaattccatttccaatgaaatggatttttaaaaattttctccagagtgtgccatacttctccagctattatagttaatgtgtgtgtatccttgtgtatatgtgtgtttgtgtgtgcatatgtgttttcctagtggttacatgcttactaggcaattatgtaaataagcacagattcataggccagctaggcctgaggaaagaagacattataaagggagggagtattttaacattagctaaagctatcacacaaggcacccattctgctcccctcaacagccacagcccacttcgtccttgtcttaccaataaggggaaaggctggaggtgatatttttcacagaaccgcagaggttttgaacatatttgcaacattactttgagtacacatgagcaaaaattctgaattacatccaggaccccagaagctcattagatcaaagagtgcggggcccctcagagttaccagagattatctgcagacttcagtgcaatcgaatgaccatggtccattttgatggtcagaggtaggactgaaaaacgggtagaaacaattgctttagcgcttccttctgtactttgcctattaatgttttgtctttcaaaaatatattttctcctaattgtttaattggccaaataatggctgctttgggagttgtttgtatgccttggaaggccatggcctgcactttaaaaataagctaagtccattctgcccagcacgagcattaggacagagaatgcacttattttaggatccttaaaaattgcttcttttatggcacactgggttgacgactcatctcgtgggagccttcatggcacattgctgctgttctgcaggtcccaatacaattccttccccctctcagtgccacggcccccccattgctagctacacaatttgatatcatattcccttttcaactccaaaggagatgataagaagctatcaaataatgctttaaaaaagcaacttgagtttcttaaaagaaaggaaatgaatacatgctgcataattacatttaaaatgtaagccatgttattataagccgcactgagatgaagatttgttagcaaaccagtttcaagcacactcacagtgaagtaaaatcatgtttttagcatctgaccattgggtaatattattctttgttatcaaaagagaaatatcacccaagtatagtatacttagacctcctagaggaaacactccagtcctaagcttggtgtctgaaaagaaaaacaaaaataaagattatggatttaggtcagggagacagagtgatattctgaagactgtgtttactccctcatcatcggccaaccaagatggagttctgcatcctgcacatatcagacatttcagtccaatttcaccaaagcatcagtgatgttctagaagcatcccagcagatggaggatcctaatgtatttgttctgggtatttcccaaggcccagcctgactggagtgtgtgtaccaacaggatgaatccaatcaagctacgcccccattttggtttcggattggccactcttgcatgtgctagtagattgtggaccaggaccagctgagcaaacacagttgcagagtagcctcctatgttgctaagaagctcctgctacccaggtgctttgaacaattgagtgctccctctggttaagtagagatggcaccaccggagtttttcttggatgtgaggctcaatcctttacggcagctattataacaaagtgaaggttttctccctgggaaatgcagcttttctctgtctttactaattctgccagcctgtgagagtaaccaccgtagctgggcttcttctcagattaattgtcatgccaggtctccttcctggggagctgtgatgctgctctgaggttgattgctgaggttgtagtgggtttttgtttgtttttgtttagtttttcttgattgttcttctttctcttgaatggcaagagaagaaacactttctctaacccacggccaggaaggaaatggggagagagctacttcttagttcaacctggttgccacataaaggaatctctctccttggactcagcccctaactggaagcaagagccactgccctctgagactgagagagcagcccgaggaggagatgaatccattctgccctttgtttgggtttgcttcctgtcagtgagagaatgctgaggcagttcctgttatgtgaaactttcatttttaaaaccaggacagtcctaaacagactggaatgagttggtcaatcccagttggtataggcccaatgatttttgctagtaagataggattgtcttcctcacccaaaatgccttcaagtgccctaaaatgggtattttaaaataagaataaataatgtagatttagtagaaaacctggaaaacataagaaacaaagatgaaacgaaaagtcccatgtaattccaccagttagagttaaccactgatatcgtttggatatatggctttctagtcttgtggatatccttttaatctcttgtaatataaagtctgaccatatgtgtccttgcatttgtttgtactggactctgttaatatttctatagtaatggctcactttggggagattgtgctgcacagtgtgtaggaagcacattgggtgtattattcccagttttgtattttgtatttccttggagatgtgcaggggttaagagcgggggtctggccatagctggccacgtcagactctcatatggtaagtatcacagagcacatgaggcctgtgttatgcgctggaaagactcaggaaatgagaggctctcttgttctgacaaggcaggctgagagctctcatttagggtcatcactccagataactccaaatgcagtttattgctcaactgaagcagatgatcactttttgcctccaagttcttcaccctagctagctcctttcaaagagccgagtatgctggatcttaaagggccaaactagttacatctcatacatttcctgatgtttagggatgccttcacttccatcaaggataccttggctgtgcaaggacctctgatagctggagtctccttttggtcactcccagctttgcttaaacttgatggagtttgctgtccagtgatccccggatctttcatcatgaaagccttccttcctctcctgatgtctcaggcctctagacctagactggggttctggcaaggaggcctctatcaatagtatgacatccaataatatgttagtgttgatattttgcacagtaatattaagtttaagagattataaaaatgagttcaaatgaataagttcctgtgatgtaagagattagatatgtgtgatttcagaaccaaagccaggggggaatcccagaaagaaaacaataatataatcctagtttctatatattatttttattcattactgtatatgggtagagatcaatattctttcttatgctgttactattaattaacacattttttaaccatgccattgaacttttgggtgcattaaagtggaacccaagctcctcattagataataatggcatttggactgagtgccatattcctaaatttccaataaagtggttgatatagagaggacaggataaagccctatagtgtgcagttatatcaaaacagctagtctccactttagggaatgcctttactagagattacatgaaatgtctgcttataaaataagcagagatggcaccactaagcagccacctgaattgttttcctacaggaatgattacttttcagatccatttatgttttcatgctcaatacttactccccttccctgcaacacccaaagagtttacttttgcaagtcatttggtcttcagtctactactgaggaatagagaggcactaactgctttacccaggatcagaactcatgttcttaccttctattaatagagtacttgagccagatggactaactggtctcacattttctctatcttggttttacttccataaacatcaatatctttacccacatgatttttccatcctcccatttttttccatatgtattagggttcaggaactatgatgctaatgatcacatttcttcctagttcctaatttcattagtgccatttcctgatatctacagaaacaattatcaatacatgtagctgcttgagccttatttagaaggctagcctttcttttccaagtgctgtcagaatgtatacatttagtctgtctttttcccttttaggagtctttgttctgggttgatggcaaaattcctctttttacatgtgagatttttgatttcactgaattctacctagatttttatggacattggattttaaagaggaaaacactcattttcttagtaagatattggtgatacatagctatgccattgatttccatactcctgagctttggggagggagacagtggccaagtagcaggcagaataagatcatcactcatgtcctgaatcaatcacactttccttctcggattgtgtatatgctctgccacttcctacatattacatcctgagtttttaagtaaagtggatcttagccagatttgagtctaatggctgattcatcggcatagttcttggcgttaacatctcagtgtcctctttagttctctttgaggattcatgtcattgagggcctttgtgcctccacttgtctcagtatgaggaagaactttggtgtgagggcggagctatgtgaagggttgctgggttgggggattagttcatatggtccccatgccatctatttacttttggagagaggggactttgagtgggtgggtatggatagatgttcctcaaggaaaccctgctggctaatgggcactacatctgtgtattactgtgattctctctgtaagctccccatgtggccaaggacccccctcctaccagggcacttcctgccacctcattgcactggtctcaaccattcagcctgctgctgctgcaccatgttgggctgcggtaggatagggaaggggttctgttgattgctaaatgttgcctaactttatttccctctcccacatttcatgcaagggagcggacctaacacatgacttgcattctcttcctatgttcagaaactccagggcttgcccacgtgtatgtatgagtgaccaatggagcttggaattctttatctatatgatctgtccgaaaatgagatcttttgtactggaatttgtgatgtagttgatcattcagagccaaacgcatataccaataaagacaagactgtcatataaaaaaaaaaaaaaaaa

SEQ ID NO: 1094 - protein, 553 aa, Homo sapiens
MSSWIRWHGPAMARLWGFCWLVVGFWRAAFACPTSCKCSASRIWCSDPSPGIVAFPRLEPNSVDPENITEIFIANQKRLEIINEDDVEAYVGLRNLTIVDSGLKFVAHKAFLKNSNLQHINFTRNKLTSLSRKHFRHLDLSELILVGNPFTCSCDIMWIKTLQEAKSSPDTQDLYCLNESSKNIPLANLQIPNCGLPSANLAAPNLTVEEGKSITLSCSVAGDPVPNMYWDVGNLVSKHMNETSHTQGSLRITNISSDDSGKQISCVAENLVGEDQDSVNLTVHFAPTITFLESPTSDHHWCIPFTVKGNPKPALQWFYNGAILNESKYICTKIHVTNHTEYHGCLQLDNPTHMNNGDYTLIAKNEYGKDEKQISAHFMGWPGIDDGANPNYPDVIYEDYGTAANDIGDTTNRSNEIPSTDVTDKTGREHLSVYAVVVIASVVGFCLLVMLFLLKLARHSKFGMKDFSWFGFGKVKSRQGVGPASVISNDDDSASPLHHISNGSNTPSSSEGGPDAVIIGMTKIPVIENPQYFGITNSQLKPDTWPRGSPKTA

SEQ ID NO: 1095 - DNA, 8648 bp, Homo sapiens
aagacggattctcagacaaggcttgcaaatgccccgcagccatcatttaactgcacccgcagaatagttacggtttgtcacccgaccctcccggatcgcctaatttgtccctagtgagaccccgaggctctgcccgcgcctggcttcttcgtagctggatgcatatcgtgctccgggcagcgcgggcgcagggcacgcgttcgcgcacaccctagcacacatgaacacgcgcaagagctgaaccaagcacggtttccatttcaaaaagggagacagcctctaccgcgattgtagaagagactgtggtgtgaattagggaccgggaggcgtcgaacggaggaacggttcatcttagagactaattttctggagtttctgcccctgctctgcgtcagccctcacgtcacttcgccagcagtagcagaggcggcggcggcggctcccggaattgggttggagcaggagcctcgctggctgcttcgctcgcgctctacgcgctcagtccccggcggtagcaggagcctggacccaggcgccgccggcgggcgtgaggcgccggagcccggcctcgaggtgcataccggacccccattcgcatctaacaaggaatctgcgccccagagagtcccgggagcgccgccggtcggtgcccggcgcgccgggccatgcagcgacggccgccgcggagctccgagcagcggtagcgcccccctgtaaagcggttcgctatgccggggccactgtgaaccctgccgcctgccggaacactcttcgctccggaccagctcagcctctgataagctggactcggcacgcccgcaacaagcaccgaggagttaagagagccgcaagcgcagggaaggcctccccgcacgggtgggggaaagcggccggtgcagcgcggggacaggcactcgggctggcactggctgctagggatgtcgtcctggataaggtggcatggacccgccatggcgcggctctggggcttctgctggctggttgtgggcttctggagggccgctttcgcctgtcccacgtcctgcaaatgcagtgcctctcggatctggtgcagcgacccttctcctggcatcgtggcatttccgagattggagcctaacagtgtagatcctgagaacatcaccgaaattttcatcgcaaaccagaaaaggttagaaatcatcaacgaagatgatgttgaagcttatgtgggactgagaaatctgacaattgtggattctggattaaaatttgtggctcataaagcatttctgaaaaacagcaacctgcagcacatcaattttacccgaaacaaactgacgagtttgtctaggaaacatttccgtcaccttgacttgtctgaactgatcctggtgggcaatccatttacatgctcctgtgacattatgtggatcaagactctccaagaggctaaatccagtccagacactcaggatttgtactgcctgaatgaaagcagcaagaatattcccctggcaaacctgcagatacccaattgtggtttgccatctgcaaatctggccgcacctaacctcactgtggaggaaggaaagtctatcacattatcctgtagtgtggcaggtgatccggttcctaatatgtattgggatgttggtaacctggtttccaaacatatgaatgaaacaagccacacacagggctccttaaggataactaacatttcatccgatgacagtgggaagcagatctcttgtgtggcggaaaatcttgtaggagaagatcaagattctgtcaacctcactgtgcattttgcaccaactatcacatttctcgaatctccaacctcagaccaccactggtgcattccattcactgtgaaaggcaaccccaaaccagcgcttcagtggttctataacggggcaatattgaatgagtccaaatacatctgtactaaaatacatgttaccaatcacacggagtaccacggctgcctccagctggataatcccactcacatgaacaatggggactacactctaatagccaagaatgagtatgggaaggatgagaaacagatttctgctcacttcatgggctggcctggaattgacgatggtgcaaacccaaattatcctgatgtaatttatgaagattatggaactgcagcgaatgacatcggggacaccacgaacagaagtaatgaaatcccttccacagacgtcactgataaaaccggtcgggaacatctctcggtctatgctgtggtggtgattgcgtctgtggtgggattttgccttttggtaatgctgtttctgcttaagttggcaagacactccaagtttggcatgaaaggcccagcctccgttatcagcaatgatgatgactctgccagcccactccatcacatctccaatgggagtaacactccatcttcttcggaaggtggcccagatgctgtcattattggaatgaccaagatccctgtcattgaaaatccccagtactttggcatcaccaacagtcagctcaagccagacacatggcccagaggttcccccaagaccgcctgataataatttggtatttggaggctcctgtgtcactgcaggaactaaaggaggctaaatccatgcctgatggaggagaagagttctatggttatctgcaaattctggccagacaacatcttgacgtcactccttagcttccataacctagccaagcaagaagttgcctttccaagacaaagcagtgtgctctaatgactaacccctcaaagtactatgccactttaactatagacccatctcctcgatcaatcaggatggcaagatggagctgaggagctcagcaacatcaagtctggagttggtctttaactcaactagctcgtttagacgtgtctgaacaccacatcacctgacagcacggggtggtttcccagtaaaatttacaaactcagctcaagggcagctgtgttgctttcctttccttgactgctgagaaactttttgacagggaacaatggaaacacaccttctgagctgaaacaaacaaacagaaacaaaacatactaaccagcaaaatccccaaatcatcaatcttgggttctcttgaagggcaggagtgtgttttatcttctcccgtcggagcaaacactatagatgtcctccctaaaattctgtcttccctagagcagccttgtaaattagctagggtcctagggttgaggcctaaatcaacttaaaattgtctctaaatatgtacctggatgtgtttgtacttgcagagcatgccctcttcatgtgcctagggctagtaactccctgtggcagaggcatgtaaagtattctgactttttttttttcaacttaattccatttccaatgaaatggatttttaaaaattttctccagagtgtgccatacttctccagctattatagttaatgtgtgtgtatccttgtgtatatgtgtgtttgtgtgtgcatatgtgttttcctagtggttacatgcttactaggcaattatgtaaataagcacagattcataggccagctaggcctgaggaaagaagacattataaagggagggagtattttaacattagctaaagctatcacacaaggcacccattctgctcccctcaacagccacagcccacttcgtccttgtcttaccaataaggggaaaggctggaggtgatatttttcacagaaccgcagaggttttgaacatatttgcaacattactttgagtacacatgagcaaaaattctgaattacatccaggaccccagaagctcattagatcaaagagtgcggggcccctcagagttaccagagattatctgcagacttcagtgcaatcgaatgaccatggtccattttgatggtcagaggtaggactgaaaaacgggtagaaacaattgctttagcgcttccttctgtactttgcctattaatgttttgtctttcaaaaatatattttctcctaattgtttaattggccaaataatggctgctttgggagttgtttgtatgccttggaaggccatggcctgcactttaaaaataagctaagtccattctgcccagcacgagcattaggacagagaatgcacttattttaggatccttaaaaattgcttcttttatggcacactgggttgacgactcatctcgtgggagccttcatggcacattgctgctgttctgcaggtcccaatacaattccttccccctctcagtgccacggcccccccattgctagctacacaatttgatatcatattcccttttcaactccaaaggagatgataagaagctatcaaataatgctttaaaaaagcaacttgagtttcttaaaagaaaggaaatgaatacatgctgcataattacatttaaaatgtaagccatgttattataagccgcactgagatgaagatttgttagcaaaccagtttcaagcacactcacagtgaagtaaaatcatgtttttagcatctgaccattgggtaatattattctttgttatcaaaagagaaatatcacccaagtatagtatacttagacctcctagaggaaacactccagtcctaagcttggtgtctgaaaagaaaaacaaaaataaagattatggatttaggtcagggagacagagtgatattctgaagactgtgtttactccctcatcatcggccaaccaagatggagttctgcatcctgcacatatcagacatttcagtccaatttcaccaaagcatcagtgatgttctagaagcatcccagcagatggaggatcctaatgtatttgttctgggtatttcccaaggcccagcctgactggagtgtgtgtaccaacaggatgaatccaatcaagctacgcccccattttggtttcggattggccactcttgcatgtgctagtagattgtggaccaggaccagctgagcaaacacagttgcagagtagcctcctatgttgctaagaagctcctgctacccaggtgctttgaacaattgagtgctccctctggttaagtagagatggcaccaccggagtttttcttggatgtgaggctcaatcctttacggcagctattataacaaagtgaaggttttctccctgggaaatgcagcttttctctgtctttactaattctgccagcctgtgagagtaaccaccgtagctgggcttcttctcagattaattgtcatgccaggtctccttcctggggagctgtgatgctgctctgaggttgattgctgaggttgtagtgggtttttgtttgtttttgtttagtttttcttgattgttcttctttctcttgaatggcaagagaagaaacactttctctaacccacggccaggaaggaaatggggagagagctacttcttagttcaacctggttgccacataaaggaatctctctccttggactcagcccctaactggaagcaagagccactgccctctgagactgagagagcagcccgaggaggagatgaatccattctgccctttgtttgggtttgcttcctgtcagtgagagaatgctgaggcagttcctgttatgtgaaactttcatttttaaaaccaggacagtcctaaacagactggaatgagttggtcaatcccagttggtataggcccaatgatttttgctagtaagataggattgtcttcctcacccaaaatgccttcaagtgccctaaaatgggtattttaaaataagaataaataatgtagatttagtagaaaacctggaaaacataagaaacaaagatgaaacgaaaagtcccatgtaattccaccagttagagttaaccactgatatcgtttggatatatggctttctagtcttgtggatatccttttaatctcttgtaatataaagtctgaccatatgtgtccttgcatttgtttgtactggactctgttaatatttctatagtaatggctcactttggggagattgtgctgcacagtgtgtaggaagcacattgggtgtattattcccagttttgtattttgtatttccttggagatgtgcaggggttaagagcgggggtctggccatagctggccacgtcagactctcatatggtaagtatcacagagcacatgaggcctgtgttatgcgctggaaagactcaggaaatgagaggctctcttgttctgacaaggcaggctgagagctctcatttagggtcatcactccagataactccaaatgcagtttattgctcaactgaagcagatgatcactttttgcctccaagttcttcaccctagctagctcctttcaaagagccgagtatgctggatcttaaagggccaaactagttacatctcatacatttcctgatgtttagggatgccttcacttccatcaaggataccttggctgtgcaaggacctctgatagctggagtctccttttggtcactcccagctttgcttaaacttgatggagtttgctgtccagtgatccccggatctttcatcatgaaagccttccttcctctcctgatgtctcaggcctctagacctagactggggttctggcaaggaggcctctatcaatagtatgacatccaataatatgttagtgttgatattttgcacagtaatattaagtttaagagattataaaaatgagttcaaatgaataagttcctgtgatgtaagagattagatatgtgtgatttcagaaccaaagccaggggggaatcccagaaagaaaacaataatataatcctagtttctatatattatttttattcattactgtatatgggtagagatcaatattctttcttatgctgttactattaattaacacattttttaaccatgccattgaacttttgggtgcattaaagtggaacccaagctcctcattagataataatggcatttggactgagtgccatattcctaaatttccaataaagtggttgatatagagaggacaggataaagccctatagtgtgcagttatatcaaaacagctagtctccactttagggaatgcctttactagagattacatgaaatgtctgcttataaaataagcagagatggcaccactaagcagccacctgaattgttttcctacaggaatgattacttttcagatccatttatgttttcatgctcaatacttactccccttccctgcaacacccaaagagtttacttttgcaagtcatttggtcttcagtctactactgaggaatagagaggcactaactgctttacccaggatcagaactcatgttcttaccttctattaatagagtacttgagccagatggactaactggtctcacattttctctatcttggttttacttccataaacatcaatatctttacccacatgatttttccatcctcccatttttttccatatgtattagggttcaggaactatgatgctaatgatcacatttcttcctagttcctaatttcattagtgccatttcctgatatctacagaaacaattatcaatacatgtagctgcttgagccttatttagaaggctagcctttcttttccaagtgctgtcagaatgtatacatttagtctgtctttttcccttttaggagtctttgttctgggttgatggcaaaattcctctttttacatgtgagatttttgatttcactgaattctacctagatttttatggacattggattttaaagaggaaaacactcattttcttagtaagatattggtgatacatagctatgccattgatttccatactcctgagctttggggagggagacagtggccaagtagcaggcagaataagatcatcactcatgtcctgaatcaatcacactttccttctcggattgtgtatatgctctgccacttcctacatattacatcctgagtttttaagtaaagtggatcttagccagatttgagtctaatggctgattcatcggcatagttcttggcgttaacatctcagtgtcctctttagttctctttgaggattcatgtcattgagggcctttgtgcctccacttgtctcagtatgaggaagaactttggtgtgagggcggagctatgtgaagggttgctgggttgggggattagttcatatggtccccatgccatctatttacttttggagagaggggactttgagtgggtgggtatggatagatgttcctcaaggaaaccctgctggctaatgggcactacatctgtgtattactgtgattctctctgtaagctccccatgtggccaaggacccccctcctaccagggcacttcctgccacctcattgcactggtctcaaccattcagcctgctgctgctgcaccatgttgggctgcggtaggatagggaaggggttctgttgattgctaaatgttgcctaactttatttccctctcccacatttcatgcaagggagcggacctaacacatgacttgcattctcttcctatgttcagaaactccagggcttgcccacgtgtatgtatgagtgaccaatggagcttggaattctttatctatatgatctgtccgaaaatgagatcttttgtactggaatttgtgatgtagttgatcattcagagccaaacgcatataccaataaagacaagactgtcatataaaaaaaaaaaaaaaaa

SEQ ID NO: 1096 - protein, 537 aa, Homo sapiens
MSSWIRWHGPAMARLWGFCWLVVGFWRAAFACPTSCKCSASRIWCSDPSPGIVAFPRLEPNSVDPENITEIFIANQKRLEIINEDDVEAYVGLRNLTIVDSGLKFVAHKAFLKNSNLQHINFTRNKLTSLSRKHFRHLDLSELILVGNPFTCSCDIMWIKTLQEAKSSPDTQDLYCLNESSKNIPLANLQIPNCGLPSANLAAPNLTVEEGKSITLSCSVAGDPVPNMYWDVGNLVSKHMNETSHTQGSLRITNISSDDSGKQISCVAENLVGEDQDSVNLTVHFAPTITFLESPTSDHHWCIPFTVKGNPKPALQWFYNGAILNESKYICTKIHVTNHTEYHGCLQLDNPTHMNNGDYTLIAKNEYGKDEKQISAHFMGWPGIDDGANPNYPDVIYEDYGTAANDIGDTTNRSNEIPSTDVTDKTGREHLSVYAVVVIASVVGFCLLVMLFLLKLARHSKFGMKGPASVISNDDDSASPLHHISNGSNTPSSSEGGPDAVIIGMTKIPVIENPQYFGITNSQLKPDTWPRGSPKTA

SEQ ID NO: 1097 - DNA, 5608 bp, Homo sapiens
aagacggattctcagacaaggcttgcaaatgccccgcagccatcatttaactgcacccgcagaatagttacggtttgtcacccgaccctcccggatcgcctaatttgtccctagtgagaccccgaggctctgcccgcgcctggcttcttcgtagctggatgcatatcgtgctccgggcagcgcgggcgcagggcacgcgttcgcgcacaccctagcacacatgaacacgcgcaagagctgaaccaagcacggtttccatttcaaaaagggagacagcctctaccgcgattgtagaagagactgtggtgtgaattagggaccgggaggcgtcgaacggaggaacggttcatcttagagactaattttctggagtttctgcccctgctctgcgtcagccctcacgtcacttcgccagcagtagcagaggcggcggcggcggctcccggaattgggttggagcaggagcctcgctggctgcttcgctcgcgctctacgcgctcagtccccggcggtagcaggagcctggacccaggcgccgccggcgggcgtgaggcgccggagcccggcctcgaggtgcataccggacccccattcgcatctaacaaggaatctgcgccccagagagtcccgggagcgccgccggtcggtgcccggcgcgccgggccatgcagcgacggccgccgcggagctccgagcagcggtagcgcccccctgtaaagcggttcgctatgccggggccactgtgaaccctgccgcctgccggaacactcttcgctccggaccagctcagcctctgataagctggactcggcacgcccgcaacaagcaccgaggagttaagagagccgcaagcgcagggaaggcctccccgcacgggtgggggaaagcggccggtgcagcgcggggacaggcactcgggctggcactggctgctagggatgtcgtcctggataaggtggcatggacccgccatggcgcggctctggggcttctgctggctggttgtgggcttctggagggccgctttcgcctgtcccacgtcctgcaaatgcagtgcctctcggatctggtgcagcgacccttctcctggcatcgtggcatttccgagattggagcctaacagtgtagatcctgagaacatcaccgaaattttcatcgcaaaccagaaaaggttagaaatcatcaacgaagatgatgttgaagcttatgtgggactgagaaatctgacaattgtggattctggattaaaatttgtggctcataaagcatttctgaaaaacagcaacctgcagcacatcaattttacccgaaacaaactgacgagtttgtctaggaaacatttccgtcaccttgacttgtctgaactgatcctggtgggcaatccatttacatgctcctgtgacattatgtggatcaagactctccaagaggctaaatccagtccagacactcaggatttgtactgcctgaatgaaagcagcaagaatattcccctggcaaacctgcagatacccaattgtggtttgccatctgcaaatctggccgcacctaacctcactgtggaggaaggaaagtctatcacattatcctgtagtgtggcaggtgatccggttcctaatatgtattgggatgttggtaacctggtttccaaacatatgaatgaaacaagccacacacagggctccttaaggataactaacatttcatccgatgacagtgggaagcagatctcttgtgtggcggaaaatcttgtaggagaagatcaagattctgtcaacctcactgtgcattttgcaccaactatcacatttctcgaatctccaacctcagaccaccactggtgcattccattcactgtgaaaggcaaccccaaaccagcgcttcagtggttctataacggggcaatattgaatgagtccaaatacatctgtactaaaatacatgttaccaatcacacggagtaccacggctgcctccagctggataatcccactcacatgaacaatggggactacactctaatagccaagaatgagtatgggaaggatgagaaacagatttctgctcacttcatgggctggcctggaattgacgatggtgcaaacccaaattatcctgatgtaatttatgaagattatggaactgcagcgaatgacatcggggacaccacgaacagaagtaatgaaatcccttccacagacgtcactgataaaaccggtcgggaacatctctcggtctatgctgtggtggtgattgcgtctgtggtgggattttgccttttggtaatgctgtttctgcttaagttggcaagacactccaagtttggcatgaaagatttctcatggtttggatttgggaaagtaaaatcaagacaaggtgttggcccagcctccgttatcagcaatgatgatgactctgccagcccactccatcacatctccaatgggagtaacactccatcttcttcggaaggtggcccagatgctgtcattattggaatgaccaagatccctgtcattgaaaatccccagtactttggcatcaccaacagtcagctcaagccagacacatttgttcagcacatcaagcgacataacattgttctgaaaagggagctaggcgaaggagcctttggaaaagtgttcctagctgaatgctataacctctgtcctgagcaggacaagatcttggtggcagtgaagaccctgaaggatgccagtgacaatgcacgcaaggacttccaccgtgaggccgagctcctgaccaacctccagcatgagcacatcgtcaagttctatggcgtctgcgtggagggcgaccccctcatcatggtctttgagtacatgaagcatggggacctcaacaagttcctcagggcacacggccctgatgccgtgctgatggctgagggcaacccgcccacggaactgacgcagtcgcagatgctgcatatagcccagcagatcgccgcgggcatggtctacctggcgtcccagcacttcgtgcaccgcgatttggccaccaggaactgcctggtcggggagaacttgctggtgaaaatcggggactttgggatgtcccgggacgtgtacagcactgactactacagggtcggtggccacacaatgctgcccattcgctggatgcctccagagagcatcatgtacaggaaattcacgacggaaagcgacgtctggagcctgggggtcgtgttgtgggagattttcacctatggcaaacagccctggtaccagctgtcaaacaatgaggtgatagagtgtatcactcagggccgagtcctgcagcgaccccgcacgtgcccccaggaggtgtatgagctgatgctggggtgctggcagcgagagccccacatgaggaagaacatcaagggcatccataccctccttcagaacttggccaaggcatctccggtctacctggacattctaggctagggcccttttccccagaccgatccttcccaacgtactcctcagacgggctgagaggatgaacatcttttaactgccgctggaggccaccaagctgctctccttcactctgacagtattaacatcaaagactccgagaagctctcgagggaagcagtgtgtacttcttcatccatagacacagtattgacttctttttggcattatctctttctctctttccatctcccttggttgttcctttttctttttttaaattttctttttcttttttttttcgtcttccctgcttcacgattcttaccctttcttttgaatcaatctggcttctgcattactattaactctgcatagacaaaggccttaacaaacgtaatttgttatatcagcagacactccagtttgcccaccacaactaacaatgccttgttgtattcctgcctttgatgtggatgaaaaaaagggaaaacaaatatttcacttaaactttgtcacttctgctgtacagatatcgagagtttctatggattcacttctatttatttattattattactgttcttattgtttttggatggcttaagcctgtgtataaaaaagaaaacttgtgttcaatctgtgaagcctttatctatgggagattaaaaccagagagaaagaagatttattatgaaccgcaatatgggaggaacaaagacaaccactgggatcagctggtgtcagtccctacttaggaaatactcagcaactgttagctgggaagaatgtattcggcaccttcccctgaggacctttctgaggagtaaaaagactactggcctctgtgccatggatgattcttttcccatcaccagaaatgatagcgtgcagtagagagcaaagatggcttccgtgagacacaagatggcgcatagtgtgctcggacacagttttgtcttcgtaggttgtgatgatagcactggtttgtttctcaagcgctatccacagaacctttgtcaacttcagttgaaaagaggtggattcatgtccagagctcatttcggggtcaggtgggaaagccaagaacttggaaaagataagacaagctataaattcggaggcaagtttcttttacaatgaacttttcagatctcacttccctccgacccctaacttccatgcccacccgtccttttaactgtgcaagcaaaattgtgcatggtcttcgtcgattaataccttgtgtgcagacactactgctccagacgtcgtttccctgataggtagagcagatccataaaaaggtatgacttatacaattaggggaagctaatggagtttattagctgagtatcaatgtctctgcgttgtacggtggtgatgggttttaatgaatatggaccctgaagcctggaaatcctcatccacgtcgaacccacaggactgtgggaagggcagaatcaatccctaagggaaaggaaacctcaccctgagggcatcacatgcactcatgttcagtgtacacaggtcaagtcccttgctctgggctctagttgggagagtggtttcattccaagtgtactccattgtcagtatgctgtttttgtttccttcactccattcaaaaagtcaaaatacaaaatttggcacagcatgccaacgggaggctgtgcccagaccaagcactggaagtgtgcttctaggcatagtcattggttttgcaaaaagagggctcaaatttaaatagaaatttacagctatttgaatggtcagatataccaagaaagaaaaatatttctgttcctcaagaaaacttgctaccctctgtgaggggaattttgctaaacttgacatctttataacatgagccagattgaaagggagtgattttcattcatcttaggtcatgttatttcatatttgtttctgaaggtgcgatagctctgttttaggttttgcttgcgcctgttaattactggaacaccttatttttcattaaaggctttgaaagccaattctcaaaaattcaaaagtgcaaattaacagaacaaaaggaaatccagtagcaactgcagtcaagcgagggagttgacaagataaaccttacgtccattcaagttatatgctggcctatgagagatgagagttgggtcgtttgttctctttgttgatgattt

SEQ ID NO: 1098 - protein, 838 aa, Homo sapiens
MSSWIRWHGPAMARLWGFCWLVVGFWRAAFACPTSCKCSASRIWCSDPSPGIVAFPRLEPNSVDPENITEIFIANQKRLEIINEDDVEAYVGLRNLTIVDSGLKFVAHKAFLKNSNLQHINFTRNKLTSLSRKHFRHLDLSELILVGNPFTCSCDIMWIKTLQEAKSSPDTQDLYCLNESSKNIPLANLQIPNCGLPSANLAAPNLTVEEGKSITLSCSVAGDPVPNMYWDVGNLVSKHMNETSHTQGSLRITNISSDDSGKQISCVAENLVGEDQDSVNLTVHFAPTITFLESPTSDHHWCIPFTVKGNPKPALQWFYNGAILNESKYICTKIHVTNHTEYHGCLQLDNPTHMNNGDYTLIAKNEYGKDEKQISAHFMGWPGIDDGANPNYPDVIYEDYGTAANDIGDTTNRSNEIPSTDVTDKTGREHLSVYAVVVIASVVGFCLLVMLFLLKLARHSKFGMKDFSWFGFGKVKSRQGVGPASVISNDDDSASPLHHISNGSNTPSSSEGGPDAVIIGMTKIPVIENPQYFGITNSQLKPDTFVQHIKRHNIVLKRELGEGAFGKVFLAECYNLCPEQDKILVAVKTLKDASDNARKDFHREAELLTNLQHEHIVKFYGVCVEGDPLIMVFEYMKHGDLNKFLRAHGPDAVLMAEGNPPTELTQSQMLHIAQQIAAGMVYLASQHFVHRDLATRNCLVGENLLVKIGDFGMSRDVYSTDYYRVGGHTMLPIRWMPPESIMYRKFTTESDVWSLGVVLWEIFTYGKQPWYQLSNNEVIECITQGRVLQRPRTCPQEVYELMLGCWQREPHMRKNIKGIHTLLQNLAKASPVYLDILG

SEQ ID NO: 1099 - DNA, 4675 bp, Homo sapiens
gctgtaacactcaccgtgaaggtctgcagcttcactcccgagccagcgagaccacgaacccaccagaaggaagaaactctgaacacatctgaacatcagaagggacagactccagacgcgccaccactctgctaacaccagatagtggaaagaaaccatgtgctgaaatgtttgacgacactgatggtttgactctgctaactggaatggcttattgtgcaagaaagtacacctggtcgggtcctggggctcatctctagcaccagcaaagatttctgaagacgtctttctagaaatgactggaaagtttcaagaggcataagatacagcatttcttctgaggccctgaagaagtatcaagtgggctttgacattgcggtggtgagagcgacccctcctcacctggagaactgggaaatgtggattctcagggaccgcgctgttcacgagctccaggctgtgctgctggccctggtcctggggcgctgagccgcatctgcaatagcacacttgcccggccacctgctgccgtgagcctttgctgctgaagcccctggggtcgcctctacctgatgaggatgtgcacccccattagggggctgctcatggcccttgcagtgatgtttgggacagcgatggcatttgcacccataccccggatcacctgggagcacagagaggtgcacctggtgcagtttcatgagccagacatctacaactactcagccttgctgctgagcgaggacaaggacaccttgtacataggtgcccgggaggcggtcttcgctgtgaacgcactcaacatctccgagaagcagcatgaggtgtattggaaggtctcagaagacaaaaaagcaaaatgtgcagaaaaggggaaatcaaaacagacagagtgcctcaactacatccgggtgctgcagccactcagcgccacttccctttacgtgtgtgggaccaacgcattccagccggcctgtgaccacctgaacttaacatcctttaagtttctggggaaaaatgaagatggcaaaggaagatgtccctttgacccagcacacagctacacatccgtcatggttgatggagaactttattcggggacgtcgtataattttttgggaagtgaacccatcatctcccgaaattcttcccacagtcctctgaggacagaatatgcaatcccttggctgaacgagcctagtttcgtgtttgctgacgtgatccgaaaaagcccagacagccccgacggcgaggatgacagggtctacttcttcttcacggaggtgtctgtggagtatgagtttgtgttcagggtgctgatcccacggatagcaagagtgtgcaagggggaccagggcggcctgaggaccttgcagaagaaatggacctccttcctgaaagcccgactcatctgctcccggccagacagcggcttggtcttcaatgtgctgcgggatgtcttcgtgctcaggtccccgggcctgaaggtgcctgtgttctatgcactcttcaccccacagctgaacaacgtggggctgtcggcagtgtgcgcctacaacctgtccacagccgaggaggtcttctcccacgggaagtacatgcagagcaccacagtggagcagtcccacaccaagtgggtgcgctataatggcccggtacccaagccgcggcctggagcgtgcatcgacagcgaggcacgggccgccaactacaccagctccttgaatttgccagacaagacgctgcagttcgttaaagaccaccctttgatggatgactcggtaaccccaatagacaacaggcccaggttaatcaagaaagatgtgaactacacccagatcgtggtggaccggacccaggccctggatgggactgtctatgatgtcatgtttgtcagcacagaccggggagctctgcacaaagccatcagcctcgagcacgctgttcacatcatcgaggagacccagctcttccaggactttgagccagtccagaccctgctgctgtcttcaaagaagggcaacaggtttgtctatgctggctctaactcgggcgtggtccaggccccgctggccttctgtgggaagcacggcacctgcgaggactgtgtgctggcgcgggacccctactgcgcctggagcccgcccacagcgacctgcgtggctctgcaccagaccgagagccccagcaggggtttgattcaggagatgagcggcgatgcttctgtgtgcccggataaaagtaaaggaagttaccggcagcattttttcaagcacggtggcacagcggaactgaaatgctcccaaaaatccaacctggcccgggtcttttggaagttccagaatgacgtgttgaaggccgagagccccaagtacggtcttatgggcagaaaaaacttgctcatcttcaacttgtcagaaggagacagtggggtgtaccagtgcctgtcagaggagagggttaagaacaaaacggtcttccaagtggtcgccaagcacgtcctggaagtgaaggtggttccaaagcccgtagtggcccccaccttgtcagttgttcagacagaaggtagtaggattgccaccaaagtgttggtggcatccacccaagggtcttctcccccaaccccagccgtgcaggccacctcctccggggccatcacccttcctcccaagcctgcgcccaccggcacatcctgcgaaccaaagatcgtcatcaacacggtcccccagctccactcggagaaaaccatgtatcttaagtccagcgacaaccgcctcctcatgtccctcttcctcttcttctttgttctcttcctctgcctctttttctacaactgctataagggatacctgcccagacagtgcttgaaattccgctcggccctactaattgggaagaagaagcccaagtcagatttctgtgaccgtgagcagagcctgaaggagacgttagtagagccagggagcttctcccagcagaatggggagcaccccaagccagccctggacaccggctatgagaccgagcaagacaccatcaccagcaaagtccccacggatagggaggactcacagaggatcgacgacctttctgccagggacaagccctttgacgtcaagtgtgagctgaagttcgctgactcagacgcagatggagactgaggccggctgtgcatccccgctggtgcctcggctgcgacgtgtccaggcgtggagagttttgtgtttctcctgttcagtatccgagtctcgtgcagtgctgcgtaggttagcccgcatcgtgcagacaacctcagtcctcttgtctattttctcttgggttgagcctgtgacttggtttctctttgtccttttggaaaaatgacaatccttgcatcccagtcttgtgttccgaagtcagtcggagtacttgaagaaggcccacgggcggcacggagttcctgagccctttctgtagtgggggaaaggtggctggacctctgttggctgagaagagcatcccttcagcttcccctccccgtagcagccactaaaagattatttaattccagattggaaatgacattttagtttatcagattggtaacttatcgcctgttgtccagattggcacgaaccttttcttccacttaattatttttttaggattttgctttgattgtgtttatgtcatgggtcatttttttttagttacagaagcagatgtgttaatatttagaagaagatgtatatcttccagattttgttatatatttggcataaaatacggcttacgttgcttaagattctcagggataaacttccttttgctaaatgcattctttctgcttttagaaatgtagacataaacactccccggagcccactcaccttttttctttttctttttttttttttaactttattccttgagggaagcattgtttttggagagattttctttctgtacttcgttttacttttctttttttttaacttttactctctcgaagaagaggaccttcccacatccacgaggtgggttttgagcaagggaaggtagcctggatgagctgagtggagccaggctggcccagagctgagatgggagtgcggtacaatctggagcccacagctgtcggtcagaacctcctgtgagacagatggaaccttcacaagggcgcctttggttctctgaacatctcctttctcttcttgcttcaattgcatacccactgcctgcccagactttctatccagcctcactgagctgcccactactggaagggaactgggcctcggtggccggggccgcgagctgtgaccacagcaccctcaagcatacggcgctgttcctgccactgtcctgaagatgtgaatgggtggtacgatttcaacactggttaatttcacactccatctccccgctttgtaaatacccatcgggaagagactttttttccatggtgaagagcaataaactctggatgtttgtgcgcgtgtgtggacagtcttatcttccagcatgataggatttgaccattttggtgtaaacatttgtgttttataagatttaccttgtttttatttttctactttgaattgtatacatttggaaagtacccaaataaatgagaagcttctatccttaaaaaaaaaaaaaaaaaaaaaaaaaaaaaaaaaaaaaaaaaaaaaaa

SEQ ID NO: 1100 - protein, 862 aa, Homo sapiens
MRMCTPIRGLLMALAVMFGTAMAFAPIPRITWEHREVHLVQFHEPDIYNYSALLLSEDKDTLYIGAREAVFAVNALNISEKQHEVYWKVSEDKKAKCAEKGKSKQTECLNYIRVLQPLSATSLYVCGTNAFQPACDHLNLTSFKFLGKNEDGKGRCPFDPAHSYTSVMVDGELYSGTSYNFLGSEPIISRNSSHSPLRTEYAIPWLNEPSFVFADVIRKSPDSPDGEDDRVYFFFTEVSVEYEFVFRVLIPRIARVCKGDQGGLRTLQKKWTSFLKARLICSRPDSGLVFNVLRDVFVLRSPGLKVPVFYALFTPQLNNVGLSAVCAYNLSTAEEVFSHGKYMQSTTVEQSHTKWVRYNGPVPKPRPGACIDSEARAANYTSSLNLPDKTLQFVKDHPLMDDSVTPIDNRPRLIKKDVNYTQIVVDRTQALDGTVYDVMFVSTDRGALHKAISLEHAVHIIEETQLFQDFEPVQTLLLSSKKGNRFVYAGSNSGVVQAPLAFCGKHGTCEDCVLARDPYCAWSPPTATCVALHQTESPSRGLIQEMSGDASVCPDKSKGSYRQHFFKHGGTAELKCSQKSNLARVFWKFQNDVLKAESPKYGLMGRKNLLIFNLSEGDSGVYQCLSEERVKNKTVFQVVAKHVLEVKVVPKPVVAPTLSVVQTEGSRIATKVLVASTQGSSPPTPAVQATSSGAITLPPKPAPTGTSCEPKIVINTVPQLHSEKTMYLKSSDNRLLMSLFLFFFVLFLCLFFYNCYKGYLPRQCLKFRSALLIGKKKPKSDFCDREQSLKETLVEPGSFSQQNGEHPKPALDTGYETEQDTITSKVPTDREDSQRIDDLSARDKPFDVKCELKFADSDADGD

SEQ ID NO: 1101 - DNA, 2672 bp, Homo sapiens
aggaagagccgcgggcccggcggctgaggccaccccggcggcggctggagagcgaggaggagcgggtggccccgcgctgcgcccgccctcgcctcacctggcgcaggtggacacctgcgcaggtgtgtgccctccggcccctgaagcatggccagcagcggcatggctgacagcgccaaccacctgcccttctttttcggcaacatcacccgggaggaggcagaagattacctggtccaggggggcatgagtgatgggctttatttgctgcgccagagccgcaactacctgggtggcttcgccctgtccgtggcccacgggaggaaggcacaccactacaccatcgagcgggagctgaatggcacctacgccatcgccggtggcaggacccatgccagccccgccgacctctgccactaccactcccaggagtctgatggcctggtctgcctcctcaagaagcccttcaaccggccccaaggggtgcagcccaagactgggccctttgaggatttgaaggaaaacctcatcagggaatatgtgaagcagacatggaacctgcagggtcaggctctggagcaggccatcatcagtcagaagcctcagctggagaagctgatcgctaccacagcccatgaaaaaatgccttggttccatggaaaaatctctcgggaagaatctgagcaaattgtcctgataggatcaaagacaaatggaaagttcctgatccgagccagagacaacaacggctcctacgccctgtgcctgctgcacgaagggaaggtgctgcactatcgcatcgacaaagacaagacagggaagctctccatccccgagggaaagaagttcgacacgctctggcagctagtcgagcattattcttataaagcagatggtttgttaagagttcttactgtcccatgtcaaaaaatcggcacacagggaaatgttaattttggaggccgtccacaacttccaggttcccatcctgcgacttggtcagcgggtggaataatctcaagaatcaaatcatactccttcccaaagcctggccacagaaagtcctcccctgcccaagggaaccggcaagagagtactgtgtcattcaatccgtatgagccagaacttgcaccctgggctgcagacaaaggcccccagagagaagccctacccatggacacagaggtgtacgagagcccctacgcggaccctgaggagatcaggcccaaggaggtttacctggaccgaaagctgctgacgctggaagacaaagaactgggctctggtaattttggaactgtgaaaaagggctactaccaaatgaaaaaagttgtgaaaaccgtggctgtgaaaatactgaaaaacgaggccaatgaccccgctcttaaagatgagttattagcagaagcaaatgtcatgcagcagctggacaacccgtacatcgtgcgcatgatcgggatatgcgaggccgagtcctggatgctagttatggagatggcagaacttggtcccctcaataagtatttgcagcagaacagacatgtcaaggataagaacatcatagaactggttcatcaggtttccatgggcatgaagtacttggaggagagcaattttgtgcacagagatctggctgcaagaaatgtgttgctagttacccaacattatgccaagatcagtgatttcggactctccaaagcactgcgtgctgatgaaaactactacaaggcccagacccatggaaagtggcctgtcaagtggtacgctccggaatgcatcaactactacaagttctccagcaaaagcgatgtctggagctttggagtgttgatgtgggaagcattctcctatgggcagaagccatatcgagggatgaaaggaagtgaagtcaccgctatgttagagaaaggagagcggatggggtgccctgcagggtgtccaagagagatgtacgatctcatgaatctgtgctggacatacgatgtggaaaacaggcccggattcgcagcagtggaactgcggctgcgcaattactactatgacgtggtgaactaaccgctcccgcacctgtcggtggctgcctttgatcacaggagcaatcacaggaaaatgtatccagaggaattgattgtcagccacctccctctgccagtcgggagagccaggcttggatggaacatgcccacaacttgtcacccaaagcctgtcccaggactcaccctccacaaagcaaaggcagtcccgggagaaaagacggatggcaggatccaaggggctagctggatttgtttgttttcttgtctgtgtgattttcatacaggttatttttacgatctgtttccaaatccctttcatgtctttccacttctctgggtcccggggtgcatttgttactcatcgggcccagggacattgcagagtggcctagagcactctcaccccaagcggccttttccaaatgcccaaggatgccttagcatgtgactcctgaagggaaggcaaaggcagaggaatttggctgcttctacggccatgagactgatccctggccactgaaaagctttcctgacaataaaaatgttttgaggctttaaaaagaaaatcaagtttgaccagtgcagtttctaagcatgtagccagttaaggaaagaaagaaaaaaaaaaaaaaaaaa

SEQ ID NO: 1102 - protein, 635 aa, Homo sapiens
MASSGMADSANHLPFFFGNITREEAEDYLVQGGMSDGLYLLRQSRNYLGGFALSVAHGRKAHHYTIERELNGTYAIAGGRTHASPADLCHYHSQESDGLVCLLKKPFNRPQGVQPKTGPFEDLKENLIREYVKQTWNLQGQALEQAIISQKPQLEKLIATTAHEKMPWFHGKISREESEQIVLIGSKTNGKFLIRARDNNGSYALCLLHEGKVLHYRIDKDKTGKLSIPEGKKFDTLWQLVEHYSYKADGLLRVLTVPCQKIGTQGNVNFGGRPQLPGSHPATWSAGGIISRIKSYSFPKPGHRKSSPAQGNRQESTVSFNPYEPELAPWAADKGPQREALPMDTEVYESPYADPEEIRPKEVYLDRKLLTLEDKELGSGNFGTVKKGYYQMKKVVKTVAVKILKNEANDPALKDELLAEANVMQQLDNPYIVRMIGICEAESWMLVMEMAELGPLNKYLQQNRHVKDKNIIELVHQVSMGMKYLEESNFVHRDLAARNVLLVTQHYAKISDFGLSKALRADENYYKAQTHGKWPVKWYAPECINYYKFSSKSDVWSFGVLMWEAFSYGQKPYRGMKGSEVTAMLEKGERMGCPAGCPREMYDLMNLCWTYDVENRPGFAAVELRLRNYYYDVVN

SEQ ID NO: 1103 - DNA, 3783 bp, Homo sapiens
caggccgccggcccgggagagcgcgcggcggcggcggcggcgggacggccccgagcgcgccctcccgcctgcggccactcgcagccggcgctggccgggccggcgcgccccgcaggcggctagagcgcggcctcggcctcggcgcgggcttgccccgggccgtagcccgcgagaggcggcgcgggcggccgagggcactgacggcgtcgcgggacgctcccgggcggcggcgcagcggcagcggcagcggcagcggcagcgcagggggcggaggcagggggcgcccccagccaggatgctgcggttcctgcgccggacctttggccgccgctccatgcagcgctacgcgcggggcgcggcggggcgcggggccgccgggctgggggacgagcgcgatggggggccacgggggggcccggccgccgccgcctcctcctcggcgctgcccgccgcgcccgggggcagcgtgttcccggcgggcggcgggcccctgctcaccggcggcgcggccgtgcacatctccgccgccggcgccgccaaggccaccctctactgccgcgtcttcctgctcgacgggaccgaagtgagcgtggacctgccgaaacatgccaaaggccaggatttgtttgatcagattgtgtaccacttggaccttgtggaaacagattactttggcctccagttcctcgactctgcccaggttgcgcactggctggatcatgccaaacccataaaaaagcagatgaaaattggacctgcttatgctttacactttcgagttaaatactattcttcagaaccaaacaaccttcgtgaggagtttacaaggtacctgtttgttttacaactcaggcatgacattctttctggaaaattgaaatgcccttatgaaacagctgtggaattagctgctctctgtctacaagcggagcttggggagtgcgagcttccagaacacacaccagagcttgtgtctgagtttcggttcattccaaatcagacagaagcaatggaatttgatatcttccagagatggaaagagtgcaggggaaagagccctgcccaggcggaactctcctatctgaataaagcgaagtggctggaaatgtatggggtagacatgcacgttgtcaggggaagagatggctgtgaatattctcttggactgaccccgacaggcatattaatctttgaaggagctaacaaaataggcttattcttttggcctaaaattaccaaaatggattttaaaaagagcaaattgacactcgtggtggtcgaggatgatgatcagggacgtgagcaagagcacacgtttgtgttccggttagacagtgccaggacctgcaaacacctttggaagtgtgcagttgagcaccacgcattcttccgactgcggacgccaggaaacagcaaatccaatagatccgactttatcaggctgggctctcgcttcagattcagtgggcggacagaatatcaagctacacatggctccaggttacgaagaaccagcacctttgagaggaagcctagtaaacgttatccatcccggagacattcaacgttcaaagcaagcaacccagtgatagcagcccagctctgctctaaaacaaatccagaagtccataattaccagcctcaatatcatcctaatatccatcccagccagccccggtggcatcctcactctccaaatgtcaggccatcctttcaggatgacaggtcgcattggaaagcatcggccagtggagatgacagccattttgattatgtccacgaccagaaccagaagaacttaggagggatgcaaagtatgatgtatcgagataaactcatgactgcactttgagagactgaagcatctctcttccattcaccttcatagtttcattgcattccatgaaaagtgtcttggcctcagatggatggatgtgtttggacgagtgtctttaaggagtagtcctgaaaggtgtttttggtgtccatgtaaatatttgaagataaaaccactatagcttgtcataatttactgttgactgcattctcattaaaatgaaggtaaaggctcaggaatcatattgatgttctgattttaaaattggagtcaaagtctatgtttatcattttactatgttcctgatgttctttgttatttaattaatgggagcaaataaaaccagaagagcttgggaagattgctcagcatatattcctgtcgtagaagttgagattgctagggtccagtttccctagtgtggcctggacgagtcatttccccttcattgacctcattttccccatctgaaaagagagggttggactaagtgatctccaaggtcctttccaactctaaaattctgcaatttgttaacatttcattttgtttaggttgaggacatacattcaaactaattttatcacaaggaaaactgcaatacccacttccttgacagagttactcctttcagaagctaaataaagtatataacttattagatgttatatagatacagggggactttgaatttcacatcttaaagcagttgagctactttgaatttaagcagtcgtactaatcttaaattgcatagcatttgttttgatcgaatttgctgctcaagtatgggaataatttttaatgtcttaatgattggtgctgctaacttgcgtgatttcagaagacataattgtgaatacacactgtcagaattgggggattggtttttaccctagacttcactcttaaaaagcaacgtgcaatcaagatcatttatggctcaaatgaaagcatataaggttttcttgaagttgtgccaaagcattctgtagagtaggatgagatggttgttgccctagtctgttggtagaaccagaaatcaatatgttgtcttttaggttaaagcttgtaccaaaatatttatttcccccatttcaagccctgagtcaaacatttttttctcttaataatagacctgaaatgttttattagtatttctgtgaaatcagttgattcttgtgccatttttgtatatgtaattgtaattttgcccatgttaggccctctaaaaaatgtttgacatcctttgagatattttattactaaaatctgatcttttttggctactgcaaaaatctattcagcaagaaggtatcagctgcataccttgcacagtggagctgactacctataaactctccctaaggcatttgtttacaggtgtattccattttagcagacgttctgatgctcagtgtatgtgctgcatacaaataaatgtgttctgaatcttttcatcttattgatagcatttttacaaatgtgtttccaaggaataaagattattcttgctttttttttgactccatcttcattttttttaaattgattcttgttgctatgcagaagtctcatttgtgaatgaccttggtaacagaacagttggcttttggaagtctgaaggtgagcattcagttaggtgggtggagcaagatcatcctagaatgaggctgctcttggcaagagtggatcttataggcacagcagctgatgcctttcttcatctggggcaactctggtgaaggttgtcctgcctgtcacaggtgctgagtagagagaagtggtggcagtgggatttcctcagtaatagtcctgtaaaggtacgtgtttgtcctggctacttgtgctcttcctggcaggaaggcatccaaacccttatctgtgggctcctggaaattgtgtatgccatataataccctctaataaatacctctctgcttaaa

SEQ ID NO: 1104 - protein, 518 aa, Homo sapiens
MLRFLRRTFGRRSMQRYARGAAGRGAAGLGDERDGGPRGGPAAAASSSALPAAPGGSVFPAGGGPLLTGGAAVHISAAGAAKATLYCRVFLLDGTEVSVDLPKHAKGQDLFDQIVYHLDLVETDYFGLQFLDSAQVAHWLDHAKPIKKQMKIGPAYALHFRVKYYSSEPNNLREEFTRYLFVLQLRHDILSGKLKCPYETAVELAALCLQAELGECELPEHTPELVSEFRFIPNQTEAMEFDIFQRWKECRGKSPAQAELSYLNKAKWLEMYGVDMHVVRGRDGCEYSLGLTPTGILIFEGANKIGLFFWPKITKMDFKKSKLTLVVVEDDDQGREQEHTFVFRLDSARTCKHLWKCAVEHHAFFRLRTPGNSKSNRSDFIRLGSRFRFSGRTEYQATHGSRLRRTSTFERKPSKRYPSRRHSTFKASNPVIAAQLCSKTNPEVHNYQPQYHPNIHPSQPRWHPHSPNVRPSFQDDRSHWKASASGDDSHFDYVHDQNQKNLGGMQSMMYRDKLMTAL

SEQ ID NO: 1105 - DNA, 5578 bp, Homo sapiens
caggccgccggcccgggagagcgcgcggcggcggcggcggcgggacggccccgagcgcgccctcccgcctgcggccactcgcagccggcgctggccgggccggcgcgccccgcaggcggctagagcgcggcctcggcctcggcgcgggcttgccccgggccgtagcccgcgagaggcggcgcgggcggccgagggcactgacggcgtcgcgggacgctcccgggcggcggcgcagcggcagcggcagcggcagcggcagcgcagggggcggaggcagggggcgcccccagccaggatgctgcggttcctgcgccggacctttggccgccgctccatgcagcgctacgcgcggggcgcggcggggcgcggggccgccgggctgggggacgagcgcgatggggggccacgggggggcccggccgccgccgcctcctcctcggcgctgcccgccgcgcccgggggcagcgtgttcccggcgggcggcgggcccctgctcaccggcggcgcggccgtgcacatctccgccgccggcgccgccaaggccaccctctactgccgcgtcttcctgctcgacgggaccgaagtgagcgtggacctgccgaaacatgccaaaggccaggatttgtttgatcagattgtgtaccacttggaccttgtggaaacagattactttggcctccagttcctcgactctgcccaggttgcgcactggctggatcatgccaaacccataaaaaagcagatgaaaattggacctgcttatgctttacactttcgagttaaatactattcttcagaaccaaacaaccttcgtgaggagtttacaaggtacctgtttgttttacaactcaggcatgacattctttctggaaaattgaaatgcccttatgaaacagctgtggaattagctgctctctgtctacaagcggagcttggggagtgcgagcttccagaacacacaccagagcttgtgtctgagtttcggttcattccaaatcagacagaagcaatggaatttgatatcttccagagatggaaagagtgcaggggaaagagccctgcccaggcggaactctcctatctgaataaagcgaagtggctggaaatgtatggggtagacatgcacgttgtcaggggaagagatggctgtgaatattctcttggactgaccccgacaggcatattaatctttgaaggagctaacaaaataggcttattcttttggcctaaaattaccaaaatggattttaaaaagagcaaattgacactcgtggtggtcgaggatgatgatcagggacgtgagcaagagcacacgtttgtgttccggttagacagtgccaggacctgcaaacacctttggaagtgtgcagttgagcaccacgcattcttccgactgcggacgccaggaaacagcaaatccaatagatccgactttatcaggctgggctctcgcttcagattcagtgggcggacagaatatcaagctacacatggctccaggttacgaagaaccagcacctttgagaggaagcctagtaaacgttatccatcccggagacattcaacgttcaaagcaagcaacccagtgatagcagcccagctctgctctaaaacaaatccagaagtccataattaccagcctcaatatcatcctaatatccatcccagccagccccggtggcatcctcactctccaaatgtcagctacccgctcccttccccagtgcttagcagctcggaccggttgccttttggcattgaggagaatgggggcacaccgttcctcaccgcagcttcaggaaggcatcaccaccagcaccagcatcagcatcagcaccagcaccactcaaactacagcctctcactgaccctggagaacaaagaggggcctctgaggtccccaaactccagcagcaagtcccttacaaaactgagtccaggaacacctgccttgttcagtgaagccgctgcccatctaaagaagctggaactggaaactgtgaaggctgctggaccctggcctcctctgcacatcaacataaacaaggctgaagaaaagaaagtctcggagaaaactcttcagactccacttttgccttcccctgttgcggatcatgtgaagtgtaacattctgaaagcccagttggaaaatgcttcccgagtgaacatccagggtggaaaggaggaatcaccgtttgtaaatatcaataagaaatccagtcttcaggacgctagtgtaagaagtcctattcctattcgtgtggaaactgcccagccagctgtggaaaagccggaaatcaagcctccccgagtgaggaagttaacaagacagtatagttttgatgaagacgacctccctccagacctggccgaggcagtgggagtgaccacatctacaaccacaaacaccacaacggccgccacacaagtctccgtgccgctgccgtcccccaaggtccagaatgtcagctcgcctcacaagtcagaaggcaaaggcctgctgtcccctggggccaagagcccctctgaccgaggaggtgcctttaccctggagccgggtgatcttctgatggatttcacagaagccactcctctggcagagcccgccagcaacccccactgtgcccactctcgctgttctcctccactctctctccccatgaaggaagagaccactggagtttgcatgtaccctccaatcaaaacgaggctgataaaaacattcccggttgatacaatgaacccgtttcctgatactttcaccacagggccacagtttactgcagacttcagagacagtaaattacagtgctgtcctggcccgacttccccgctgatcccagcagcgaccctgaggcctttgacagagaccgtctccacagtgcagaccatttacaccacccggaaacctgtttctctggcagccagtgcagagacactccggcaggaactggagagagagaagatgatgaaaagactgttgatgaccgaactgtgaaattctccccttgtcacctggaagatggcatggtgccttctgtccgtcttctttcttcgggctttgtgtgctcactctagcacagcatacaagtgtgtgctctgttcgcccaggtctccatggttagttgaagccaatttctggcttgacttttatgggaaaagttattttatgtctcctaagcattagagtttttctattactctatgtagttgagacaggatttgataagtctaggaaaagaaagatgggaaaacgggattccttttcagaagtacctgtgtgtatctgttaataaccacaggggttaatatgatgtaggatcttttactatcaatttcaaccatttgattttgtatgattgaaacttgcaccgagctttgactgtttgttaaagagtcatttttaatgaaagaataattctttattgctggtttttcatttacactgataaatacacagatcttataaagtctttaacattcatttgtattcagatgtgagtagaagaactaaaaaaagaaagttacatatcactatgactgaaggtacttcagcttaatctgaaatataatttaacttgtgaactccttggatatgatattatttggaataaacagaatttatcattgaacccaaagtaggaaatgatagcttacattgtctaaaaatccttacaaggttaagatgattcaatatcaagaagattcagaaaattatttctaaagttgatcgattcatgtcgtattgatagaatcttgaccagaagaaattttgctctttttatatagtttcaagaaatgtgtttttaaatttttattaatgcacttgaacaactttgcaggaataaagcaaccccctaaccacaaaatatccctctaaattagttccctagctttctcaatgaatacacacatatttttacatagctatgatcgttgtgtacattctcctttgttttacttctcggcctaacacttgtctcctcttgtcaacacagattctactctcaccaatttaaatgtctttatatccatgtaacatgggtaacctcacttcaccccattattagatatttgagttatatctaatttttcactcttataaatagtgctgctatgaatgtctgtaaaaaaaaaaaactgctccttcttttggattattcccttaggaatatctccaaagagggattacaaggtcaaagagcatgaagtattttatagctcttgttttatattgccagattgctttctagaaagatccaatctttgggttggaaggaccttaaaggtcatctagtttagcctccccaccccctctgaatgcttgaatcccctcgacaatttatgatgccaccagcaatgtataagcatttctgtttaccaatagctctgccagtattgggttttgccatttttatttatttttgctagtttaataggtatgtatagttgttcttgaagagttgttttatttcattaattgctagcaaggctgagcacttttccatgtgatgatttactagttgtatttccttgtgtgtaaaatgttcattcatttcttatgaccacttgttaagaggaactgatctcatatatttgtatcagaactgtatttttatgttatattgtatagtttgctctcctgcccctctccttaaaactgaatggtgccaataatttgatactaatgactacaaaaaaaggtaatgcctcatttactagtattgttgtaaaatgaggaatgtatgtgaatattcagataaccgaggattaaccctttaagtgctgaatctttaaaattttaatatatttttttttgagggaaatctttctaaaatgtattacgcacttccctgccttagtaaacagagtatactggagagtatttaaccttttcttgatgagtcatggtcatgattataaacatcagccccttttataccttggtacggtgcagtgatatcattaagagctatcaatatgtgtagggcttggcttggccttttataggatattatgctgttctcactgatggttttttactgctctctgctctgtcagtggagctatccggggcaattgtagcgtttgggtccttttacccctatgtcccccggctatacttttaaaacagctttagctgttctttatcttgtgcacatgatacaaaatatgttcccgtacaatatggggctgtcacttcttgccaacccagcaccctcttcctcttctaacctgctttctgaggcttctgctcttcacctcctgctcgctgatggaaacctccagggcaaagctgaaggtttcttggggaagccaggaaagccagtatttcctatgtgtcagatctgcttggcttccaagaagggatgcatgggctttttggccagtgtttccaggaggctctgggcttcctgcttcttccccgcttcccccagagttcacagatgttgaagtttctgaaggttgacgtcactggaagtctgaccacaaacaagttggctgttactgtatttgaaacccagtacctttggcagctcacctctaaccagtaaaataagaggattccatggtttca

SEQ ID NO: 1106 - protein, 900 aa, Homo sapiens
MLRFLRRTFGRRSMQRYARGAAGRGAAGLGDERDGGPRGGPAAAASSSALPAAPGGSVFPAGGGPLLTGGAAVHISAAGAAKATLYCRVFLLDGTEVSVDLPKHAKGQDLFDQIVYHLDLVETDYFGLQFLDSAQVAHWLDHAKPIKKQMKIGPAYALHFRVKYYSSEPNNLREEFTRYLFVLQLRHDILSGKLKCPYETAVELAALCLQAELGECELPEHTPELVSEFRFIPNQTEAMEFDIFQRWKECRGKSPAQAELSYLNKAKWLEMYGVDMHVVRGRDGCEYSLGLTPTGILIFEGANKIGLFFWPKITKMDFKKSKLTLVVVEDDDQGREQEHTFVFRLDSARTCKHLWKCAVEHHAFFRLRTPGNSKSNRSDFIRLGSRFRFSGRTEYQATHGSRLRRTSTFERKPSKRYPSRRHSTFKASNPVIAAQLCSKTNPEVHNYQPQYHPNIHPSQPRWHPHSPNVSYPLPSPVLSSSDRLPFGIEENGGTPFLTAASGRHHHQHQHQHQHQHHSNYSLSLTLENKEGPLRSPNSSSKSLTKLSPGTPALFSEAAAHLKKLELETVKAAGPWPPLHININKAEEKKVSEKTLQTPLLPSPVADHVKCNILKAQLENASRVNIQGGKEESPFVNINKKSSLQDASVRSPIPIRVETAQPAVEKPEIKPPRVRKLTRQYSFDEDDLPPDLAEAVGVTTSTTTNTTTAATQVSVPLPSPKVQNVSSPHKSEGKGLLSPGAKSPSDRGGAFTLEPGDLLMDFTEATPLAEPASNPHCAHSRCSPPLSLPMKEETTGVCMYPPIKTRLIKTFPVDTMNPFPDTFTTGPQFTADFRDSKLQCCPGPTSPLIPAATLRPLTETVSTVQTIYTTRKPVSLAASAETLRQELEREKMMKRLLMTEL

SEQ ID NO: 1107 - DNA, 4735 bp, Homo sapiens
agaagtggaggggccgttcgaagagtcgtgagggggtgacgggttaagattcggagagagaggtgctagtggctggacttgacctggaaggaatcttctgctgactctcaacttttcctggaaaaaatggatcattcccaccatatggggatgagctatatggactccaacagtaccatgcaaccttctcaccatcacccaaccacttcagcctcacactcccatggtggaggagacagcagcatgatgatgatgcctatgaccttctactttggctttaagaatgtggaactactgttttccggtttggtgatcaatacagctggagaaatggctggagcttttgtggcagtgtttttactagcaatgttctatgaaggactcaagatagcccgagagagcctgctgcgtaagtcacaagtcagcattcgctacaattccatgcctgtcccaggaccaaatggaaccatccttatggagacacacaaaactgttgggcaacagatgctgagctttcctcacctcctgcaaacagtgctgcacatcatccaggtggtcataagctacttcctcatgctcatcttcatgacctacaacgggtacctctgcattgcagtagcagcaggggccggtacaggatacttcctcttcagctggaagaaggcagtggtagtggatatcacagagcattgccattgacatcaaactctatggcgtggccttatcgattgcagtgggaagttgttgaagacttgaagacgtgattcctgctccaatcatcccttcttgctcctctttgtgcacgtacacacacacacacacacacacacacacacacccctgctcaacagaggtttagtttacagtctctgaactaaagtagtaacctcccaaattgttttttctaataagctgagattcccatttctcttaaggagaagccacccatgagatgtcttttccttctccatcatcttagagccaagttatatgttcttgtctaatccatgtagctttttgttcaatgacttgatcatctgcttcctttttgaatttttaacagatagtaagtaaatttggtggttttttcccctgggtcagtgatggaaaggggttaacttcagccaggattgatggcagctgagggaaattcttgcccaactaaacccagaactcaaacttaacattagaaaataaggtccagggccggacacagtggcccatgcctgtaatcccagcactttggggggccaaggcaggctggatcacctgaggacaggagttcgagaccagtctggccaacatggggaaaccccgtctctactaaaaatacaaaaattagccgggcatggtggtgggcgcctgtaatcccagctactcagaaggctgaggcaggagaatcacttgaacctaggaggcggaggttgcagtgagccaagatggcgccattgcactccagcctgggtgacaagagtgaaactccatctcaaaaaaaaagaaaagaaggtccagcttttggattcaatgagtgggaaatacattgtgcctttctctagatgtgatacgttataccaaaatctttgtagtgtgcagagcggtggtttgagactaaatacaggcttagaacttgcagagtgtgtattcttggatggctgatgcatcgacttgcattcccacttaacactctgattagcatgaacttgccaatcaaaaaatgacaatcaatttgagaaaatagaaatagatatttttaaataaaaccattcacagtttactttgtcttgataccttggtttgtcccagctgaagtgaagcaagagagtttgaattaatttttccattataatgttttcgcatgtctgcctctaaaactgtgattttcaagctttagcgtgcatcagaaccacctgtagggcttgttaaaacactaattgctgggcctcaacccaaaagcccccaaagtggcacttctgagttcctgctgatgttacaagggaccacacttttgagaatctgtgctttaagctaaggaaatattgcctggtgggttggctgcctggtattgggcatggaaatttgaattgctgattggtagatggtgtgtctggacctaactcacgtagtaaatactgctgatcaatacctaatcattccacatttattgagctccacctgtgtgtatgtgtacccaagcacacatgtgtgaagggctatagccaaagtatttttactagcctgtatgaaatcactagtccttatttttaaaggtctatggtttcttggaagtagtttgattgttgagagagacctttgatctgcagtgtaaatctaccagtcatgggccagaagggcaaaagcccagctttctctttggaaagactcaggctgtggtttgttgatggccaggttttcctcaggctccaacaactgtgcttataccaagcagatcctcatcctccatataatcatctttgttattcgtgggggtttaattacattacaagtggccaaaacccctgttctcagtgaagaaccacattggatttgtattctgttcagttgtagtctacactgcagtcttattcctggttcaaactacctctttaaattgatttgtcttgtgctggtctgttaaatcctgccctccttggtgctagatccagttgtgcctcagggcagaggaaacaaaacacagctatcctgttggcctgtgttgtggttttgaagtttgtactttctctgtgggtgccagttaaatattggagagcaaggaatgtggacttgtatggctttgaaccaagagagggttatgagcctactggattgaggttaaaatccaagaaccaacatttagagctttgtgcttttctctcattccatcactttgtaatgatgatacttaacatgagcagggtgaatgacaggtactgacgaagtccaacacaaaggtataatacagcctgttgtctaaagccaaggagtcataaaaccatgagaaataaataggaatcaatagttagtagtgacattggtgctctctagaaatctcagcatgagctgctatagaataccctcccagcaacaaaacctaatcagtaaggccagctagacccaatggctcatgcctgtaatcccaacactttgggaggccaaggtgggaggatggcttgtgtccagaagttcgagaccagcctggacaacatagtgagatcctatctctataaaaaatcaaaaattagccaggcatggtggtgcatacctatagtcctggctatttgggaggctgaggcaggaggattgctttagccctggaggtcgaggctgcagtaagccatgattgcgccactgcactcagcccgggtgacaaagcaagaccctgtctcagaaaaaaagaaaattcaaggccagttaagacagaatgctatgactttgaaattcacagaaagaaataacagtttagattaggtcttcaggtattcaggatagagataatctcctgaaaaacctgaatttcagagattcttagactggctgccaaaggatgaagctagtgaaggagaaaaagcttaaattccatcttgagctcttggattgtgataatacaatgatttcattaacttttcatttctgtatacctgttcatttggaatttaatgcttgacttctttgttcattttggatctaaacttctcttttcttccttccccattcacatctattagaagactgcaccaccatttctttggcccccttactctgttgtcctttcccttttctttcagtttttttaatcgcatgtctagtatattaagtctccatagccctcctgatgcagtagacagtgctatgctgtggatataataccaaccagaaattggcatttataaacctgttaagagactttaagcatgtttcaagaggcagttgccccactggaatttctataaggctggtacccttcccagagttacagaatcttgggtgctatctctagtctgtgagggaggaactcccagcatccccattgcccacaaatgggatcctcactgtatccactaggagattagaaattaaggtttcttcactacttctatggtagggttgtctgaaattccctttcaggctgtgggtactggtcttgggttctagtcataaggggttccttataaggagcaggcggaggggagtacactttcatgtgatttaattttgatcctgccctctccagctgctccttcaaaagaaacatcaaaagatagaaactctgggctgggcacagtggctcacacactttgggaggccaagcgggggtgcagatcacctgaggtcaggagtttgagaccagcctggccaatgtggtgaaaccccatctctactaaaaatacaaaaattagctgggcgtggtggtgcatgcctgtaatcccagctactcgggaggctgaggcaggagaatcgcttgaacccaggaggcggaggttgcagtgagccaagatggcgccattgcactccagcctgggcgacaagagcaaaactccgtctcaaaaaaaaaaaagatacaaagtctgcatttgatataatgccttaattactgggtctacaattaatgttgactgttttagattgtaagctcctggagagcagtattgctgtagtaggaatgttttaacagtgtcatatgaaaaagaacaaaataaatattttgattttgtgattctaaaaaaaaaaaaaaaaaaaa

SEQ ID NO: 1108 - protein, 190 aa, Homo sapiens
MDHSHHMGMSYMDSNSTMQPSHHHPTTSASHSHGGGDSSMMMMPMTFYFGFKNVELLFSGLVINTAGEMAGAFVAVFLLAMFYEGLKIARESLLRKSQVSIRYNSMPVPGPNGTILMETHKTVGQQMLSFPHLLQTVLHIIQVVISYFLMLIFMTYNGYLCIAVAAGAGTGYFLFSWKKAVVVDITEHCH

SEQ ID NO: 1109 - DNA, 885 bp, Homo sapiens
ggagcatgatggaagtcgtagtaggaaatggcgtcgtggcattgaggggcatccctcctagaacctccaggaaaagctcgcggaagacgaggttctgcggagagagaggctccaagcagtctgggaagtgtagtccagttggcttagcagtagtttcgttgggggggagccgaggttccgggaaggggctaggccggcttgaaaagagattatgactgtaccttttaactttgtagctggaacacaagaagtgtttgtttaatgaatgacgtacacatttaagatctgtttggacgcggaggataatcctgtgaattgctaatagttcactgggtttggcccttagtgttgacttcagtatgctgagacggaaaccaacacgcctagagctaaagcttgatgacattgaagagtttgagaacattcgaaaggacctggagacccgtaagaaacagaaggaagatgtggaagttgtaggaggcagtgatggagaaggagccattgggcttagcagtgatcccaagagccgggaacaaatgatcaatgatcggattggttataaaccccaacccaagcccaataatcgttcatctcaatttggaagtcttgaattttagagatggattatcttgcatgccagagcgctggaatggaataaaatgatggcagaagtacaaaccagatttagagaattgagtgcttgcagtcaagcagaatgtacctcctgcagagacaaatcttctgcatgagattactgatgcttcacttgcactctaagctggaatccaaactctggtttgtctcttgaaaatttgactctataaaactgatctgattttctgtttttaaaaataaatatatttttggaaaaaaaaaaaaaaaaaa

SEQ ID NO: 1110 - protein, 85 aa, Homo sapiens
MLRRKPTRLELKLDDIEEFENIRKDLETRKKQKEDVEVVGGSDGEGAIGLSSDPKSREQMINDRIGYKPQPKPNNRSSQFGSLEF

SEQ ID NO: 1111 - DNA, 2756 bp, Homo sapiens
gaaagggagtgttcgggtttcgctggggcctcgcggctccagagcccagcatggcttcctcgcgagcctcttccacgcaggcaaccaaaactaaagcacccgacgacttagttgctccggtcgtgaagaaaccacacatctattatggaagtttggaagagaaggagagggagcgtctggccaaaggagagtctgggattttggggaaagacggacttaaagcagggatcgaagctggaaatattaatataacctctggagaagtgtttgaaattgaagagcatatcagcgagcgacaggcagaagtattggctgagtttgagagaaggaagcgagcccggcagatcaatgtttccacagatgactcagaggtcaaagcttgccttagagccttgggggaacccatcacactttttggagagggtcctgctgaaagaagagaaaggttaagaaatatcctctcagttgtcggtactgatgccttgaaaaagaccaaaaaggatgatgagaagtctaaaaagtccaaagaagagtatcagcaaacctggtatcatgaaggaccaaatagcttgaaggtggcaagactatggattgctaattattcgttgcccagggcaatgaaacgcttggaagaggcccgactccataaggagattcctgagacaacaaggacctcccagatgcaagagctgcacaagtctctccggtctttgaataatttttgcagtcagattggggatgatcggcctatctcctactgtcactttagtcccaattccaagatgctggccacagcttgttggagtgggctttgcaagctctggtctgttcctgattgcaacctccttcacactcttcgagggcataacacaaatgtaggagcaattgtattccatcccaaatccactgtctccttggacccaaaagatgtcaacctggcctcttgtgcggctgatggctctgtgaagctttggagtctcgacagtgatgaaccagtggcagatattgaaggccatacagtgcgtgtggcgcgggtaatgtggcatccttcaggacgtttcctgggcaccacctgctatgaccgttcatggcgcttatgggatttggaggctcaagaggagatcctgcatcaggaaggccatagcatgggtgtgtatgacattgccttccatcaagatggctctttggctggcactgggggactggatgcatttggtcgagtttgggacctacgcacaggacgttgtatcatgttcttagaaggccacctgaaagaaatctatggaataaatttctcccccaatggctatcacattgcaaccggcagtggtgacaacacctgcaaagtgtgggacctccgacagcggcgttgcgtctacaccatccctgctcatcagaacttagtgactggtgtcaagtttgagcctatccatgggaacttcttgcttactggtgcctatgataacacagccaagatctggacgcacccaggctggtccccgctgaagactctggctggccacgaaggcaaagtgatgggcctagatatttcttccgatgggcagctcatagccacttgctcatatgacaggaccttcaagctgtggatggctgaatagatgacaatgggaaaaggacttgaacctcaagctctctctaaggagctgttttcctcaaacgagaagaattgaagtgtttagttctatcatgttttctgccaattaccatgcatagaccctcagtagaattggatttccatgtcagcccccactccaggaaggcagcccaatccctaggtgatggggaacccctctcacggttgaaaatttattacctttttacgccctgccacgaactgtgtagacattgtttttattaatcttttgtttggccgggcgtggtggctcacgcctgtaatcctagcactttgggaggccgaggtgggtagatcgcttgagctcaggagttcaagacgagcctgggcaacatggcaaatgccgtctctgcaaaaaaatactaaaattagctggtcgcggtggcttctgcctgtgattccggctacttgggaggctgaggtgggagggattgcttaagcctgggaggcagaggttgcagtgagccgagattgcgccattgcactctagcctgtgtgacagagcaagaccctgtctcaaaaaaaaaaaaaatttgttcgaatgccttatagccttcctcacagcacccaggattgtgactgactctgcatttttaattcttgaaacttggctttccataacatggtacatgcttcaggactacatatgacccagagagcaaggtggctgaactatagtctggaagccctcaggtaaagaggcacatctcaccactcattggttaaacaatgcatcatagcgagcacttttcctttccctggagaatgggatgtgaagcagtagaccgcagccacgccgatggttatacagtgaagaagacttcacctcttcctattgagtttgcttggaatgctgacagcatcaggcaactctgaactgaacatttgctttgtcagaaaatatctttttttttactttgaagtttggcaaccttcatgttaccccaaagcaaaaccattgtgtcaggagtcaaacaaatgtttagaaagcaaacatgacgtctctattgtacaacctcctttctcttggctgtttaaaggatgtacttcgtgtattaaagggtactttatgttgaagtaaaaaaaaaaaaaaaaaaaaaaa

SEQ ID NO: 1112 - protein, 522 aa, Homo sapiens
MASSRASSTQATKTKAPDDLVAPVVKKPHIYYGSLEEKERERLAKGESGILGKDGLKAGIEAGNINITSGEVFEIEEHISERQAEVLAEFERRKRARQINVSTDDSEVKACLRALGEPITLFGEGPAERRERLRNILSVVGTDALKKTKKDDEKSKKSKEEYQQTWYHEGPNSLKVARLWIANYSLPRAMKRLEEARLHKEIPETTRTSQMQELHKSLRSLNNFCSQIGDDRPISYCHFSPNSKMLATACWSGLCKLWSVPDCNLLHTLRGHNTNVGAIVFHPKSTVSLDPKDVNLASCAADGSVKLWSLDSDEPVADIEGHTVRVARVMWHPSGRFLGTTCYDRSWRLWDLEAQEEILHQEGHSMGVYDIAFHQDGSLAGTGGLDAFGRVWDLRTGRCIMFLEGHLKEIYGINFSPNGYHIATGSGDNTCKVWDLRQRRCVYTIPAHQNLVTGVKFEPIHGNFLLTGAYDNTAKIWTHPGWSPLKTLAGHEGKVMGLDISSDGQLIATCSYDRTFKLWMAE

SEQ ID NO: 1113 - DNA, 1237 bp, Homo sapiens
cgattcaggggagggagcaactggagcctcaggccctccagagtagtctgcctgaccaccctggagcccacagaagcccaggacgtctcccgcgaagcctccccgtgtgtggctgaggatggctgagcagcagggccgggagcttgaggctgagtgccccgtctgctggaaccccttcaacaacacgttccatacccccaaaatgctggattgctgccactccttctgcgtggaatgtctggcccacctcagccttgtgactccagcccggcgccgcctgctgtgcccactctgtcgccagcccacagtgctggcctcagggcagcctgtcactgacttgcccacggacactgccatgctcgccctgctccgcctggagccccaccatgtcatcctggaaggccatcagctgtgcctcaaggaccagcccaagagccgctacttcctgcgccagcctcaagtctacacgctggaccttggcccccagcctgggggccagactgggccgcccccagacacggcctctgccaccgtgtctacgcccatcctcatccccagccaccactctttgagggagtgtttccgcaaccctcagttccgcatctttgcctacctgatggccgtcatcctcagtgtcactctgttgctcatattctccatcttttggaccaagcagttcctttggggtgtggggtgagtgctgttcccagacaagaaaccaaacctttttcggttgctgctgggtatggtgactacggagcctcatttggtattgtcttcctttgtagtgttgtttattttacaatccagggattgttcaggccatgtgtttgcttctgggaacaattttaaaaaaaaacaaaaaaacgaaaagcttgaaggactgggagatgtggagcgacctccgggtgtgagtgtggcgtcatggaagggcagagaagcggttctgaccacagagctccacagcaagttgtgccaaagggctgcacagtggtatccaggaacctgactagcccaaatagcaagttgcatttctcactggagctgcttcaaaatcagtgcatatttttttgagttgctcttttactatgggttgctaaaaaaaaaaaaaaaattgggaagtgagcttcaattctgtgggtaaatgtgtgtttgtttctctttgaatgtcttgccactggttgcagtaaaagtgttctgtattcattaaaaaaaaaaaaaaaaaaaaaaaaaaaaa

SEQ ID NO: 1114 - protein, 192 aa, Homo sapiens
MAEQQGRELEAECPVCWNPFNNTFHTPKMLDCCHSFCVECLAHLSLVTPARRRLLCPLCRQPTVLASGQPVTDLPTDTAMLALLRLEPHHVILEGHQLCLKDQPKSRYFLRQPQVYTLDLGPQPGGQTGPPPDTASATVSTPILIPSHHSLRECFRNPQFRIFAYLMAVILSVTLLLIFSIFWTKQFLWGVG

SEQ ID NO: 1115 - DNA, 2322 bp, Homo sapiens
ggctcggaggctgttcccacccccaggctccgcgttcccgccggccccagctccagccccgcagcccaccgtgcaaacatgcttagacagagaagagattaacttcagtggcttcccactaattacagagattaagaagtggctgcctgaactattttccaaaggatacacattacaaattattgaatagggcagctaaccaagaagatcctattggtttggggggaacacaacttccagcagccacaagggatgctgctactcaggtgccaactgaaacaagctcctccacagaaggtttcgtttaggttttgtgtcgtgatggggaaacagcaaagcaaactcaaacacagcacttataaatacggacagttgtggcctataattggaaaactggaaatgtggtgaaaaggttcaaaggacatgaacatgagatcaccaaggtagcctgtattcccaaatccagccagttcttcagtgcctctcgtgacaggatggtcatgatgtgggacttgcacggttcctcacaaccaaggcagcaattgtgtggccatgccatggtggtcaccggattggctgtgagtccagactcatcacagctgtgcactggctctcgggacaacaccctgcttctgtgggatgtggtgacaggacagagtgtggaaagagcatctgtctccaggaacgtggtcactcacctgtgctgggtccccagagaaccatacatactacagacctctgaagataaaaccctcagattatgggacagtcgggggctgcaggtagctcatatgtttcctgcaaagcagcacattcagacctactgtgaagtcagtgtggatggacacaagtgtatctcctgcagcaatggctttggaggagaaggctgtgaagccacgttgtgggacctaagacagactcgaaacagaatatgtgagtataaggggcatttccagactgtcgcatcctgcgtctttctaccaagagcattggccttgatgcctttaattgctacctcatcacatgattgcaaggtgaagatttggaaccaagatactggagcctgccttttcaccttgtctctggatggatcaggacccttgacttctctggctgttggtgacgccatctccttattgtgtgcaagttttaacagaggaattcacttactcagaatggaccacagccaagggctggaactgcaggaagtggcagcattctgaggccaagagacactcactggacaatatcaaaccatggctcctcctcagcatggctttgtgtctttcccagttatcttgaggggagtgggatgtagggctggtattctttgcttaggttcatttacaagatgtatcagtgttgtaagtccaataatttaagtccagtgattcaaaatcaggtatagagtccagaaacatggactacacataaggttctctatttaagttaaatacaaatgcaactttttagtgagcttttaggactactcttcaaaaaaagtgtattgctcagaatgatgacctgtaaatgtaagagtggcaggcctctgtctgtgaaagtcagaacacagggctcgagcctctggaactgaccctttgcaagtctttacaaaagaaaaaaggcagtggggagagagagtgttttggttacatcagaaataattgagatgggaaagaatagtgcagctccatagaggagacggactgtagacaatgagattaagcttcaatcactgctcctcagcaatgtgaagaatcaaagtcagggcaagaaagcgaaagcttggacttctattcaaagtggcagcagagtgggagggcggtacccttctagcccagtgctgctgagcttgtgtgaaaatcagacctgagatggcttgaagcagccaagaaccacatgggcattgcccagaattacaggagttagcacaccagctctacagataagaaaacattgaaattcaaagattaaggccaaaaatatctcacttgcaattttaatattttcatttggatttatataaatgaaacatatatatgttttggaatggccagagtgaggcaaaggggatccctgaaataacattagaacatacaggaaaaacgaggcaggcagatcactttaggtcaggagttcaagaccagcctgtacgtgcgtgcctgtagtcccagctactcgggaggctgagatgggagaatcacttgaacctgggaggcagagtttgcagtgagctgagattgtgccactgcactccagtctgtgtgacagaatgagaccttgtcttgaaaaaaaaaaaaacaaaaaaccacatacaggaaa

SEQ ID NO: 1116 - protein, 242 aa, Homo sapiens
MVMMWDLHGSSQPRQQLCGHAMVVTGLAVSPDSSQLCTGSRDNTLLLWDVVTGQSVERASVSRNVVTHLCWVPREPYILQTSEDKTLRLWDSRGLQVAHMFPAKQHIQTYCEVSVDGHKCISCSNGFGGEGCEATLWDLRQTRNRICEYKGHFQTVASCVFLPRALALMPLIATSSHDCKVKIWNQDTGACLFTLSLDGSGPLTSLAVGDAISLLCASFNRGIHLLRMDHSQGLELQEVAAF

SEQ ID NO: 1117 - DNA, 2455 bp, Homo sapiens
ggctcggaggctgttcccacccccaggctccgcgttcccgccggccccagctccagccccgcagcccaccgtgcaaacatgcttagacagagaagagattaacttcagtggcttcccactaattacagagattaagaagtggctgcctgaactattttccaaaggatacacattacaaattattgaatagggcagctaaccaagaagatcctattggtttggggggaacacaacttccagcagccacaagggatgctgctactcaggtgccaactgaaacaagctcctccacagaaggtttcgtttaggttttgtgtcgtgatggggaaacagcaaagcaaactcaaacacagcacttataaatacggcaggcctgatgaaattatagaagagagaattcaaactaaagcttttcaagagtatagcccagctcacatggataccgtctctgtcgtggctgctttgaactcagacctttgtgtctctggagggaaagataagacagttgtggcctataattggaaaactggaaatgtggtgaaaaggttcaaaggacatgaacatgagatcaccaaggtagcctgtattcccaaatccagccagttcttcagtgcctctcgtgacaggatggtcatgatgtgggacttgcacggttcctcacaaccaaggcagcaattgtgtggccatgccatggtggtcaccggattggctgtgagtccagactcatcacagctgtgcactggctctcgggacaacaccctgcttctgtgggatgtggtgacaggacagagtgtggaaagagcatctgtctccaggaacgtggtcactcacctgtgctgggtccccagagaaccatacatactacagacctctgaagataaaaccctcagattatgggacagtcgggggctgcaggtagctcatatgtttcctgcaaagcagcacattcagacctactgtgaagtcagtgtggatggacacaagtgtatctcctgcagcaatggctttggaggagaaggctgtgaagccacgttgtgggacctaagacagactcgaaacagaatatgtgagtataaggggcatttccagactgtcgcatcctgcgtctttctaccaagagcattggccttgatgcctttaattgctacctcatcacatgattgcaaggtgaagatttggaaccaagatactggagcctgccttttcaccttgtctctggatggatcaggacccttgacttctctggctgttggtgacgccatctccttattgtgtgcaagttttaacagaggaattcacttactcagaatggaccacagccaagggctggaactgcaggaagtggcagcattctgaggccaagagacactcactggacaatatcaaaccatggctcctcctcagcatggctttgtgtctttcccagttatcttgaggggagtgggatgtagggctggtattctttgcttaggttcatttacaagatgtatcagtgttgtaagtccaataatttaagtccagtgattcaaaatcaggtatagagtccagaaacatggactacacataaggttctctatttaagttaaatacaaatgcaactttttagtgagcttttaggactactcttcaaaaaaagtgtattgctcagaatgatgacctgtaaatgtaagagtggcaggcctctgtctgtgaaagtcagaacacagggctcgagcctctggaactgaccctttgcaagtctttacaaaagaaaaaaggcagtggggagagagagtgttttggttacatcagaaataattgagatgggaaagaatagtgcagctccatagaggagacggactgtagacaatgagattaagcttcaatcactgctcctcagcaatgtgaagaatcaaagtcagggcaagaaagcgaaagcttggacttctattcaaagtggcagcagagtgggagggcggtacccttctagcccagtgctgctgagcttgtgtgaaaatcagacctgagatggcttgaagcagccaagaaccacatgggcattgcccagaattacaggagttagcacaccagctctacagataagaaaacattgaaattcaaagattaaggccaaaaatatctcacttgcaattttaatattttcatttggatttatataaatgaaacatatatatgttttggaatggccagagtgaggcaaaggggatccctgaaataacattagaacatacaggaaaaacgaggcaggcagatcactttaggtcaggagttcaagaccagcctgtacgtgcgtgcctgtagtcccagctactcgggaggctgagatgggagaatcacttgaacctgggaggcagagtttgcagtgagctgagattgtgccactgcactccagtctgtgtgacagaatgagaccttgtcttgaaaaaaaaaaaaacaaaaaaccacatacaggaaa

SEQ ID NO: 1118 - protein, 367 aa, Homo sapiens
MLLLRCQLKQAPPQKVSFRFCVVMGKQQSKLKHSTYKYGRPDEIIEERIQTKAFQEYSPAHMDTVSVVAALNSDLCVSGGKDKTVVAYNWKTGNVVKRFKGHEHEITKVACIPKSSQFFSASRDRMVMMWDLHGSSQPRQQLCGHAMVVTGLAVSPDSSQLCTGSRDNTLLLWDVVTGQSVERASVSRNVVTHLCWVPREPYILQTSEDKTLRLWDSRGLQVAHMFPAKQHIQTYCEVSVDGHKCISCSNGFGGEGCEATLWDLRQTRNRICEYKGHFQTVASCVFLPRALALMPLIATSSHDCKVKIWNQDTGACLFTLSLDGSGPLTSLAVGDAISLLCASFNRGIHLLRMDHSQGLELQEVAAF

SEQ ID NO: 1119 - DNA, 2452 bp, Homo sapiens
ggctcggaggctgttcccacccccaggctccgcgttcccgccggccccagctccagccccgcagcccaccgtgcaaacatgcttagacagagaagagattaacttcagtggcttcccactaattacagagattaagaagtggctgcctgaactattttccaaaggatacacattacaaattattgaatagggcagctaaccaagaagatcctattggtttggggggaacacaacttccagcagccacaagggatgctgctactcaggtgccaactgaaacaagctcctccacagaaggtttcgtttaggttttgtgtcgtgatggggaaacagcaaagcaaactcaaacacagcacttataaatacgggcctgatgaaattatagaagagagaattcaaactaaagcttttcaagagtatagcccagctcacatggataccgtctctgtcgtggctgctttgaactcagacctttgtgtctctggagggaaagataagacagttgtggcctataattggaaaactggaaatgtggtgaaaaggttcaaaggacatgaacatgagatcaccaaggtagcctgtattcccaaatccagccagttcttcagtgcctctcgtgacaggatggtcatgatgtgggacttgcacggttcctcacaaccaaggcagcaattgtgtggccatgccatggtggtcaccggattggctgtgagtccagactcatcacagctgtgcactggctctcgggacaacaccctgcttctgtgggatgtggtgacaggacagagtgtggaaagagcatctgtctccaggaacgtggtcactcacctgtgctgggtccccagagaaccatacatactacagacctctgaagataaaaccctcagattatgggacagtcgggggctgcaggtagctcatatgtttcctgcaaagcagcacattcagacctactgtgaagtcagtgtggatggacacaagtgtatctcctgcagcaatggctttggaggagaaggctgtgaagccacgttgtgggacctaagacagactcgaaacagaatatgtgagtataaggggcatttccagactgtcgcatcctgcgtctttctaccaagagcattggccttgatgcctttaattgctacctcatcacatgattgcaaggtgaagatttggaaccaagatactggagcctgccttttcaccttgtctctggatggatcaggacccttgacttctctggctgttggtgacgccatctccttattgtgtgcaagttttaacagaggaattcacttactcagaatggaccacagccaagggctggaactgcaggaagtggcagcattctgaggccaagagacactcactggacaatatcaaaccatggctcctcctcagcatggctttgtgtctttcccagttatcttgaggggagtgggatgtagggctggtattctttgcttaggttcatttacaagatgtatcagtgttgtaagtccaataatttaagtccagtgattcaaaatcaggtatagagtccagaaacatggactacacataaggttctctatttaagttaaatacaaatgcaactttttagtgagcttttaggactactcttcaaaaaaagtgtattgctcagaatgatgacctgtaaatgtaagagtggcaggcctctgtctgtgaaagtcagaacacagggctcgagcctctggaactgaccctttgcaagtctttacaaaagaaaaaaggcagtggggagagagagtgttttggttacatcagaaataattgagatgggaaagaatagtgcagctccatagaggagacggactgtagacaatgagattaagcttcaatcactgctcctcagcaatgtgaagaatcaaagtcagggcaagaaagcgaaagcttggacttctattcaaagtggcagcagagtgggagggcggtacccttctagcccagtgctgctgagcttgtgtgaaaatcagacctgagatggcttgaagcagccaagaaccacatgggcattgcccagaattacaggagttagcacaccagctctacagataagaaaacattgaaattcaaagattaaggccaaaaatatctcacttgcaattttaatattttcatttggatttatataaatgaaacatatatatgttttggaatggccagagtgaggcaaaggggatccctgaaataacattagaacatacaggaaaaacgaggcaggcagatcactttaggtcaggagttcaagaccagcctgtacgtgcgtgcctgtagtcccagctactcgggaggctgagatgggagaatcacttgaacctgggaggcagagtttgcagtgagctgagattgtgccactgcactccagtctgtgtgacagaatgagaccttgtcttgaaaaaaaaaaaaacaaaaaaccacatacaggaaa

SEQ ID NO: 1120 - protein, 366 aa, Homo sapiens
MLLLRCQLKQAPPQKVSFRFCVVMGKQQSKLKHSTYKYGPDEIIEERIQTKAFQEYSPAHMDTVSVVAALNSDLCVSGGKDKTVVAYNWKTGNVVKRFKGHEHEITKVACIPKSSQFFSASRDRMVMMWDLHGSSQPRQQLCGHAMVVTGLAVSPDSSQLCTGSRDNTLLLWDVVTGQSVERASVSRNVVTHLCWVPREPYILQTSEDKTLRLWDSRGLQVAHMFPAKQHIQTYCEVSVDGHKCISCSNGFGGEGCEATLWDLRQTRNRICEYKGHFQTVASCVFLPRALALMPLIATSSHDCKVKIWNQDTGACLFTLSLDGSGPLTSLAVGDAISLLCASFNRGIHLLRMDHSQGLELQEVAAF

SEQ ID NO: 1121 - DNA, 2354 bp, Homo sapiens
cccgccgccacctgcgacaggtggagcgcacggggcgggcgcacggccatgtccgccgagggcgcggagccggggccggggtccgggtccgggcccgggccggggccactctgccccgaacacggccaggctctgagctggttctgcggctccgagcgacggcccgtgtgcgccgcctgcgcggggttgggcggtcgctgccgggggcaccgcatccgccgggcggaggagcgcgccgaggagctgcggaacaagattgtggaccagtgtgagaggctgcagttacagagtgctgccatcaccaagtatgtggcggacgtcctgccggggaagaatcaaagagcagtgagcatggccagtgcagcgagggaactggttatccagcggttgagtctggtgaggagtctttgcgagagcgaggagcagcggttactggaacaggtgcatggcgaagaggagcgggcccaccagagcatcctgacacagcgggtgcactgggccgaggcgctgcagaaacttgacaccatccgcactggcctggtgggcatgcttactcacctggatgacctccagctgattcagaaggagcaagagattttcgagaggaccgaagaagcagagggcattttggatccccaggagtcggaaatgttaaactttaatgagaagtgcactcggagcccactactgacccaactctgggcaacggcggttcttgggtctctctcaggcacagaggacatacggatcgatgagaggacagtcagccccttcctgcaattgtcagatgatcgaaagaccctgaccttcagcaccaagaagtcaaaggcctgtgcagatggcccggagcgcttcgaccactggcccaatgccctggctgccacctccttccagaatgggctccatgcctggatggtgaatgtccagaacagttgtgcctataaggtgggcgtggcttcaggccacctgccccgcaagggttctggcagtgactgccgtctgggccacaatgccttctcctgggtcttctctcgctatgatcaggagtttcgtttctcacacaatgggcagcacgagcccctggggctgctgcggggcccagcccagctgggtgtagtgctggacttgcaggttcaggagctgctcttctatgagccagcctccggcacagtgctctgtgcccatcatgtgtccttcccggggcccctcttcccagtctttgctgtggccgatcagaccatttctatcgtccgctgacctctggccacaggaagccaggtccaccgcccaccaccctttcaggccatgtttctactcagtgtgcttttcccaaatgatgtgtgtggtgtttctaagagaaacagggcccataaccagtgggcagctttaggagggatggggatctgtttcagatctaggcataacctgtaaatcacaggtgtccaaacttttggcttccctgggccacatttgaagaagaattttcttgggccacataaaatacactaacgatagctgatgagctaaaaaaaaaaaaaaagtctgtgtataatttttgtgatatctgccaccacagataagcaaaaaagtccttgcattcaaagggttggagattgctgctttgagtgctgggtacctgtggggaacctactactccctgggccttagtctcccaaatccaccatgcatctgcccctctgagggtgtcttcactttgtctctggcatctagcatggtgcctggtgcatagtgagcatgcaataaatatttggcaggtgagtggatggatagatggataggtgaatgtaggtggacaggtgactgggtggatgttgtggtctctggagaagcactgccattcagcctcctgctccagctgttcacatgcagaaatgctctcttcacaggcagagaagcctgtggctaaagtttccacatcccattaactcagtgcttttgtctttttcatgacatggcacatagagaaaatatttttttctagcacacaagagcaacctgaaaggctgctcctggccagaggactctgtcccgggggaccgtgtcctcccccatgtcctgcctaggccctcagaggaccaggggatcatgtctccaggtaacccgactgtagcccctgctggctgagctccagcctgtgcccactgataatagcagggacggccttttctcttagagcagctgataagtttccctacctgatggccccctctgacataaactgcacacctggggtgatggcttaaagccagaaagagctgagggagttaagagggccaaccttagggcacgtgggcattattaaaggtcttaaaagcattgaagatttaaaaaaa

SEQ ID NO: 1122 - protein, 402 aa, Homo sapiens
MSAEGAEPGPGSGSGPGPGPLCPEHGQALSWFCGSERRPVCAACAGLGGRCRGHRIRRAEERAEELRNKIVDQCERLQLQSAAITKYVADVLPGKNQRAVSMASAARELVIQRLSLVRSLCESEEQRLLEQVHGEEERAHQSILTQRVHWAEALQKLDTIRTGLVGMLTHLDDLQLIQKEQEIFERTEEAEGILDPQESEMLNFNEKCTRSPLLTQLWATAVLGSLSGTEDIRIDERTVSPFLQLSDDRKTLTFSTKKSKACADGPERFDHWPNALAATSFQNGLHAWMVNVQNSCAYKVGVASGHLPRKGSGSDCRLGHNAFSWVFSRYDQEFRFSHNGQHEPLGLLRGPAQLGVVLDLQVQELLFYEPASGTVLCAHHVSFPGPLFPVFAVADQTISIVR

SEQ ID NO: 1123 - DNA, 4102 bp, Homo sapiens
agttcgcaaagtccgggcttgcggccgggcggcgcagaggcgcggaggctccccgggcggctgcatcccggggctgccccggacatgccccgcaccccttgtcggacgcccgcgccgcttcaccggctgccactccccggagtgctctgggactagagcgccctccgccccaacttctgactttggggtcccccagccctagaggaacgggcgcccggctgggggagccccgggcatggtgtgacggggcagtcaggtcagctttgcggcgcccccaaactccagccacccgtcgtctccgtgccctccagaatgtagctgctgaccccgcgccccccggactccagcagcagtctccgccacctccgggctccagcagccaactcttgtgtctctcaggaacccgccgacgtctccgcgtcccccggattccaggttcgcgacccccgccgtcttcgcgcctccgggactctagcagcggtctccgcgaccccctaggatccagccactgtacccgtgctccccaaacccaggctccagccgtcgtctccgcgctcccggggatccagctgtcgcgccagtacccgcgaggacagcggcaccgcccacaccccgcgcgctcagagcccggccgggcctcggcgtggagatgaacgcgccgctggacggcctgtcggtgagctcgtcctccaccggctcgctgggctcggcggccggggcgggcggcggcgggggcgcggggctgcggttactgtctgccaacgtgcgccagctgcaccaagcgctgaccgcgctgctgagcgaggcggagcgggagcagttcacccactgcctgaacgcttaccacgcgcgccgcaacgtcttcgacctggtgcgcaccctgcgcgtgctgctggacagtccggtcaagcggcgcctgctgcccatgcttcgtctggtcatcccgcgctccgaccagctgctcttcgaccaatacacggccgagggcctctacctgcccgccaccaccccctacaggcagcccgcctggggcggccccgacagcgcggggccaggggaggtgcgcctggtgagtttgcggcgtgccaaggcccacgagggcttgggcttcagcatccgtgggggctcggagcacggcgtgggcatctacgtgtctctggtggaaccaggctctctagctgagaaggaaggactgcgggtcggggaccagattctgcgcgtcaacgacaaatccctggcccgggtgacccacgcggaggccgtcaaggctctgaagggctccaagaagctggtgctgtctgtgtactcagcagggcgcatccctgggggctacgtcaccaaccacatctacacctgggtggacccgcagggccgcagcatctccccaccctcgggcctgccccagccccacggtggtgccctgaggcagcaggagggtgaccggaggagcaccctgcacctcctgcaaggaggggatgagaaaaaggtgaacctggtgctgggggacggccggtccctgggcctcacgatccgtgggggagctgagtacggccttggcatttacatcactggcgtggacccaggctctgaagcagaaggcagcgggctcaaggttggggaccagattctagaagtgaatgggcggagctttctcaacatcctacacgacgaggctgtcaggctgcttaagtcatctcggcacctcatcctgacagtgaaggacgtcgggaggctgccccatgcccgcaccactgtggacgagaccaagtggatcgccagttcccggatcagggagaccatggcgaactcggcagggtttcttggcgatctcacaacagaaggaataaacaagccaggattttacaagggcccagccggctcccaggtgaccctgagcagcctggggaaccagacacgagtgctgctggaggagcaggctcggcacctgctgaacgagcaggaacacgccaccatggcctactacctggatgagtaccgtggtggcagcgtctctgtggaggccctcgtcatggccctgttcaagctgctcaacacccacgccaagttctcactcctctctgaggtgagaggcaccatttccccgcaagacctagaacgcttcgaccacctggtgctgaggcgtgagattgagtccatgaaggcgcggcagcccccaggccccggggctggggacacctactccatggtctcctacagtgacacgggttcatccacaggcagccacggcacctccaccaccgtcagctcggccaggaacactctggacctggaggaaactggcgaggctgtccagggcaatatcaacgccctcccagatgtgtccgtggatgatgtcagatccacctcccaggggctgtcaagcttcaagccactgcctcgcccaccacctctggcccaaggcaacgacctcccactaggccagccaaggaagctggggagagaggacctccagccaccttcctccatgccttcctgctcgggcactgtcttctcggctccacagaaccgcagcccgccagcgggcaccgcacccaccccagggacctcctctgcacaggacttgccctcttcccccatctatgcctccgtctcccctgccaaccccagctccaagaggccgctggacgcccatctggccctggtcaaccaacaccccatcggccccttcccacgggtccagtcacccccgcacctgaaaagcccctctgcagaggccacagtggctgggggctgccttctgcccccatcaccctctggccacccagaccagacaggcacaaaccagcactttgtcatggtggaggtccaccgccccgacagcgagccagacgtcaatgaagtgagggcgctgccccagacgcgcacagcctctacgctctcccacctctcggacagcgggcagactctaagcgaggacagtggtgtggatgctggcgaggcagaggccagcgccccaggccgaggaaggcagtcggtgtccaccaagagcaggagtagcaaggagctgcctcggaacgagaggcccacagatggggccaacaaaccgcctggacttctggagcccacgtccactctggtccgtgtgaagaaaagtgcggccaccctgggcatcgccatcgagggtggcgccaacacccgccagcccctgcctaggattgtcactattcagagaggcggctcagctcacaactgtgggcagctcaaggtgggccacgtgattctggaagtgaatgggctgacgcttcggggcaaggagcaccgggaggccgcccgcattatcgccgaggccttcaagactaaggaccgtgactacattgactttctggtcactgagttcaatgtgatgctctagaggccaaggcctgagggcctcccaccactgcccagcccctggtcccagtccctttccaccgttggcttcatcaagctccttgcggggttggggctgcatggccagggtggcaggaagacatcccccctccatcccagcccactggaccagaactgggagaggaagagagcaggacaaggcagacagaaggtcaggtcaggaactggtgctgtactgggtacacagtaggcgcccaggacaagtgggttgcaagacaggaagaaaggaaaaggaagggcagagtgctggtttctccaggttgggttgggggcactgctgtcccccctccagctaggacccagcccatccccagatgcctgagcctttgtccaaagtgaggtcactcgagaattcatggacacggcccccagtcagggggcatcttgcaagacctttagtgccacaaataagcatcgagcacctccccattcacacccccattcctcctggctccttatcccccatggtgtttattatttatttccctccccatgcccctggggaccccaaggccccagcttccctctgcacccccagcctatcccagaggccttgcaggtgaccagcagtgtcattgtatttatatacagagcttatgactttaatttttcaataaagaaatctgaacaaggttaaaaaaaaaaaaaaaaaaaaaaaaaaaaaaaaaaaaaaaaaaaaaaaaaaaaaaaa

SEQ ID NO: 1124 - protein, 907 aa, Homo sapiens
MNAPLDGLSVSSSSTGSLGSAAGAGGGGGAGLRLLSANVRQLHQALTALLSEAEREQFTHCLNAYHARRNVFDLVRTLRVLLDSPVKRRLLPMLRLVIPRSDQLLFDQYTAEGLYLPATTPYRQPAWGGPDSAGPGEVRLVSLRRAKAHEGLGFSIRGGSEHGVGIYVSLVEPGSLAEKEGLRVGDQILRVNDKSLARVTHAEAVKALKGSKKLVLSVYSAGRIPGGYVTNHIYTWVDPQGRSISPPSGLPQPHGGALRQQEGDRRSTLHLLQGGDEKKVNLVLGDGRSLGLTIRGGAEYGLGIYITGVDPGSEAEGSGLKVGDQILEVNGRSFLNILHDEAVRLLKSSRHLILTVKDVGRLPHARTTVDETKWIASSRIRETMANSAGFLGDLTTEGINKPGFYKGPAGSQVTLSSLGNQTRVLLEEQARHLLNEQEHATMAYYLDEYRGGSVSVEALVMALFKLLNTHAKFSLLSEVRGTISPQDLERFDHLVLRREIESMKARQPPGPGAGDTYSMVSYSDTGSSTGSHGTSTTVSSARNTLDLEETGEAVQGNINALPDVSVDDVRSTSQGLSSFKPLPRPPPLAQGNDLPLGQPRKLGREDLQPPSSMPSCSGTVFSAPQNRSPPAGTAPTPGTSSAQDLPSSPIYASVSPANPSSKRPLDAHLALVNQHPIGPFPRVQSPPHLKSPSAEATVAGGCLLPPSPSGHPDQTGTNQHFVMVEVHRPDSEPDVNEVRALPQTRTASTLSHLSDSGQTLSEDSGVDAGEAEASAPGRGRQSVSTKSRSSKELPRNERPTDGANKPPGLLEPTSTLVRVKKSAATLGIAIEGGANTRQPLPRIVTIQRGGSAHNCGQLKVGHVILEVNGLTLRGKEHREAARIIAEAFKTKDRDYIDFLVTEFNVML

SEQ ID NO: 1125 - DNA, 1611 bp, Homo sapiens
gtgacaacgggggcgaagcgcaggcgcaaggagcaagcgcagattgtgggcggctgtgtcagctgacccaaggggccttcgaggtgccttaggccgcttgccttgctctcagaatcgctgccgccatggctagtcagtctcaggggattcagcagctgctgcaggccgagaagcgggcagccgagaaggtgtccgaggcccgcaaaagaaagaaccggaggctgaagcaggccaaagaagaagctcaggctgaaattgaacagtaccgcctgcagagggagaaagaattcaaggccaaggaagctgcggcattgggatcccgtggcagttgcagcactgaagtggagaaggagacccaggagaagatgaccatcctccagacatacttccggcagaacagggatgaagtcttggacaacctcttggcttttgtctgtgacattcggccagaaatccatgaaaactaccgcataaatggatagaagagagaagcacctgtgctgtggagtggcattttagatgccctcacgaatatgaagcttagcacagctctagttacattcttatgatatggcattaaattatttccatatattatataataggtccttccactttttggagagtagcaaatctagcttttttgtacagacttagaaattatctaaagatttcatctttttacctcatatttcttaggaatttaatggttatatgttgtctttttttcctatgtcttttggctcaagcaacatgtatatcagtgttgactttttctttcttagatctagtttaaaaaaaaaaaaaaccacataacaattctttgaagaaaggaagggattaaataatttttttccctaacactttcttgaaggtcaggggctttatctatgaaaaagtagtaaatagttctttgtaacctgtgtgaagcagcagccagccttaaagtagtccattcttgctaatggttagaacagtgaatactagtggaattgtttgggctgcttttagtttctcttaatcaaaattactagatgatagaattcaagaacttgttacatgtattacttggtgtatcgataatcatttaaaagtaaagactctgtcatgcatttttccccattcttttttttttccctgtctccgtgacaaccagtggttcttcatttttgatcatgcgaaatgcattttgacccagatggtctgcagaacttcacttaggacattagcacacaaatagcacacatatcacatacccatttatatacataattagaaaatgttcctgatacatgtgtcatgtgatttcttccaacaaatgttttggaaaacagcaagcaactagtctgtaggttgtcttttctctagagatccttgtcctgggacagcctggggcaagttattaagcatatttccttcctggtgggctagatgatgtgcattatacctgtagtaccttcatactagcccttacaagttaaatgtcctgtggccatcttagccgaaagtctttggttgcaaaatcttataggtaaaaacagttgaaagaacattatgggatttccttgcttgttctgatacaatacaactagatgaccttaaaaaccctca

SEQ ID NO: 1126 - protein, 118 aa, Homo sapiens
MASQSQGIQQLLQAEKRAAEKVSEARKRKNRRLKQAKEEAQAEIEQYRLQREKEFKAKEAAALGSRGSCSTEVEKETQEKMTILQTYFRQNRDEVLDNLLAFVCDIRPEIHENYRING

SEQ ID NO: 1127 - DNA, 4606 bp, Homo sapiens
ggttcgcttcggcgtccgccgtctccgcagctgcctcctcttcctccttcgccaccgccgccaccgccgccgccgcccgcagcaccgcagcccctcccgccatggccgccgccggcgcccggctcagccccggccccggctcggggctccgggggcggccgaggctctgcttccacccggggccgccgccactgctgccgctgctgctgctgttcctgctcctgctgccgccgccgccgctgctggccggcgccaccgccgctgcctcgcgggagcccgacagcccgtgccggctgaagaccgtcacggtgtccacactgcccgccctgcgggagagcgacatcggctggagcggcgcccgcgccggggccggggctgggaccggggccggagccgccgccgccgccgcgtccccgggctctcctggctctgccggcaccgccgccgagtcgcgcctcctgctctttgtgcgtaacgagctgccggggcgcatcgcggtgcaggacgacctggacaacaccgagctgcccttcttcaccctggagatgtctggcacagcggcggacatctcgctggtgcactggagacagcagtggctggagaatggcaccttgtacttccacgtctccatgagcagctccgggcagctggcccaagccaccgcccccactctccaggagccctcggagattgttgaggagcagatgcacatcctccacatttctgtgatgggtggcctcatcgcgctgctgctgctgctgctggtgttcaccgtggcgctgtacgcccagcgacgttggcagaagcgtcgccgcatcccccagaagagcgcaagcacagaagccactcatgagatccactacatcccatctgtgctgctgggtccccaggcgcgggagagcttccgttcatcccggctgcaaacccacaattccgtcattggcgtgcccatccgggagactcccatcctggatgactatgactgtgaggaggatgaggagccacctaggcgggccaaccatgtctcccgcgaggacgagtttggcagccaggtgacccacactctggacagtctgggacatccaggggaagagaaggtggactttgagaagaaaggaggaatcagctttgggagagccaaggggacgtcgggctcagaggcagacgatgaaactcagctgacattctacacggagcagtaccgcagtcgccgccgcagcaaaggtttgctgaaaagcccagtgaacaagacagccctgacactgattgctgtgagttcctgcatcctggccatggtgtgtggcagccagatgtcttgtccactcactgtgaaggtgactctgcatgtgcccgagcacttcatagcagatggaagcagcttcgtggtgagtgaagggagctacctggacatctccgactggttaaacccggccaagctttccctgtattaccagatcaatgccacctccccatgggtgagggacctctgtggacaaaggacgacagatgcctgtgagcagctctgcgacccagaaaccggagagtgcagctgtcatgaaggctatgcccctgaccctgttcacagacacctgtgtgtgcgcagtgactggggacagagtgaaggaccttggccctacacgacacttgagaggggctatgatctggtgacaggggagcaagcccctgaaaagattctcaggtctactttcagcttgggccaaggcctctggcttcctgtcagcaaaagctttgtggttccgcctgtggagctgtccatcaaccccctggccagctgcaagaccgatgtgctcgtcacggaagaccctgcagatgtcagggaagaagcgatgctgtccacatactttgaaaccatcaatgacctgctgtcttccttcgggccagttcgtgactgctctcggaacaatgggggctgcactcgcaacttcaagtgtgtgtctgaccggcaggtggattcctcgggatgtgtgtgccctgaggagctgaaacccatgaaggatggctctggctgctacgaccactccaaaggcattgactgctctgatggctttaatggcggctgtgagcagctgtgcctgcagcagacgctgcccctgccctacgatgccacttcgagcaccatcttcatgttctgcggttgcgtggaggagtacaaactggctcctgatggaaaatcctgcttaatgctctcagatgtctgcgagggccccaagtgcctcaaacctgactccaaattcaatgataccctctttggagagatgctacatggttacaacaaccggacccagcatgtgaaccaaggccaagtcttccagatgacctttagggagaacaacttcatcaaggactttccccagctggccgatgggctgttggtgatcccgctgccggtggaggagcagtgccggggggtcctctccgagccccttccggacctccaactgctcactggagatatcaggtatgatgaggccatgggttaccccatggtgcagcagtggcgggtccggagcaacctctaccgtgtgaagctcagcaccatcaccctcgcagcaggcttcactaatgttctcaagatcctgaccaaggagagcagtcgggaggagctgctgtccttcatccagcactatggctcccactacatcgcagaggccctctatggctcagagctcacctgcatcatccactttcccagcaagaaggtccagcagcagctgtggctccagtatcagaaagagaccacagagctgggcagcaagaaggagctcaagtccatgcccttcatcacctacctctcaggtttgctgacagcccagatgctgtcagatgaccagctcatttcaggtgtggagattcgctgtgaggagaaggggcgctgtccatctacctgtcacctttgccgccggccaggcaaggagcagctgagccccacaccagtgctgctggaaatcaaccgtgtggtgccactttataccctcatccaagacaatggcacaaaggaggccttcaagagtgcactgatgagttcctactggtgctcagggaaaggggatgtgatcgatgactggtgcaggtgtgacctcagcgcctttgatgccaatgggctccccaactgcagcccccttctgcagccggtgctgcggctgtccccaacagtggagccctccagtactgtggtctccttggagtgggtggatgttcagccagctattgggaccaaggtctccgactatattctgcagcataagaaagtggatgaatacacagacactgacctgtacacaggagaattcctgagttttgctgatgacttactctctggcctgggcacatcttgtgtagcagctggtcgaagccatggagaggtccctgaagtcagtatctactcagtcatcttcaagtgtctggagcccgacggtctctacaagttcactctgtatgctgtggatacacgagggaggcactcagagctaagcacggtgaccctgaggacggcctgtccactggtagatgacaacaaggcagaagaaatagctgacaagatctacaatctgtacaatgggtacacaagtggaaaggagcagcagatggcctacaacacactgatggaggtctcagcctcgatgctgttccgagtccagcaccactacaactctcactatgaaaagtttggcgacttcgtctggagaagtgaggatgagctggggcccaggaaggcccacctgattctacggcgactggagagggtgagtagccactgctccagcctcctgcggagtgcctacatccagagccgcgtggaaacagtgccctatcttttctgccgcagcgaggaggtccggcctgcaggcatggtgtggtatagcatcctcaaggacaccaaaatcacgtgtgaggagaagatggtgtcaatggcccgaaacacgtacggggagtccaagggccggtgagggagggtattgccctccgtgagcacagagactctccatgggagggggagcagtattctcctggatcctggggcctgggtgggctgggggacagctgaggatgggcctagcagatgaagcttgccagcaaggccaaagcaaacggtttctcctgtggatagtggacagagacctttgtaaccaatggaattattcatttttctctatcttttattttttcaaagatattatttgactctatcaaaagtctctcctttttaaaccttttcttatggatggctgtcaatcccgaggcagaagttttcaggtggagaccaagcggcctttgctcttcttccttcttcctgccacactctgctttcttcctgccatggacccctggaggagacctatggagggacagttttgacctgacccctagaggagacagttttgacctcttcagcaccaggaaggaagctctgaggatggttgcagtgaggaagcatgggtctttaaggacttctctctcttttttgctggacattattgagtttgtgggaccctgcctcttcctgctacctgtgggtctgcccagagtccctgcaggcctgtccatgcattaaaaattcctattgtctctcaaaaaaaaaaaaaaa

SEQ ID NO: 1128 - protein, 1288 aa, Homo sapiens
MAAAGARLSPGPGSGLRGRPRLCFHPGPPPLLPLLLLFLLLLPPPPLLAGATAAASREPDSPCRLKTVTVSTLPALRESDIGWSGARAGAGAGTGAGAAAAAASPGSPGSAGTAAESRLLLFVRNELPGRIAVQDDLDNTELPFFTLEMSGTAADISLVHWRQQWLENGTLYFHVSMSSSGQLAQATAPTLQEPSEIVEEQMHILHISVMGGLIALLLLLLVFTVALYAQRRWQKRRRIPQKSASTEATHEIHYIPSVLLGPQARESFRSSRLQTHNSVIGVPIRETPILDDYDCEEDEEPPRRANHVSREDEFGSQVTHTLDSLGHPGEEKVDFEKKGGISFGRAKGTSGSEADDETQLTFYTEQYRSRRRSKGLLKSPVNKTALTLIAVSSCILAMVCGSQMSCPLTVKVTLHVPEHFIADGSSFVVSEGSYLDISDWLNPAKLSLYYQINATSPWVRDLCGQRTTDACEQLCDPETGECSCHEGYAPDPVHRHLCVRSDWGQSEGPWPYTTLERGYDLVTGEQAPEKILRSTFSLGQGLWLPVSKSFVVPPVELSINPLASCKTDVLVTEDPADVREEAMLSTYFETINDLLSSFGPVRDCSRNNGGCTRNFKCVSDRQVDSSGCVCPEELKPMKDGSGCYDHSKGIDCSDGFNGGCEQLCLQQTLPLPYDATSSTIFMFCGCVEEYKLAPDGKSCLMLSDVCEGPKCLKPDSKFNDTLFGEMLHGYNNRTQHVNQGQVFQMTFRENNFIKDFPQLADGLLVIPLPVEEQCRGVLSEPLPDLQLLTGDIRYDEAMGYPMVQQWRVRSNLYRVKLSTITLAAGFTNVLKILTKESSREELLSFIQHYGSHYIAEALYGSELTCIIHFPSKKVQQQLWLQYQKETTELGSKKELKSMPFITYLSGLLTAQMLSDDQLISGVEIRCEEKGRCPSTCHLCRRPGKEQLSPTPVLLEINRVVPLYTLIQDNGTKEAFKSALMSSYWCSGKGDVIDDWCRCDLSAFDANGLPNCSPLLQPVLRLSPTVEPSSTVVSLEWVDVQPAIGTKVSDYILQHKKVDEYTDTDLYTGEFLSFADDLLSGLGTSCVAAGRSHGEVPEVSIYSVIFKCLEPDGLYKFTLYAVDTRGRHSELSTVTLRTACPLVDDNKAEEIADKIYNLYNGYTSGKEQQMAYNTLMEVSASMLFRVQHHYNSHYEKFGDFVWRSEDELGPRKAHLILRRLERVSSHCSSLLRSAYIQSRVETVPYLFCRSEEVRPAGMVWYSILKDTKITCEEKMVSMARNTYGESKGR

SEQ ID NO: 1129 - DNA, 4756 bp, Homo sapiens
ggttcgcttcggcgtccgccgtctccgcagctgcctcctcttcctccttcgccaccgccgccaccgccgccgccgcccgcagcaccgcagcccctcccgccatggccgccgccggcgcccggctcagccccggccccggctcggggctccgggggcggccgaggctctgcttccacccggggccgccgccactgctgccgctgctgctgctgttcctgctcctgctgccgccgccgccgctgctggccggcgccaccgccgctgcctcgcgggagcccgacagcccgtgccggctgaagaccgtcacggtgtccacactgcccgccctgcgggagagcgacatcggctggagcggcgcccgcgccggggccggggctgggaccggggccggagccgccgccgccgccgcgtccccgggctctcctggctctgccggcaccgccgccgagtcgcgcctcctgctctttgtgcgtaacgagctgccggggcgcatcgcggtgcaggacgacctggacaacaccgagctgcccttcttcaccctggagatgtctggcacagcggcggacatctcgctggtgcactggagacagcagtggctggagaatggcaccttgtacttccacgtctccatgagcagctccgggcagctggcccaagccaccgcccccactctccaggagccctcggagattgttgaggagcagatgcacatcctccacatttctgtgatgggtggcctcatcgcgctgctgctgctgctgctggtgttcaccgtggcgctgtacgcccagcgacgttggcagaagcgtcgccgcatcccccagaagagcgcaagcacagaagccactcatgagatccactacatcccatctgtgctgctgggtccccaggcgcgggagagcttccgttcatcccggctgcaaacccacaattccgtcattggcgtgcccatccgggagactcccatcctggatgactatgactgtgaggaggatgaggagccacctaggcgggccaaccatgtctcccgcgaggacgagtttggcagccaggtgacccacactctggacagtctgggacatccaggggaagagaaggtggactttgagaagaaagcagcagctgaggcgactcaggagacagtggagtccctgatgcagaagttcaaggagagtttccgcgctaacacgcccatcgagatcggtcagctgcaaccacccctgcgcagcacatcggcagggaagaggaagcggaggagcaagtctcgaggaggaatcagctttgggagagccaaggggacgtcgggctcagaggcagacgatgaaactcagctgacattctacacggagcagtaccgcagtcgccgccgcagcaaaggtttgctgaaaagcccagtgaacaagacagccctgacactgattgctgtgagttcctgcatcctggccatggtgtgtggcagccagatgtcttgtccactcactgtgaaggtgactctgcatgtgcccgagcacttcatagcagatggaagcagcttcgtggtgagtgaagggagctacctggacatctccgactggttaaacccggccaagctttccctgtattaccagatcaatgccacctccccatgggtgagggacctctgtggacaaaggacgacagatgcctgtgagcagctctgcgacccagaaaccggagagtgcagctgtcatgaaggctatgcccctgaccctgttcacagacacctgtgtgtgcgcagtgactggggacagagtgaaggaccttggccctacacgacacttgagaggggctatgatctggtgacaggggagcaagcccctgaaaagattctcagcttgggccaaggcctctggcttcctgtcagcaaaagctttgtggttccgcctgtggagctgtccatcaaccccctggccagctgcaagaccgatgtgctcgtcacggaagaccctgcagatgtcagggaagaagcgatgctgtccacatactttgaaaccatcaatgacctgctgtcttccttcgggccagttcgtgactgctctcggaacaatgggggctgcactcgcaacttcaagtgtgtgtctgaccggcaggtggattcctcgggatgtgtgtgccctgaggagctgaaacccatgaaggatggctctggctgctacgaccactccaaaggcattgactgctctgatggctttaatggcggctgtgagcagctgtgcctgcagcagacgctgcccctgccctacgatgccacttcgagcaccatcttcatgttctgcggttgcgtggaggagtacaaactggctcctgatggaaaatcctgcttaatgctctcagatgtctgcgagggccccaagtgcctcaaacctgactccaaattcaatgataccctctttggagagatgctacatggttacaacaaccggacccagcatgtgaaccaaggccaagtcttccagatgacctttagggagaacaacttcatcaaggactttccccagctggccgatgggctgttggtgatcccgctgccggtggaggagcagtgccggggggtcctctccgagccccttccggacctccaactgctcactggagatatcaggtatgatgaggccatgggttaccccatggtgcagcagtggcgggtccggagcaacctctaccgtgtgaagctcagcaccatcaccctcgcagcaggcttcactaatgttctcaagatcctgaccaaggagagcagtcgggaggagctgctgtccttcatccagcactatggctcccactacatcgcagaggccctctatggctcagagctcacctgcatcatccactttcccagcaagaaggtccagcagcagctgtggctccagtatcagaaagagaccacagagctgggcagcaagaaggagctcaagtccatgcccttcatcacctacctctcaggtttgctgacagcccagatgctgtcagatgaccagctcatttcaggtgtggagattcgctgtgaggagaaggggcgctgtccatctacctgtcacctttgccgccggccaggcaaggagcagctgagccccacaccagtgctgctggaaatcaaccgtgtggtgccactttataccctcatccaagacaatggcacaaaggaggccttcaagagtgcactgatgagttcctactggtgctcagggaaaggggatgtgatcgatgactggtgcaggtgtgacctcagcgcctttgatgccaatgggctccccaactgcagcccccttctgcagccggtgctgcggctgtccccaacagtggagccctccagtactgtggtctccttggagtgggtggatgttcagccagctattgggaccaaggtctccgactatattctgcagcataagaaagtggatgaatacacagacactgacctgtacacaggagaattcctgagttttgctgatgacttactctctggcctgggcacatcttgtgtagcagctggtcgaagccatggagaggtccctgaagtcagtatctactcagtcatcttcaagtgtctggagcccgacggtctctacaagttcactctgtatgctgtggatacacgagggaggcactcagagctaagcacggtgaccctgaggacggcctgtccactggtagatgacaacaaggcagaagaaatagctgacaagatctacaatctgtacaatgggtacacaagtggaaaggagcagcagatggcctacaacacactgatggaggtctcagcctcgatgctgttccgagtccagcaccactacaactctcactatgaaaagtttggcgacttcgtctggagaagtgaggatgagctggggcccaggaaggcccacctgattctacggcgactggagagggtgagtagccactgctccagcctcctgcggagtgcctacatccagagccgcgtggaaacagtgccctatcttttctgccgcagcgaggaggtccggcctgcaggcatggtgtggtatagcatcctcaaggacaccaaaatcacgtgtgaggagaagatggtgtcaatggcccgaaacacgtacggggagtccaagggccggtgagggagggtattgccctccgtgagcacagagactctccatgggagggggagcagtattctcctggatcctggggcctgggtgggctgggggacagctgaggatgggcctagcagatgaagcttgccagcaaggccaaagcaaacggtttctcctgtggatagtggacagagacctttgtaaccaatggaattattcatttttctctatcttttattttttcaaagatattatttgactctatcaaaagtctctcctttttaaaccttttcttatggatggctgtcaatcccgaggcagaagttttcaggtggagaccaagcggcctttgctcttcttccttcttcctgccacactctgctttcttcctgccatggacccctggaggagacctatggagggacagttttgacctgacccctagaggagacagttttgacctcttcagcaccaggaaggaagctctgaggatggttgcagtgaggaagcatgggtctttaaggacttctctctcttttttgctggacattattgagtttgtgggaccctgcctcttcctgctacctgtgggtctgcccagagtccctgcaggcctgtccatgcattaaaaattcctattgtctctcaaaaaaaaaaaaaaaaaaaaaaaa

SEQ ID NO: 1130 - protein, 1335 aa, Homo sapiens
MAAAGARLSPGPGSGLRGRPRLCFHPGPPPLLPLLLLFLLLLPPPPLLAGATAAASREPDSPCRLKTVTVSTLPALRESDIGWSGARAGAGAGTGAGAAAAAASPGSPGSAGTAAESRLLLFVRNELPGRIAVQDDLDNTELPFFTLEMSGTAADISLVHWRQQWLENGTLYFHVSMSSSGQLAQATAPTLQEPSEIVEEQMHILHISVMGGLIALLLLLLVFTVALYAQRRWQKRRRIPQKSASTEATHEIHYIPSVLLGPQARESFRSSRLQTHNSVIGVPIRETPILDDYDCEEDEEPPRRANHVSREDEFGSQVTHTLDSLGHPGEEKVDFEKKAAAEATQETVESLMQKFKESFRANTPIEIGQLQPPLRSTSAGKRKRRSKSRGGISFGRAKGTSGSEADDETQLTFYTEQYRSRRRSKGLLKSPVNKTALTLIAVSSCILAMVCGSQMSCPLTVKVTLHVPEHFIADGSSFVVSEGSYLDISDWLNPAKLSLYYQINATSPWVRDLCGQRTTDACEQLCDPETGECSCHEGYAPDPVHRHLCVRSDWGQSEGPWPYTTLERGYDLVTGEQAPEKILSLGQGLWLPVSKSFVVPPVELSINPLASCKTDVLVTEDPADVREEAMLSTYFETINDLLSSFGPVRDCSRNNGGCTRNFKCVSDRQVDSSGCVCPEELKPMKDGSGCYDHSKGIDCSDGFNGGCEQLCLQQTLPLPYDATSSTIFMFCGCVEEYKLAPDGKSCLMLSDVCEGPKCLKPDSKFNDTLFGEMLHGYNNRTQHVNQGQVFQMTFRENNFIKDFPQLADGLLVIPLPVEEQCRGVLSEPLPDLQLLTGDIRYDEAMGYPMVQQWRVRSNLYRVKLSTITLAAGFTNVLKILTKESSREELLSFIQHYGSHYIAEALYGSELTCIIHFPSKKVQQQLWLQYQKETTELGSKKELKSMPFITYLSGLLTAQMLSDDQLISGVEIRCEEKGRCPSTCHLCRRPGKEQLSPTPVLLEINRVVPLYTLIQDNGTKEAFKSALMSSYWCSGKGDVIDDWCRCDLSAFDANGLPNCSPLLQPVLRLSPTVEPSSTVVSLEWVDVQPAIGTKVSDYILQHKKVDEYTDTDLYTGEFLSFADDLLSGLGTSCVAAGRSHGEVPEVSIYSVIFKCLEPDGLYKFTLYAVDTRGRHSELSTVTLRTACPLVDDNKAEEIADKIYNLYNGYTSGKEQQMAYNTLMEVSASMLFRVQHHYNSHYEKFGDFVWRSEDELGPRKAHLILRRLERVSSHCSSLLRSAYIQSRVETVPYLFCRSEEVRPAGMVWYSILKDTKITCEEKMVSMARNTYGESKGR

SEQ ID NO: 1131 - DNA, 4768 bp, Homo sapiens
ggttcgcttcggcgtccgccgtctccgcagctgcctcctcttcctccttcgccaccgccgccaccgccgccgccgcccgcagcaccgcagcccctcccgccatggccgccgccggcgcccggctcagccccggccccggctcggggctccgggggcggccgaggctctgcttccacccggggccgccgccactgctgccgctgctgctgctgttcctgctcctgctgccgccgccgccgctgctggccggcgccaccgccgctgcctcgcgggagcccgacagcccgtgccggctgaagaccgtcacggtgtccacactgcccgccctgcgggagagcgacatcggctggagcggcgcccgcgccggggccggggctgggaccggggccggagccgccgccgccgccgcgtccccgggctctcctggctctgccggcaccgccgccgagtcgcgcctcctgctctttgtgcgtaacgagctgccggggcgcatcgcggtgcaggacgacctggacaacaccgagctgcccttcttcaccctggagatgtctggcacagcggcggacatctcgctggtgcactggagacagcagtggctggagaatggcaccttgtacttccacgtctccatgagcagctccgggcagctggcccaagccaccgcccccactctccaggagccctcggagattgttgaggagcagatgcacatcctccacatttctgtgatgggtggcctcatcgcgctgctgctgctgctgctggtgttcaccgtggcgctgtacgcccagcgacgttggcagaagcgtcgccgcatcccccagaagagcgcaagcacagaagccactcatgagatccactacatcccatctgtgctgctgggtccccaggcgcgggagagcttccgttcatcccggctgcaaacccacaattccgtcattggcgtgcccatccgggagactcccatcctggatgactatgactgtgaggaggatgaggagccacctaggcgggccaaccatgtctcccgcgaggacgagtttggcagccaggtgacccacactctggacagtctgggacatccaggggaagagaaggtggactttgagaagaaagcagcagctgaggcgactcaggagacagtggagtccctgatgcagaagttcaaggagagtttccgcgctaacacgcccatcgagatcggtcagctgcaaccacccctgcgcagcacatcggcagggaagaggaagcggaggagcaagtctcgaggaggaatcagctttgggagagccaaggggacgtcgggctcagaggcagacgatgaaactcagctgacattctacacggagcagtaccgcagtcgccgccgcagcaaaggtttgctgaaaagcccagtgaacaagacagccctgacactgattgctgtgagttcctgcatcctggccatggtgtgtggcagccagatgtcttgtccactcactgtgaaggtgactctgcatgtgcccgagcacttcatagcagatggaagcagcttcgtggtgagtgaagggagctacctggacatctccgactggttaaacccggccaagctttccctgtattaccagatcaatgccacctccccatgggtgagggacctctgtggacaaaggacgacagatgcctgtgagcagctctgcgacccagaaaccggagagtgcagctgtcatgaaggctatgcccctgaccctgttcacagacacctgtgtgtgcgcagtgactggggacagagtgaaggaccttggccctacacgacacttgagaggggctatgatctggtgacaggggagcaagcccctgaaaagattctcaggtctactttcagcttgggccaaggcctctggcttcctgtcagcaaaagctttgtggttccgcctgtggagctgtccatcaaccccctggccagctgcaagaccgatgtgctcgtcacggaagaccctgcagatgtcagggaagaagcgatgctgtccacatactttgaaaccatcaatgacctgctgtcttccttcgggccagttcgtgactgctctcggaacaatgggggctgcactcgcaacttcaagtgtgtgtctgaccggcaggtggattcctcgggatgtgtgtgccctgaggagctgaaacccatgaaggatggctctggctgctacgaccactccaaaggcattgactgctctgatggctttaatggcggctgtgagcagctgtgcctgcagcagacgctgcccctgccctacgatgccacttcgagcaccatcttcatgttctgcggttgcgtggaggagtacaaactggctcctgatggaaaatcctgcttaatgctctcagatgtctgcgagggccccaagtgcctcaaacctgactccaaattcaatgataccctctttggagagatgctacatggttacaacaaccggacccagcatgtgaaccaaggccaagtcttccagatgacctttagggagaacaacttcatcaaggactttccccagctggccgatgggctgttggtgatcccgctgccggtggaggagcagtgccggggggtcctctccgagccccttccggacctccaactgctcactggagatatcaggtatgatgaggccatgggttaccccatggtgcagcagtggcgggtccggagcaacctctaccgtgtgaagctcagcaccatcaccctcgcagcaggcttcactaatgttctcaagatcctgaccaaggagagcagtcgggaggagctgctgtccttcatccagcactatggctcccactacatcgcagaggccctctatggctcagagctcacctgcatcatccactttcccagcaagaaggtccagcagcagctgtggctccagtatcagaaagagaccacagagctgggcagcaagaaggagctcaagtccatgcccttcatcacctacctctcaggtttgctgacagcccagatgctgtcagatgaccagctcatttcaggtgtggagattcgctgtgaggagaaggggcgctgtccatctacctgtcacctttgccgccggccaggcaaggagcagctgagccccacaccagtgctgctggaaatcaaccgtgtggtgccactttataccctcatccaagacaatggcacaaaggaggccttcaagagtgcactgatgagttcctactggtgctcagggaaaggggatgtgatcgatgactggtgcaggtgtgacctcagcgcctttgatgccaatgggctccccaactgcagcccccttctgcagccggtgctgcggctgtccccaacagtggagccctccagtactgtggtctccttggagtgggtggatgttcagccagctattgggaccaaggtctccgactatattctgcagcataagaaagtggatgaatacacagacactgacctgtacacaggagaattcctgagttttgctgatgacttactctctggcctgggcacatcttgtgtagcagctggtcgaagccatggagaggtccctgaagtcagtatctactcagtcatcttcaagtgtctggagcccgacggtctctacaagttcactctgtatgctgtggatacacgagggaggcactcagagctaagcacggtgaccctgaggacggcctgtccactggtagatgacaacaaggcagaagaaatagctgacaagatctacaatctgtacaatgggtacacaagtggaaaggagcagcagatggcctacaacacactgatggaggtctcagcctcgatgctgttccgagtccagcaccactacaactctcactatgaaaagtttggcgacttcgtctggagaagtgaggatgagctggggcccaggaaggcccacctgattctacggcgactggagagggtgagtagccactgctccagcctcctgcggagtgcctacatccagagccgcgtggaaacagtgccctatcttttctgccgcagcgaggaggtccggcctgcaggcatggtgtggtatagcatcctcaaggacaccaaaatcacgtgtgaggagaagatggtgtcaatggcccgaaacacgtacggggagtccaagggccggtgagggagggtattgccctccgtgagcacagagactctccatgggagggggagcagtattctcctggatcctggggcctgggtgggctgggggacagctgaggatgggcctagcagatgaagcttgccagcaaggccaaagcaaacggtttctcctgtggatagtggacagagacctttgtaaccaatggaattattcatttttctctatcttttattttttcaaagatattatttgactctatcaaaagtctctcctttttaaaccttttcttatggatggctgtcaatcccgaggcagaagttttcaggtggagaccaagcggcctttgctcttcttccttcttcctgccacactctgctttcttcctgccatggacccctggaggagacctatggagggacagttttgacctgacccctagaggagacagttttgacctcttcagcaccaggaaggaagctctgaggatggttgcagtgaggaagcatgggtctttaaggacttctctctcttttttgctggacattattgagtttgtgggaccctgcctcttcctgctacctgtgggtctgcccagagtccctgcaggcctgtccatgcattaaaaattcctattgtctctcaaaaaaaaaaaaaaaaaaaaaaaa

SEQ ID NO: 1132 - protein, 1339 aa, Homo sapiens
MAAAGARLSPGPGSGLRGRPRLCFHPGPPPLLPLLLLFLLLLPPPPLLAGATAAASREPDSPCRLKTVTVSTLPALRESDIGWSGARAGAGAGTGAGAAAAAASPGSPGSAGTAAESRLLLFVRNELPGRIAVQDDLDNTELPFFTLEMSGTAADISLVHWRQQWLENGTLYFHVSMSSSGQLAQATAPTLQEPSEIVEEQMHILHISVMGGLIALLLLLLVFTVALYAQRRWQKRRRIPQKSASTEATHEIHYIPSVLLGPQARESFRSSRLQTHNSVIGVPIRETPILDDYDCEEDEEPPRRANHVSREDEFGSQVTHTLDSLGHPGEEKVDFEKKAAAEATQETVESLMQKFKESFRANTPIEIGQLQPPLRSTSAGKRKRRSKSRGGISFGRAKGTSGSEADDETQLTFYTEQYRSRRRSKGLLKSPVNKTALTLIAVSSCILAMVCGSQMSCPLTVKVTLHVPEHFIADGSSFVVSEGSYLDISDWLNPAKLSLYYQINATSPWVRDLCGQRTTDACEQLCDPETGECSCHEGYAPDPVHRHLCVRSDWGQSEGPWPYTTLERGYDLVTGEQAPEKILRSTFSLGQGLWLPVSKSFVVPPVELSINPLASCKTDVLVTEDPADVREEAMLSTYFETINDLLSSFGPVRDCSRNNGGCTRNFKCVSDRQVDSSGCVCPEELKPMKDGSGCYDHSKGIDCSDGFNGGCEQLCLQQTLPLPYDATSSTIFMFCGCVEEYKLAPDGKSCLMLSDVCEGPKCLKPDSKFNDTLFGEMLHGYNNRTQHVNQGQVFQMTFRENNFIKDFPQLADGLLVIPLPVEEQCRGVLSEPLPDLQLLTGDIRYDEAMGYPMVQQWRVRSNLYRVKLSTITLAAGFTNVLKILTKESSREELLSFIQHYGSHYIAEALYGSELTCIIHFPSKKVQQQLWLQYQKETTELGSKKELKSMPFITYLSGLLTAQMLSDDQLISGVEIRCEEKGRCPSTCHLCRRPGKEQLSPTPVLLEINRVVPLYTLIQDNGTKEAFKSALMSSYWCSGKGDVIDDWCRCDLSAFDANGLPNCSPLLQPVLRLSPTVEPSSTVVSLEWVDVQPAIGTKVSDYILQHKKVDEYTDTDLYTGEFLSFADDLLSGLGTSCVAAGRSHGEVPEVSIYSVIFKCLEPDGLYKFTLYAVDTRGRHSELSTVTLRTACPLVDDNKAEEIADKIYNLYNGYTSGKEQQMAYNTLMEVSASMLFRVQHHYNSHYEKFGDFVWRSEDELGPRKAHLILRRLERVSSHCSSLLRSAYIQSRVETVPYLFCRSEEVRPAGMVWYSILKDTKITCEEKMVSMARNTYGESKGR

SEQ ID NO: 1133 - DNA, 1772 bp, Homo sapiens
gcttgtcgtgcagctggccccaagcgcgcggggcaaggcggccctgcaggggtgagctttcctctgagaacccggggccttagcgacacgtaatccagttttccgtctccttggtgcagatgaagaaaccgacgcccatgggcgaaagggacctgctcaagttcactcaagaccacagagctgggcagcaagaaggagctcaagtccatgcccttcatcacctacctctcaggtttgctgacagcccagatgctgtcagatgaccagctcatttcaggtgtggagattcgctgtgaggagaaggggcgctgtccatctacctgtcacctttgccgccggccaggcaaggagcagctgagccccacaccagtgctgctggaaatcaaccgtgtggtgccactttataccctcatccaagacaatggcacaaaggaggccttcaagagtgcactgatgagttcctactggtgctcagggaaaggggatgtgatcgatgactggtgcaggtgtgacctcagcgcctttgatgccaatgggctccccaactgcagcccccttctgcagccggtgctgcggctgtccccaacagtggagccctccagtactgtggtctccttggagtgggtggatgttcagccagctattgggaccaaggtctccgactatattctgcagcataagaaagtggatgaatacacagacactgacctgtacacaggagaattcctgagttttgctgatgacttactctctggcctgggcacatcttgtgtagcagctggtcgaagccatggagaggtccctgaagtcagtatctactcagtcatcttcaagtgtctggagcccgacggtctctacaagttcactctgtatgctgtggatacacgagggaggcactcagagctaagcacggtgaccctgaggacggcctgtccactggtagatgacaacaaggcagaagaaatagctgacaagatctacaatctgtacaatgggtacacaagtggaaaggagcagcagatggcctacaacacactgatggaggtctcagcctcgatgctgttccgagtccagcaccactacaactctcactatgaaaagtttggcgacttcgtctggagaagtgaggatgagctggggcccaggaaggcccacctgattctacggcgactggagagggtgagtagccactgctccagcctcctgcggagtgcctacatccagagccgcgtggaaacagtgccctatcttttctgccgcagcgaggaggtccggcctgcaggcatggtgtggtatagcatcctcaaggacaccaaaatcacgtgtgaggagaagatggtgtcaatggcccgaaacacatattatttgactctatcaaaagtctctcctttttaaaccttttcttatggatggctgtcaatcccgaggcagaagttttcaggtggagaccaagcggcctttgctcttcttccttcttcctgccacactctgctttcttcctgccatggacccctggaggagacctatggagggacagttttgacctgacccctagaggagacagttttgacctcttcagcaccaggaaggaagctctgaggatggttgcagtgaggaagcatgggtctttaaggacttctctctcttttttgctggacattattgagtttgtgggaccctgcctcttcctgctacctgtgggtctgcccagagtccctgcaggcctgtccatgcattaaaaattcctattgtctctcaaaaaaaaaaaaaaa

SEQ ID NO: 1134 - protein, 395 aa, Homo sapiens
MPFITYLSGLLTAQMLSDDQLISGVEIRCEEKGRCPSTCHLCRRPGKEQLSPTPVLLEINRVVPLYTLIQDNGTKEAFKSALMSSYWCSGKGDVIDDWCRCDLSAFDANGLPNCSPLLQPVLRLSPTVEPSSTVVSLEWVDVQPAIGTKVSDYILQHKKVDEYTDTDLYTGEFLSFADDLLSGLGTSCVAAGRSHGEVPEVSIYSVIFKCLEPDGLYKFTLYAVDTRGRHSELSTVTLRTACPLVDDNKAEEIADKIYNLYNGYTSGKEQQMAYNTLMEVSASMLFRVQHHYNSHYEKFGDFVWRSEDELGPRKAHLILRRLERVSSHCSSLLRSAYIQSRVETVPYLFCRSEEVRPAGMVWYSILKDTKITCEEKMVSMARNTYYLTLSKVSPF

SEQ ID NO: 1135 - DNA, 2596 bp, Homo sapiens
ccgagctgacgggcgtgcggccgctgcgccgcaaactcgtgtgggaggcaccgctccagccgcccgcgggccagcgcaccggtcccccagcggcagccgagcccgcccgcgcgccgttcgtgccctcgtgaggctggcatgcaggatggcaggacagcccggccacatgccccatggagggagttccaacaacctctgccacaccctggggcctgtgcatcctcctgacccacagaggcatcccaacacgctgtcttttcgctgctcgctggcggacttccagatcgaaaagaagataggccgaggacagttcagcgaggtgtacaaggccacctgcctgctggacaggaagacagtggctctgaagaaggtgcagatctttgagatgatggacgccaaggcgaggcaggactgtgtcaaggagatcggcctcttgaagcaactgaaccacccaaatatcatcaagtatttggactcgtttatcgaagacaacgagctgaacattgtgctggagttggctgacgcaggggacctctcgcagatgatcaagtactttaagaagcagaagcggctcatcccggagaggacagtatggaagtactttgtgcagctgtgcagcgccgtggagcacatgcattcacgccgggtgatgcaccgagacatcaagcctgccaacgtgttcatcacagccacgggcgtcgtgaagctcggtgaccttggtctgggccgcttcttcagctctgagaccaccgcagcccactccctagtggggacgccctactacatgtcaccggagaggatccatgagaacggctacaacttcaagtccgacatctggtccttgggctgtctgctgtacgagatggcagccctccagagccccttctatggagataagatgaatctcttctccctgtgccagaagatcgagcagtgtgactaccccccactccccggggagcactactccgagaagttacgagaactggtcagcatgtgcatctgccctgacccccaccagagacctgacatcggatacgtgcaccaggtggccaagcagatgcacatctggatgtccagcacctgagcgtggatgcaccgtgccttatcaaagccagcaccactttgccttacttgagtcgtcttctcttcgagtggccacctggtagcctagaacagctaagaccacagggttcagcaggttccccaaaaggctgcccagccttacagcagatgctgaaggcagagcagctgagggaggggcgctggccacatgtcactgatggtcagattccaaagtcctttctttatactgttgtggacaatctcagctgggtcaataagggcaggtggttcagcgagccacggcagccccctgtatctggattgtaatgtgaatctttagggtaattcctccagtgacctgtcaaggcttatgctaacaggagacttgcaggagaccgtgtgatttgtgtagtgagcctttgaaaatggttagtaccgggttcagtttagttcttggtatcttttcaatcaagctgtgtgcttaatttactctgttgtaaagggataaagtggaaatcatttttttccgtggagtggtgattctgctaacatttttatctacgttttataacttggtgagtgacgatgagagccctgcacctggccagagtgtcacaggcaaaaggcatcgggaagcaggagcatcttcttggcagccaggctgggccatcttctcctggacacctgctgtgtaccaggaacttcgtcacctccttgaatgctggcggttcatttcatgatcagtgttaagcattttcctccatgggaaggaagcatgggatatagaaaagcgaagggctgtcctttacaaattctggttctgcaacttcctagcgtgactttgggcttgggcaagtttcttagccgttctgagccttcatttcctcatctgtacaatgagattaatagtacctatcatctaccttcaggattgctgacagacagaatttgaaataaaatatgcaagttagctaatacaaaaagtagatgatccaaaaatggtagccactcacccttcacaaactgaagtccatggaccacggaagtcgagaattaatgtacacctgtatcatgtgtaggaaaccagaaatgtgttccttatttcttgttcccaaacaggattaactgtgaagactaatttataaatgtgaacctaagaaaactccacctctgaaggaaatcatttgaattttgtttttgtacgtaaagttaaccttccaattgtctgagctgtcgtcactgacttcatgacagtctggccctccagacaagagcagcgctggcatcgggcaggtgattcctgacacctgctgcctgcaggcattcactgaccaggcctttcctggaggaaacacccagggccgggcggctgctgtttccacacgtggactcggatctgctgtgacaccgtcagcccgacagtctctccatatgcagcctttcctctgtacttttctccatggttgaaataaaacagggtgactgggagttacttagaattcatgaagattttaaaaaaaaaaaaaaaaaa

SEQ ID NO: 1136 - protein, 313 aa, Homo sapiens
MAGQPGHMPHGGSSNNLCHTLGPVHPPDPQRHPNTLSFRCSLADFQIEKKIGRGQFSEVYKATCLLDRKTVALKKVQIFEMMDAKARQDCVKEIGLLKQLNHPNIIKYLDSFIEDNELNIVLELADAGDLSQMIKYFKKQKRLIPERTVWKYFVQLCSAVEHMHSRRVMHRDIKPANVFITATGVVKLGDLGLGRFFSSETTAAHSLVGTPYYMSPERIHENGYNFKSDIWSLGCLLYEMAALQSPFYGDKMNLFSLCQKIEQCDYPPLPGEHYSEKLRELVSMCICPDPHQRPDIGYVHQVAKQMHIWMSST

SEQ ID NO: 1137 - DNA, 1007 bp, Homo sapiens
caaaggcagcgcgcgccgcgagctgtcgcgtctggtcgtggtctggcggagctgcggttggcttgtggcgtctccgccgccgccgccctcccttcctcttccccatcttcttctctcggtcccgggagcccccgcccggagagagtcgcggttgctgatcgtggtgcttgagtagagccgtggttggtgacagcatgacgagcgaggtgatagaagacgagaagcaattctattccaaggccaagacctactggaaacaaatcccacccacggtggacggcatgcttggggggtatggccacatctccagcatcgacatcaacagctcccggaagtttctgcagaggtttttgagggaaggcccgaacaagacaggaacgtcctgtgccctggactgtggagctggcattgggaggatcaccaagcggctgctcctgccgctgttcagagaggtggatatggtcgacataacggaggacttcctggttcaagccaagacctacctgggggaggagggcaagagggtgaggaactacttctgttgtgggctccaggacttcaccccggagccggactcttacgacgtgatctggatccagtgggtgataggccacctcaccgatcagcacctggccgagttcctgcggcgctgcaagggcagcctccgccccaacggcatcatcgtcatcaaagacaacatggcccaggagggcgtgattctggacgacgtggacagcagcgtgtgccgggaccttgacgtggtccgcaggatcatctgcagtgcaggcctcagcctcctggccgaggagaggcaggagaacctccccgatgagatctaccatgtctatagctttgccctgagatgagccggggctggcaggagaaactgaggaaccacagtcctggtggggggagctggcagctgggcaagatccaggcgccacgctggcggttcgtgagtgtcgaggcaccactaaatatagctgtctgccgtccactcataaaaa

SEQ ID NO: 1138 - protein, 223 aa, Homo sapiens
MTSEVIEDEKQFYSKAKTYWKQIPPTVDGMLGGYGHISSIDINSSRKFLQRFLREGPNKTGTSCALDCGAGIGRITKRLLLPLFREVDMVDITEDFLVQAKTYLGEEGKRVRNYFCCGLQDFTPEPDSYDVIWIQWVIGHLTDQHLAEFLRRCKGSLRPNGIIVIKDNMAQEGVILDDVDSSVCRDLDVVRRIICSAGLSLLAEERQENLPDEIYHVYSFALR

SEQ ID NO: 1139 - DNA, 4653 bp, Homo sapiens
cttccggcgggggcgcggcttggactgaggagcggacccggccgggcgcaggggctggactggcggagcaggtggggtccgcggccgccggagcgttccggtcggcgtctgggcatctcggcctcggcagaaagcgcgaccgccctgctgcgcggggcccgcggcgatgccgttcctgcacggcttccggaggatcatcttcgagtaccagccgctggtggatgcgattctgggctccctggggatccaggaccccgagcggcaggagtctctggaccggcccagttatgtcgccagcgaggagagccgaatccttgttctcactgagctgctggagaggaaagcccactctcccttttaccaggaaggcgtgagcaacgccctgctcaagatggctgagctggggctgacgcgggcggccgacgttctcttgcggcatggggccaatctcaactttgaagacccagtcacctactacacggccttgcacatcgccgtcctgcggaaccagccggacatggtggagctgctggtgcatcacggggccgacgttaatcggagggaccggatccacgagagtagccccttggacctggccagcgaggagcctgagcgcctgccctgcctgcagcgcctcctggaccttggagctgatgtcaatgccgctgacaagcatggaaaaactgctctgctccatgctctggccagcagcgacggggtgcagatccacaatactgagaacattcgtctcttactggaaggaggggcagacgtcaaggccaccaccaaagatggggacacagtgttcacctgcatcatcttcctgcttggtgagaccgtgggaggggacaaagaggaggcccagatgatcaaccgcttctgcttccaagtcacacggctgctgctggcacacggggccgaccccagcgagtgcccagcccacgagtccctcacccacatctgcctgaagagctttaaactgcacttccctctcctgcgcttcctcctggagtccggagccgcctacaactgctccctgcacggtgcgtcctgctggtctggctttcacatcatctttgagaggctctgttcccacccaggctgcacggaagacgagagccatgcggacctcctgcgcaaagctgagactgtcctggatctcatggtgaccaactctcagaaactccagctgcccgaaaacttcgatatccaccctgtgggcagcctggcggaaaagatccaggccctccacttctccttgaggcagctggagagctatcccccgcccctcaagcacctgtgccgtgtggccatccggctctaccttcagccgtggcctgtggatgtgaaggtcaaagccctgcctctgcccgacaggctgaagtggtacctccttagcgagcacagtggctccgtggaagatgacatctgataggtctcaggctacaggaacgggggacacgggcagctcaggtcagcctgttggtagatgctgggacagcattagaagagggtctttttgatctgggagatgagacgggatccttcatgagaaaagccagccaggtagagcctgaagctgtgatcactccagtggtgaagggtgcagctctggttcttccagagagactgcccccttccctccagcggcactccaagtcccccccatgttggaaagaggaacagggcttggattgatgtttataccctctgaattggagggcagtgccagggcatttgcagaagctgggaaggaccaagcctcagcaccccagggctgcggggctcttgttggccgcacgtggcagtgcagctggagaggaagcctggggcacgtcctgtgcggtgccaccaaggccccacccctgccccttttccttccaggttctgttactcacagaagtgtttctggtgggctctgcgggagaagacactaagggccccacaggcttgtttcatggtgttgcaagccaagctggcccctgcctgttcctgtagctctggggccaggtcagccgtggccccacctaccagaactgtgctctgctggcagctgtgcttttgccaaacccagggcctcagcgaccatgacttctgctaaaaagcaatcatgagtgcgtggctggggacagacctctctgaagtgtctcctgttgtgaggggctcactttggagccactgaagagccgactgtgccacccacttgcgagcctcagtcccttccaagctgcactggtcattgggaattgtgtaaacacctctggggataagctgaggtgactaaatgatatatttatattataagattaaactgactttcttggccttaacaaggtccttatataaaatttccaccccgcccctccatagttcaggatagaggctcccacagcagccggtaaggaagtgggtggcaggtgtgaggggatgctgtgtttggggggttgtttccaagtccctgcaaagaagcaccactctagactggcaagggcctccacagtgtggaggtcccattttattatttttttttttcgagacactctgtcacccaggctggagtgcaatggtgcaatctcggctcactgcgacctctgcctcccaggttcaagcagttctcctgcctcagcctcctgagtagctggcattataggtgcccaccaccatgcctggctgatttttgtatttttagtagagacggggtttcgccatgttggtcaggctggtctcaaactcctgacctcaggtgattcgcctgcctcggcctttcaaagtgctgggattacagacatgagccactgtgcccggcccccattttattttagttttattttgagacagagtctcgctctgtcacctaggctggagtgcagtggcgcaatctcacctcactgcaagctctgcctcccgggctcaccccattctcctgcctcagcctcctgagtagctgggactacaggcgcccgccatcacgcctggctaattttttttttttttgtattttaagtagagacggggtttcacctgttagccaggatggtctcaatctcctgacctcgtgatctgcccgcctcggcctcccaaagtgctgggattacaggcgtgagccaccgcgcccagccccattttattttttactttaaatgcctgccaaggagcagcctcaagcccagagaagactgaggctacggggaacttcccttgctgcaggctgttgtaacactttaagggccccaggtctccactgccaagcaggacttggcacatgagcacccaccccacagcaccatcaggcagcacccatgggctccaccagcccagctctgtccctcccctaggtaaagatcacactgaagtcttcaagtccccagcaaccaagttgggggtggtttccttcctcttcaggcagccaggcccatggctggaaggccgggctggaggcccagggaatcggttactgatgtggccaccctattcccacatggggagcaccaggagccctggagccccttccacccaatcccatctcgcaggagagcagggtctgggctcctgcctcaccgctggttcagcagcaccctccccgccgggtcccaccttgccttttgaagaagagcccgcataatgagtggacggcagacagctatatttagtggtgcctcgacactcacgaaccgccagcgtggcgcctggatcttgcccagctgccagctccccccaccaggactgtggttcctcagtttctcctgccagccccggctcatctcagggcaaagctatagacatggtagatctcatcggggaggttctcctgcctctcctcggccaggaggctgaggcctgcactgcagatgatcctgcggaccacgtcaaggtcccggcacacgctgctgtccacgtcgtccagaatcacgccctcctgggccatgttgtctttgatgacgatgatgccgttggggcggaggctgcccttgcagcgccgcaggaactcggccaggtgctgatcggtgaggtggcctggggagggcagaggcaaggttaccagggcaccatgcaagcggatgtcggcactggatgggatgtacttctcagccccgctgagcccctcatttgtgcccagcattttgtgtgcacacatggcctcattggctctcagtcccgagagatttactaaaccccaattcatagaataggaaactgtggctcagaggtcatctacctaaagacacattaagccagaatttgacttgacgggatggcttacaagtcctgcctgatacctacacaccatgatgccccacccctgccaggcttggatcggaggagtgaacctgggctaagagtttggcattgcaggagctcccagagagactgccttccctacactagaagtccccacaaaggcttctgagaccacaaaatacaaggccagacctagagtgtccacagcaggcctgtgctgcccgcctcaggaggtggccgactgctgctagcggcctgccgccacgtcagcagcccagggcacagcgctcgaggtgtgctgttaggctaagagggtgcagggctagacacgaagcttaaactattcatcttattaaaaataaaacccttataaaactccaaaaaaaaaaaaaaaaaaaaaaaaaaaaaaaaaaa

SEQ ID NO: 1140 - protein, 421 aa, Homo sapiens
MPFLHGFRRIIFEYQPLVDAILGSLGIQDPERQESLDRPSYVASEESRILVLTELLERKAHSPFYQEGVSNALLKMAELGLTRAADVLLRHGANLNFEDPVTYYTALHIAVLRNQPDMVELLVHHGADVNRRDRIHESSPLDLASEEPERLPCLQRLLDLGADVNAADKHGKTALLHALASSDGVQIHNTENIRLLLEGGADVKATTKDGDTVFTCIIFLLGETVGGDKEEAQMINRFCFQVTRLLLAHGADPSECPAHESLTHICLKSFKLHFPLLRFLLESGAAYNCSLHGASCWSGFHIIFERLCSHPGCTEDESHADLLRKAETVLDLMVTNSQKLQLPENFDIHPVGSLAEKIQALHFSLRQLESYPPPLKHLCRVAIRLYLQPWPVDVKVKALPLPDRLKWYLLSEHSGSVEDDI

SEQ ID NO: 1141 - DNA, 4544 bp, Homo sapiens
cttccggcgggggcgcggcttggactgaggagcggacccggccgggcgcaggggctggactggcggagcaggtggggtccgcggccgccggagcgttccggtcggcgtctgggcatctcggcctcggcagaaagcgcgaccgccctgctgcgcggggcccgcggcgatgccgttcctgcacggcttccggaggatcatcttcgagtaccagccgctggtggatgcgattctgggctccctggggatccaggaccccgagcggcaggagtctctggaccggcccagttatgtcgccagcgaggagagccgaatccttgttctcactgagctgctggagaggaaagcccactctcccttttaccaggaaggcgtgagcaacgccctgctcaagatggctgagctggggctgacgcgggcggccgacgttctcttgcggcatggggccaatctcaactttgaagacccagtcacctactacacggccttgcacatcgccgtcctgcggaaccagccggacatggtggagctgctggtgcatcacggggccgacgttaatcggagggaccgggaaaaactgctctgctccatgctctggccagcagcgacggggtgcagatccacaatactgagaacattcgtctcttactggaaggaggggcagacgtcaaggccaccaccaaagatggggacacagtgttcacctgcatcatcttcctgcttggtgagaccgtgggaggggacaaagaggaggcccagatgatcaaccgcttctgcttccaagtcacacggctgctgctggcacacggggccgaccccagcgagtgcccagcccacgagtccctcacccacatctgcctgaagagctttaaactgcacttccctctcctgcgcttcctcctggagtccggagccgcctacaactgctccctgcacggtgcgtcctgctggtctggctttcacatcatctttgagaggctctgttcccacccaggctgcacggaagacgagagccatgcggacctcctgcgcaaagctgagactgtcctggatctcatggtgaccaactctcagaaactccagctgcccgaaaacttcgatatccaccctgtgggcagcctggcggaaaagatccaggccctccacttctccttgaggcagctggagagctatcccccgcccctcaagcacctgtgccgtgtggccatccggctctaccttcagccgtggcctgtggatgtgaaggtcaaagccctgcctctgcccgacaggctgaagtggtacctccttagcgagcacagtggctccgtggaagatgacatctgataggtctcaggctacaggaacgggggacacgggcagctcaggtcagcctgttggtagatgctgggacagcattagaagagggtctttttgatctgggagatgagacgggatccttcatgagaaaagccagccaggtagagcctgaagctgtgatcactccagtggtgaagggtgcagctctggttcttccagagagactgcccccttccctccagcggcactccaagtcccccccatgttggaaagaggaacagggcttggattgatgtttataccctctgaattggagggcagtgccagggcatttgcagaagctgggaaggaccaagcctcagcaccccagggctgcggggctcttgttggccgcacgtggcagtgcagctggagaggaagcctggggcacgtcctgtgcggtgccaccaaggccccacccctgccccttttccttccaggttctgttactcacagaagtgtttctggtgggctctgcgggagaagacactaagggccccacaggcttgtttcatggtgttgcaagccaagctggcccctgcctgttcctgtagctctggggccaggtcagccgtggccccacctaccagaactgtgctctgctggcagctgtgcttttgccaaacccagggcctcagcgaccatgacttctgctaaaaagcaatcatgagtgcgtggctggggacagacctctctgaagtgtctcctgttgtgaggggctcactttggagccactgaagagccgactgtgccacccacttgcgagcctcagtcccttccaagctgcactggtcattgggaattgtgtaaacacctctggggataagctgaggtgactaaatgatatatttatattataagattaaactgactttcttggccttaacaaggtccttatataaaatttccaccccgcccctccatagttcaggatagaggctcccacagcagccggtaaggaagtgggtggcaggtgtgaggggatgctgtgtttggggggttgtttccaagtccctgcaaagaagcaccactctagactggcaagggcctccacagtgtggaggtcccattttattatttttttttttcgagacactctgtcacccaggctggagtgcaatggtgcaatctcggctcactgcgacctctgcctcccaggttcaagcagttctcctgcctcagcctcctgagtagctggcattataggtgcccaccaccatgcctggctgatttttgtatttttagtagagacggggtttcgccatgttggtcaggctggtctcaaactcctgacctcaggtgattcgcctgcctcggcctttcaaagtgctgggattacagacatgagccactgtgcccggcccccattttattttagttttattttgagacagagtctcgctctgtcacctaggctggagtgcagtggcgcaatctcacctcactgcaagctctgcctcccgggctcaccccattctcctgcctcagcctcctgagtagctgggactacaggcgcccgccatcacgcctggctaattttttttttttttgtattttaagtagagacggggtttcacctgttagccaggatggtctcaatctcctgacctcgtgatctgcccgcctcggcctcccaaagtgctgggattacaggcgtgagccaccgcgcccagccccattttattttttactttaaatgcctgccaaggagcagcctcaagcccagagaagactgaggctacggggaacttcccttgctgcaggctgttgtaacactttaagggccccaggtctccactgccaagcaggacttggcacatgagcacccaccccacagcaccatcaggcagcacccatgggctccaccagcccagctctgtccctcccctaggtaaagatcacactgaagtcttcaagtccccagcaaccaagttgggggtggtttccttcctcttcaggcagccaggcccatggctggaaggccgggctggaggcccagggaatcggttactgatgtggccaccctattcccacatggggagcaccaggagccctggagccccttccacccaatcccatctcgcaggagagcagggtctgggctcctgcctcaccgctggttcagcagcaccctccccgccgggtcccaccttgccttttgaagaagagcccgcataatgagtggacggcagacagctatatttagtggtgcctcgacactcacgaaccgccagcgtggcgcctggatcttgcccagctgccagctccccccaccaggactgtggttcctcagtttctcctgccagccccggctcatctcagggcaaagctatagacatggtagatctcatcggggaggttctcctgcctctcctcggccaggaggctgaggcctgcactgcagatgatcctgcggaccacgtcaaggtcccggcacacgctgctgtccacgtcgtccagaatcacgccctcctgggccatgttgtctttgatgacgatgatgccgttggggcggaggctgcccttgcagcgccgcaggaactcggccaggtgctgatcggtgaggtggcctggggagggcagaggcaaggttaccagggcaccatgcaagcggatgtcggcactggatgggatgtacttctcagccccgctgagcccctcatttgtgcccagcattttgtgtgcacacatggcctcattggctctcagtcccgagagatttactaaaccccaattcatagaataggaaactgtggctcagaggtcatctacctaaagacacattaagccagaatttgacttgacgggatggcttacaagtcctgcctgatacctacacaccatgatgccccacccctgccaggcttggatcggaggagtgaacctgggctaagagtttggcattgcaggagctcccagagagactgccttccctacactagaagtccccacaaaggcttctgagaccacaaaatacaaggccagacctagagtgtccacagcaggcctgtgctgcccgcctcaggaggtggccgactgctgctagcggcctgccgccacgtcagcagcccagggcacagcgctcgaggtgtgctgttaggctaagagggtgcagggctagacacgaagcttaaactattcatcttattaaaaataaaacccttataaaactccaaaaaaaaaaaaaaaaaaaaaaaaaaaaaaaaaaa

SEQ ID NO: 1142 - protein, 197 aa, Homo sapiens
MPFLHGFRRIIFEYQPLVDAILGSLGIQDPERQESLDRPSYVASEESRILVLTELLERKAHSPFYQEGVSNALLKMAELGLTRAADVLLRHGANLNFEDPVTYYTALHIAVLRNQPDMVELLVHHGADVNRRDREKLLCSMLWPAATGCRSTILRTFVSYWKEGQTSRPPPKMGTQCSPASSSCLVRPWEGTKRRPR

SEQ ID NO: 1143 - DNA, 8439 bp, Homo sapiens
cgcactctccgtccccgcggctggcgcaggacctcactcgagcggagcgcccacggggagcgggtcgcggggcggcggcggcgaggaggaggcgagaaggagttggaggaggaggaggaggaggcgagggcgagctagcccagcggggtcccggccgccccgcgggccaaagtcgagccctcccgcccgtgggcgagcgcgccagccgccccttccagaacagccgccgccacaaagaagaacggggggtgccgaggtccccatgacctcctaaagtggtgcggtccctgctgagtgcgctgcccgggccgtgacccgcgcccctgtgcgtccccgcgcgcctccgagcgcccctgtgcgccccggcccgcgccccgccggcatggacgtccatacccgctggaaagcgcgcagcgcgctccgcccgggcgccccgctgctgcccccgctgctgctgctgctgctgtgggcgccgcctccgagccgcgcagctcagccagcagatctcctgaaggttctagattttcacaacttgcctgatggaataacaaagacaacaggcttttgcgccacgcggcgatcttccaaaggcccggatgtcgcttacagagtcaccaaagacgcgcagctcagcgcacccaccaagcagctgtaccctgcgtctgcatttcccgaggacttctccatcctaacaactgtgaaagccaagaaaggcagccaggccttcctggtctccatctacaacgagcagggtatccagcagattgggctggagctgggccgctctcccgtcttcctctacgaggaccacacggggaagcctggcccggaagactaccccctcttccggggcatcaacctgtcagatggcaagtggcacagaattgctctcagcgtccacaagaaaaatgtcaccttgatcctcgactgtaaaaagaagaccaccaaattcctcgaccgcagcgaccaccccatgatcgacatcaatggcatcatcgtgtttggcacccggatcctggatgaggaggtgtttgagggtgacatccagcagctgctctttgtctcggaccaccgggcagcttatgattactgtgagcactacagccctgactgtgacaccgcagtacctgacaccccacagtcgcaggaccccaatccagatgaatattacacggaaggagacggcgagggtgagacctattactacgaatacccctactacgaagaccccgaagacctagggaaggagcccacccccagcaagaagcccgtggaagctgccaaagaaaccacagaggtccccgaggagctgaccccgacccccacggaagctgctcccatgcctgaaaccagtgaaggggctgggaaggaagaggacgtcggcatcggggactatgactacgtgcccagtgaggactactacacgccctcaccgtatgatgacctcacctatggcgagggggaggagaaccccgaccagcccacagacccaggcgctggggccgaaattcccaccagcaccgccgacacctccaactcctccaatccagctccgcctccaggggaaggtgcggatgacttggagggggagttcactgaggaaacgatccggaaccttgacgagaactactacgacccctactacgaccccaccagctccccgtcggagatcgggccgggaatgccggcgaaccaggataccatctatgaagggattggaggacctcggggcgagaaaggccaaaagggagaaccagcgattatcgagccgggcatgctcatcgagggcccgcctggcccagaaggccccgcgggtcttcccggacctccaggaaccatgggtcccactggccaagtcggggaccctggagaaaggggcccccctggacgcccaggccttcctggggccgatggcctgcccggtcctccaggaaccatgctcatgctgcccttccggtttggaggtggcggcgatgcgggctccaaaggccccatggtctcagcccaggagtcccaggcgcaagccattctccagcaggccaggttggcactgaggggaccagctggcccgatgggtctcacagggagacctggccctgtgggtccccctgggagcggaggtttgaagggcgagccgggagacgtggggcctcagggtcctcgaggtgtgcaaggcccgcctggtccggccgggaagcccggaagacggggtcgggctgggagtgatggagccagaggaatgcctggacaaactggccccaagggtgaccggggtttcgacggcctggctgggttgccaggcgagaagggccacaggggtgaccctggtccttccggcccaccaggacctccgggagacgatggagaaaggggtgacgacggagaagttgggcccagggggctgcctggggagcccgggccacgtggtctgcttgggccgaaggggcccccaggtcctcccggacctcccggtgtcacgggtatggacggccagccggggccaaaaggaaatgtgggtccccagggagagcctggccccccaggacagcagggtaatccaggcgcccagggtcttccaggcccccagggtgcaattggtcctccaggagaaaagggtcccttggggaaaccaggccttccaggaatgcccggtgctgacggacccccgggacaccctggcaaagaaggccctccaggagagaaaggaggtcagggtccacctggcccccagggtccgattggctacccaggtcctcgaggagtcaagggggccgatggcatccgtggtctgaagggcacaaagggcgagaagggtgaagacggctttcctgggtttaaaggagacatgggcatcaagggtgatcggggggagatcggcccacccggtcccaggggagaagatggccctgaaggcccaaagggtcgcggaggtcccaatggtgaccccggtcctctgggaccccctggggagaagggaaaactcggagtcccagggttaccagggtatccaggaagacaaggaccaaagggctctattggattccctggatttcctggcgccaatggagagaagggcggcagggggacccctggaaagccaggaccgcgggggcagcgaggcccaacgggtccgaggggtgaaagaggcccccggggcatcactgggaagcctggccccaagggcaactccggaggtgacggcccagctggccctcctggtgaacggggacccaatggaccccaaggacccacaggatttcctggaccaaagggcccccctggccctccaggcaaggatggactcccaggacaccctggacagagaggcgagactggtttccaaggcaagaccggccctccaggcccccccggcgtggtcggccctcagggtcccacgggagaaacgggcccaatgggtgagcgtggccaccctgggccccctggaccccccggtgaacaggggcttccgggccttgctggaaaagaagggacgaagggtgacccaggccctgcaggcctccctgggaaagatggccctccaggattacgtggtttccctggggaccgagggcttcctggtccagtgggagctcttggactgaaaggcaatgaagggccccctggcccaccaggccctgcgggatctccaggggagagaggtccagctggagccgctgggcccatcggaattccagggagacctgggccccagggacccccagggccggcaggagagaaaggggctcctggcgagaaaggcccacaaggcccagctggccgagacggtctccaggggcctgtggggctcccgggtccagctggccctgtgggtccccctggagaagacggagataagggagagatcggggagccggggcagaaaggaagcaagggggacaaaggagaacagggtcctcctgggcctacaggtcctcaaggccccatcggacagccaggcccctctggagctgacggcgagccggggcctcggggccagcagggccttttcgggcagaaaggtgatgaaggtcccagaggctttcctggaccccctgggccagtggggctgcagggtttgccaggacctccaggcgagaagggtgagacaggagacgtgggccagatgggccccccgggtccccctggcccccgaggaccctccggagctccaggtgctgatggcccacaaggtcccccaggtggaataggaaaccctggtgcagtgggagagaagggcgagcctggcgaagcaggtgagcctggccttccgggagaaggcggccccccgggacccaaaggagaaaggggagagaagggcgagtcaggcccttcaggtgctgccggaccccctggacccaaaggccctcccggagatgatggtcccaaaggcagccctggcccagtgggttttcctggagatcctggcccccccggagagcctggccccgcgggtcaagatggtccccctggtgacaaaggagatgatggtgaacccgggcagacgggatcccccggccctactggtgaaccaggtccatcggggcctccaggaaaaaggggtcccccaggccccgcaggccccgaaggcagacagggagagaaaggggccaagggagaagccggcttggaaggccctcctgggaagactggccccatcggcccccagggggcccctgggaagcccggaccggatggccttcgagggatccctggccctgtgggagaacaaggtctcccaggatccccaggcccggacggtccccccggccccatgggtcccccaggacttcccggcctcaaaggagattctggtcccaaaggtgaaaagggtcatccaggcctgatcgggctcatcggtcctccgggtgaacagggtgagaagggcgaccgtggtctccctggcccccagggctcctccggtcctaagggagaacagggtatcactggtccttctggcccgattgggcctcctgggccccctggcctgccgggtccgcctggtccaaaaggtgctaagggctcctcgggtccaactggcccgaagggtgaggcaggccacccaggacccccaggccccccgggccccccgggagaggtcatccagcccctgccaatccaggcatccaggacgcggcggaacatcgacgccagccagctgctggacgacgggaatggcgagaactacgtggactacgcggacggcatggaagagatcttcggctctctcaactctctgaagctggagattgagcagatgaaacggcccctgggcacgcagcagaaccccgcccgcacctgcaaggacctgcagctctgccaccccgacttcccagatggtgaatactgggtcgatcctaaccaaggatgctccagggattccttcaaggtttactgcaacttcacagccggggggtcgacatgcgtcttccctgacaagaagtccgaaggggccagaatcacttcttggcccaaagaaaacccgggctcctggttcagtgaattcaagcgtgggaaactgctctcctatgtggacgccgagggcaaccctgtgggtgtggtacagatgaccttcctgcggctgctgagcgcctctgcccaccagaacgtcacctaccactgctaccagtcagtggcctggcaggacgcagccacgggcagctacgacaaggccctccgcttcctgggctccaacgacgaggagatgtcctatgacaacaacccctacatccgcgccctggtggacggctgtgctaccaagaaaggctaccagaagacggttctggagatcgacacccccaaagtggagcaggtgcccatcgtggacatcatgttcaatgacttcggtgaagcgtcacagaaatttggatttgaagtggggccggcttgcttcatgggctaggagccgccgagcccgggctcccgagagcaacctcgtgacctcagcatgccattcgttcgtgagtgtcccgtgcacgtcctgaccctggacagtgaaggcttctccctcccctcccacctgacttcatctacgcctcggcaccacggggtgtgggaccccagcccggagagaacagagggaaggagccgcgcccccacctggagctgaatcacatgacctagctgcaccccagcgcctgggcccgccccacgctctgtccacacccacgcgccccgggagcggggccatgcctccagccccccagctcgcccgacccatcctgttcgtgaataggtctcaggggttgggggagggactgccagatttggacactatatttttttctaaattcaacttgaagatgtgtatttcccctgaccttcaaaaaatgttccaaggtaagcctcgtaaaggtcatcccaccatcaccaaagcctccgtttttaacaacctccaacacgatccatttagaggccaaatgtcattctgcaggtgccttcccgatggattaaaggtgcttatgtttttgtgagttttaagtaaatatttgtattgtattgttataaatgttaagtgtgcctggctttcaatcatgcacggaaacccagtctcagtcccacggacagaatgggcgaggcatggattctgggttgcagtaccgttctgattagaaataggaagtctccccacccccgccctggccaagaacgtgcaataaattggaagtttgccccggggcagcaagaatttatgctgccattgaaaagcaggtaccagtgccccttttcagacagtttttgattcgctctagactttttttttttttaatagggaaaaaatttgataattttcttttttctacatgcacttaagactaaaacacaggtttggattaattttatttgcttcctttttccgcttttcttcccgcagagcctgatgggagaatgtccagggcagggaaaccacattttttgtaggtgataactcaatgaaaattggtgcttattttttacacttctctcttgtggctctcttgtggtgctatctatctgttttaaggtctccttgaaggcgcactggggaccctggccatgcctcgttctccctgctttctttatcctgttattgcctccacagtctgttgccaaggactctaagatcaatgcacgtcactttcctttccactgggcaggatagccaagcacactccctcctgcgctctcccgccccggtgcgtccactcccgagggctgttatgaggactgggttgtgcctacttgatttgaaaacacacacaagcaataaaaagcctcttcctgcattgtctgtggtgtgaccatagcagattatatttggttcctgaatgtttgtggtgctaatttctgtgtttgttccaagccgttcagtcatgccatgcgctgcctcggtagatggagtaatgtacaatgaactccatgagtctctccagggctgcctgcagcacgtcttttccaagtagcctatttggattcccatctcaaatgtcctggatgcgagcgtcagcggctccagagctcggggcgggtgaggtcccctttggggaaccctttcctggccatcgaggtcggggggctgccgtctgtgggcaggaggacccgaggggcagccaggaaaggcgatctcttcactgtgaaaagttgcccgggtgcagcgccttttccttctaccatgggaaatgcaggctgggcccttggggtgagcctgcggggctctggtgctgtccccgacccccaccaccaccagaatgcagttccagcttaggaagccacaaacaagccacccaggaggaacaaaacaccgccagcgtggattttccaaatttccctggaaagtaagtctcgctcttgccaaagaaaagtctggcttggagagtctctggagcccaggatgccagcatgtgccaatgactgtcaccttcatctcttcaaaagaaaagccatagccgaggactgtcccgcgacccccgtggactgcgtctaggtcatgtgattctgttttcatttctcatcccatccaatttgtccttttctcctgtcattttcttcctctgtggtcccttcaaagttgttataatttgtactgaacttcaaaatgtgtcccgttctccccagaccactctagccacagtatattgcaataaaattacttcttatatttgcagaaattcttttggtgtaattttattttttcctctcaatatatataattggacaaacgctggcaaaaagaaaaaaatggtaagcaaaaaacccaagataaagtttcgaggacatcaggccttttgaaatacaatgtcaaatgacacattgtacggtttcaaaaaatccgctagacatgtcataagttttaactgtaatgcccaggaaaggatatcttaaaatattctaaacttgtgtaacaaaggaataattaactgtaatagtttttcaataaatcgagttgggtgtttccaccgtaaa

SEQ ID NO: 1144 - protein, 1838 aa, Homo sapiens
MDVHTRWKARSALRPGAPLLPPLLLLLLWAPPPSRAAQPADLLKVLDFHNLPDGITKTTGFCATRRSSKGPDVAYRVTKDAQLSAPTKQLYPASAFPEDFSILTTVKAKKGSQAFLVSIYNEQGIQQIGLELGRSPVFLYEDHTGKPGPEDYPLFRGINLSDGKWHRIALSVHKKNVTLILDCKKKTTKFLDRSDHPMIDINGIIVFGTRILDEEVFEGDIQQLLFVSDHRAAYDYCEHYSPDCDTAVPDTPQSQDPNPDEYYTEGDGEGETYYYEYPYYEDPEDLGKEPTPSKKPVEAAKETTEVPEELTPTPTEAAPMPETSEGAGKEEDVGIGDYDYVPSEDYYTPSPYDDLTYGEGEENPDQPTDPGAGAEIPTSTADTSNSSNPAPPPGEGADDLEGEFTEETIRNLDENYYDPYYDPTSSPSEIGPGMPANQDTIYEGIGGPRGEKGQKGEPAIIEPGMLIEGPPGPEGPAGLPGPPGTMGPTGQVGDPGERGPPGRPGLPGADGLPGPPGTMLMLPFRFGGGGDAGSKGPMVSAQESQAQAILQQARLALRGPAGPMGLTGRPGPVGPPGSGGLKGEPGDVGPQGPRGVQGPPGPAGKPGRRGRAGSDGARGMPGQTGPKGDRGFDGLAGLPGEKGHRGDPGPSGPPGPPGDDGERGDDGEVGPRGLPGEPGPRGLLGPKGPPGPPGPPGVTGMDGQPGPKGNVGPQGEPGPPGQQGNPGAQGLPGPQGAIGPPGEKGPLGKPGLPGMPGADGPPGHPGKEGPPGEKGGQGPPGPQGPIGYPGPRGVKGADGIRGLKGTKGEKGEDGFPGFKGDMGIKGDRGEIGPPGPRGEDGPEGPKGRGGPNGDPGPLGPPGEKGKLGVPGLPGYPGRQGPKGSIGFPGFPGANGEKGGRGTPGKPGPRGQRGPTGPRGERGPRGITGKPGPKGNSGGDGPAGPPGERGPNGPQGPTGFPGPKGPPGPPGKDGLPGHPGQRGETGFQGKTGPPGPPGVVGPQGPTGETGPMGERGHPGPPGPPGEQGLPGLAGKEGTKGDPGPAGLPGKDGPPGLRGFPGDRGLPGPVGALGLKGNEGPPGPPGPAGSPGERGPAGAAGPIGIPGRPGPQGPPGPAGEKGAPGEKGPQGPAGRDGLQGPVGLPGPAGPVGPPGEDGDKGEIGEPGQKGSKGDKGEQGPPGPTGPQGPIGQPGPSGADGEPGPRGQQGLFGQKGDEGPRGFPGPPGPVGLQGLPGPPGEKGETGDVGQMGPPGPPGPRGPSGAPGADGPQGPPGGIGNPGAVGEKGEPGEAGEPGLPGEGGPPGPKGERGEKGESGPSGAAGPPGPKGPPGDDGPKGSPGPVGFPGDPGPPGEPGPAGQDGPPGDKGDDGEPGQTGSPGPTGEPGPSGPPGKRGPPGPAGPEGRQGEKGAKGEAGLEGPPGKTGPIGPQGAPGKPGPDGLRGIPGPVGEQGLPGSPGPDGPPGPMGPPGLPGLKGDSGPKGEKGHPGLIGLIGPPGEQGEKGDRGLPGPQGSSGPKGEQGITGPSGPIGPPGPPGLPGPPGPKGAKGSSGPTGPKGEAGHPGPPGPPGPPGEVIQPLPIQASRTRRNIDASQLLDDGNGENYVDYADGMEEIFGSLNSLKLEIEQMKRPLGTQQNPARTCKDLQLCHPDFPDGEYWVDPNQGCSRDSFKVYCNFTAGGSTCVFPDKKSEGARITSWPKENPGSWFSEFKRGKLLSYVDAEGNPVGVVQMTFLRLLSASAHQNVTYHCYQSVAWQDAATGSYDKALRFLGSNDEEMSYDNNPYIRALVDGCATKKGYQKTVLEIDTPKVEQVPIVDIMFNDFGEASQKFGFEVGPACFMG

SEQ ID NO: 1145 - DNA, 3668 bp, Homo sapiens
aaagtggctggtgccaaacaactagcagaggcgcaaaagtagcctccctgcgctgggagcccagagcaggaggcagagcccgcgggaagctcggagcactcaggacgccgcgcgcccttccccgccctccctgaccagggagcagctcgctccaggcgcccagccgaggcccccagcccagtgggagcaagtcatagagaacaattcgagagacagagagacggagcgcgctttcctgctcagtcctgaaaagtgagccgctcccgggtttgcaacctcaagcttcgcagcagcggcggcggcggctgccgggaaggaggcaggtgcaggtgcaggagggaggcggctctgggctccgcgcctgggtctcggccatggcctcggtcctggggagcggcagagggtctggagggctgagcagtcaactcaaatgcaagtccaagaggaggaggaggcggaggtccaagcggaaagataaagtaagcatattgtcaaccttcctcgctcctttcaagcacctgagtcctggcatcacaaacacggaggatgacgacaccctcagtaccagcagcgcggaggtgaaggagaaccgcaacgtgggcaacctggccgcgcggccaccgccctccggggaccgggcccggggcggcgcgcccggcgcgaagaggaagcggccgctggaggaggggaatgggggccacttgtgcaaactgcagctggtctggaagaagctgtcgtggtcggtggcgcccaagaacgcgctggtgcagctgcacgagctgaggccgggcctgcagtaccggacagtgtcgcagacgggcccggtgcatgccccggtcttcgcggtagcggtggaggtgaacgggctcacgttcgagggcacaggccccaccaagaagaaggccaagatgcgcgcggcggagctggcactcaggtccttcgtgcagttccccaacgcctgccaggcgcacctggccatgggcgggggcccgggccccggcacggacttcacctccgaccaggccgatttccccgacacgctcttccaggagttcgagcccccggcgccgcgccccggactcgcgggaggccgccccggggacgccgcgcttctgtccgcggcctacgggcgacggcggctgctgtgccgcgcgctggacctggtgggcccgacccccgccacccccgcggccccgggcgagcgcaaccccgtggtgctgctgaaccgcctgcgcgccgggctgcgctacgtgtgtctggcagaaccggccgagcggcgcgcgcggagcttcgtgatggccgtgagcgtggacggcaggacgttcgagggctcggggcgcagcaagaagctggcccggggtcaggccgcgcaggccgcactgcaggagctgttcgacatccagatgcccggccacgcgcccggcagggccaggaggacgccaatgccgcaggaattcgcagactccatatcccagctggtcacacagaagttccgcgaggtgacgacggacctcacgcccatgcacgcccgccataaagcgctggcaggaatcgtcatgaccaaaggcctggatgctcggcaggcgcaggtcgtggccctgtcctcggggaccaagtgcatcagcggcgagcacctcagtgaccaggggctggtggtgaatgactgccacgcggaggtcgtggcccggcgggcgttcctgcacttcctctacacgcagctggagctgcacctgagcaagcggcgcgaggactcagagcgatcgatattcgtgcggttaaaagaaggtggctaccggctgcgagagaacatcctcttccatctctacgtgagcacctccccctgtggagacgcaagactccactctccctacgagatcaccacagacctgcacagcagcaaacacctcgtcaggaagttccgcgggcacctgcgcaccaagatcgagtccggggaagggacggtccccgtgcgtggccccagcgcagtgcagacctgggacggcgtcctgctgggggagcagctgatcaccatgtcctgcacggacaagatcgccaggtggaacgtcctggggctgcagggcgcgctcctgtcccacttcgtggagcccgtgtacctgcagagcatcgtggtgggcagcctgcaccacacgggccacctcgcacgcgtcatgagccaccgcatggagggtgtcggccagctgcccgcctcctaccggcacaaccggcctctcctcagcggcgtgagtgacgccgaggcgcgccagccggggaagtcgccccccttcagcatgaactgggtcgtgggcagcgcggacctggagattatcaacgccaccactgggcggaggagctgtgggggcccatcccggctctgcaagcacgtgctgtctgcacggtgggcgcggctgtatggcaggctgagcacacggacacccagccctggagacacgccctccatgtactgtgaggccaagctgggggcgcacacctaccagtctgtgaaacagcagctgttcaaggcctttcagaaggctggcctgggcacctgggtgaggaaaccaccggagcagcagcagtttctactgactctctaggctgcgggctcctggctgctggagctgagcgggacgctggagggatgggaccgtgtctggggggcgacgtggcgggtcggccggttccctgcattcgttttactttggtgtcccagaaacacgcgagtgtgcaatgtttggacgagcaacaacacaaattcagaacgtgcctctttccagatcgctggccccagaaccctgtcccccacacccaggggcacacgcactgttgagttagcgccgactcttcctgtggagtctgagggaggggctccattcaggcaaaggggttttagctgcagccttggaaggaggcaccgacacgacaccaggcaggagtgagcctcaggccccgtccctgcaccccacccctgcgtgcgcctcttggtgatgctggggtctcactagcttgagggggcacatgaagataagccacaaatgaagagaaaagccatgcccaccccagccccagagaaaccaataagaatcctctattattttcactattcatttaggtttttatactccacctcctttcaaaaaagatttaagatgtacgacattaccgaacacctaaaatagaaccagagaaacgaaagccattcccacaaagtgaaggaacagtttccaaaacccctgcgaggcagagttaagacctgtgacgtggggagcctggaaacacccggcccacgcgtgctgcagatgtggggagcctggaaacacccggcccacgcgtgctgcagatgtggggagcctggaaacacccggcccacgcgtgctgcagatgtggggagtctggaaacacccggcccacgcgtgctgcagatgtggggagcccggaaacacctggcccatgcctgttcagtccgtcatggcgtttggtttatggtggccgatactaagagccactgaggtctgggttgtgtaagggttagctaccaccctataacctccctaccaggtaataaggagaccaagtctttgatcaaattctgattttttaactaaattttcattagaaagcaagcacaaaataaaatcaaaacaacctttaccttcaaaaaaaaaaaaaaa

SEQ ID NO: 1146 - protein, 739 aa, Homo sapiens
MASVLGSGRGSGGLSSQLKCKSKRRRRRRSKRKDKVSILSTFLAPFKHLSPGITNTEDDDTLSTSSAEVKENRNVGNLAARPPPSGDRARGGAPGAKRKRPLEEGNGGHLCKLQLVWKKLSWSVAPKNALVQLHELRPGLQYRTVSQTGPVHAPVFAVAVEVNGLTFEGTGPTKKKAKMRAAELALRSFVQFPNACQAHLAMGGGPGPGTDFTSDQADFPDTLFQEFEPPAPRPGLAGGRPGDAALLSAAYGRRRLLCRALDLVGPTPATPAAPGERNPVVLLNRLRAGLRYVCLAEPAERRARSFVMAVSVDGRTFEGSGRSKKLARGQAAQAALQELFDIQMPGHAPGRARRTPMPQEFADSISQLVTQKFREVTTDLTPMHARHKALAGIVMTKGLDARQAQVVALSSGTKCISGEHLSDQGLVVNDCHAEVVARRAFLHFLYTQLELHLSKRREDSERSIFVRLKEGGYRLRENILFHLYVSTSPCGDARLHSPYEITTDLHSSKHLVRKFRGHLRTKIESGEGTVPVRGPSAVQTWDGVLLGEQLITMSCTDKIARWNVLGLQGALLSHFVEPVYLQSIVVGSLHHTGHLARVMSHRMEGVGQLPASYRHNRPLLSGVSDAEARQPGKSPPFSMNWVVGSADLEIINATTGRRSCGGPSRLCKHVLSARWARLYGRLSTRTPSPGDTPSMYCEAKLGAHTYQSVKQQLFKAFQKAGLGTWVRKPPEQQQFLLTL

SEQ ID NO: 1147 - DNA, 2213 bp, Homo sapiens
tttgagccactgcatcccctagcggcgcccgggtggctgcagccgctggcccgaaaatgctgctcgggcgagcaggggtcaggcgggaaaagaagactccaaatccactctctgctcgcccccagggcaatgctgccaggagagggagtgggttcccccgcaggctatcccaccgatggggctgagagcttaatttggggttttatttgaattggagacattgttccctcttcgctcctctaccccataaaattccctacaaatgcaaaaattcgagatagaagaagccgtccctgaaagtaagttctgaaggattcctttcatgcggtgaaggaacaacaacaatattcaacttcaccttggtgtgtgagggtcgtcgtgttttaaaacactatccctgtagaaagattagtgaaatgtattggaagaagtagtggaaacgtgaatcttcctggtctcgcgtttggatcttctttggagtcctcaccttcttaaatctgatgtttgtttgaaatcagggctgaatttccatatataggacagaaagaaagaaccccaattttttaaagaaagctcccccccccccgccacgtttctcctgagcccacttggtctcccgttattaggcggcccagttaagaggcatcgattttcctttcattctctgaccactcgtctctcctgggccagccaggctgcccgcatcttctcctgctcacagcgctctctaaaccttttaattatttagttgctgtctaacattcaccggaaacctctccataaacaaggagaaacgaatgcacacgcatttttgctaagaagcccgggattaagatttaaggatacaagctgaaagaaaaaatgaaaaatgcttctccgcgcgtcaatcgaggggtggatgcgccacgcagcgtgagcccagctcacagccacgcgtaagaccaaaagctgccatgggttctgcgcgcggagacctcagagccgaagagagaagtccccgcgtcagaaacgctgcggatgccaggtcttgaaaatgctgacttctgaggctaagaattatttcaaagacaaaaagaaaagactggagcagccggcggagctcgggtggaggaaagcgaggaggcgaccaggaggatgccgccgccgccgccgcagggcccggggcttctgcagggcgcaaggcctccctcaccagggtaaggggctggcgatcaacctggacgcctgggaccttgggagcaagcatcccgcagccgagcaggcgacggcgcggccaccgcctagagaggagccggggcccggggcggcgtgcgggtcggcagcagccggcttggcctatccgaaaccccaggcctggaagcggctgctttaggcgtcaagttgagcggggtatgtgtgtcctcttggaaaaaaggtgagaaatggagccggactttctccactcggtaggggttaagctaccacacacacccccaaacacatgcccacgtgcaagtccctcccacccgccctcccaggggcgaagagaccctgtcccagtggaagtggggaaacccagtcgggtacagaaagcagaggccatggcgcagagcggaggcgcggctttctggggctcagccctagggctacagacccagggcgcggagatgctcgcggccgggccacccaccagagccaggcaaccggcgcttccaggcgagctccgcggggccgaggtgccgggagaagcggccccgggcgcccgcgcgctgcccgacctgggtaacaggcaaagcggagccccggggtcgaagtcctaaagttactaatcccgcggagggggagagagcgtgcctcgggccgcccggggcggtcatttgagcgtgtttacttaaagactttgcaagcagagcgcgcgcgaaatcgtcggatttccagcgaggcagcaaatatttgcaggcagaagaaagaagcggagccgagccgagccgccgagtccctccccccggagccccggagccccggcgcctgcctgggcggtcccggccgcgcagacagaaaagaagccgggaatctgcggggctggggggcggggagcgacaccaaaggccagaaactgcagcacggcccgaggccctggcgagctgggcctgggggaggagaagtcccttcccattccagctcgatcaatcttgctgggctgcgatcggtcaataaaaacggtgtgaagcggc

SEQ ID NO: 1148 - protein, 125 aa, Homo sapiens
MEPDFLHSVGVKLPHTPPNTCPRASPSHPPSQGRRDPVPVEVGKPSRVQKAEAMAQSGGAAFWGSALGLQTQGAEMLAAGPPTRARQPALPGELRGAEVPGEAAPGARALPDLGNRQSGAPGSKS

SEQ ID NO: 1149 - DNA, 3070 bp, Homo sapiens
ggcgccgtcttgatactttcagaaagaatgcattccctgtaaaaaaaaaaaaaaaatactgagagagggagagagagagagaagaagagagagagacggagggagagcgagacagagcgagcaacgcaatctgaccgagcaggtcgtacgccgccgcctcctcctcctctctgctcttcgctacccaggtgacccgaggagggactccgcctccgagcggctgaggaccccggtgcagaggagcctggctcgcagaattgcagagtcgtcgcccctttttacaacctggtcccgttttattctgccgtacccagtttttggatttttgtcttccccttcttctctttgctaaacgacccctccaagataatttttaaaaaaccttctcctttgctcacctttgcttcccagccttcccatccccccaccgaaagcaaatcattcaacgacccccgaccctccgacggcaggagccccccgacctcccaggcggaccgccctccctccccgcgcgcgggttccgggcccggcgagagggcgcgagcacagccgaggccatggaggtgacggcggaccagccgcgctgggtgagccaccaccaccccgccgtgctcaacgggcagcacccggacacgcaccacccgggcctcagccactcctacatggacgcggcgcagtacccgctgccggaggaggtggatgtgctttttaacatcgacggtcaaggcaaccacgtcccgccctactacggaaactcggtcagggccacggtgcagaggtaccctccgacccaccacgggagccaggtgtgccgcccgcctctgcttcatggatccctaccctggctggacggcggcaaagccctgggcagccaccacaccgcctccccctggaatctcagccccttctccaagacgtccatccaccacggctccccggggcccctctccgtctaccccccggcctcgtcctcctccttgtcggggggccacgccagcccgcacctcttcaccttcccgcccaccccgccgaaggacgtctccccggacccatcgctgtccaccccaggctcggccggctcggcccggcaggacgagaaagagtgcctcaagtaccaggtgcccctgcccgacagcatgaagctggagtcgtcccactcccgtggcagcatgaccgccctgggtggagcctcctcgtcgacccaccaccccatcaccacctacccgccctacgtgcccgagtacagctccggactcttcccccccagcagcctgctgggcggctcccccaccggcttcggatgcaagtccaggcccaaggcccggtccagcacagaaggcagggagtgtgtgaactgtggggcaacctcgaccccactgtggcggcgagatggcacgggacactacctgtgcaacgcctgcgggctctatcacaaaatgaacggacagaaccggcccctcattaagcccaagcgaaggctgtctgcagccaggagagcagggacgtcctgtgcgaactgtcagaccaccacaaccacactctggaggaggaatgccaatggggaccctgtctgcaatgcctgtgggctctactacaagcttcacaatattaacagacccctgactatgaagaaggaaggcatccagaccagaaaccgaaaaatgtctagcaaatccaaaaagtgcaaaaaagtgcatgactcactggaggacttccccaagaacagctcgtttaacccggccgccctctccagacacatgtcctccctgagccacatctcgcccttcagccactccagccacatgctgaccacgcccacgccgatgcacccgccatccagcctgtcctttggaccacaccacccctccagcatggtcaccgccatgggttagagccctgctcgatgctcacagggcccccagcgagagtccctgcagtccctttcgacttgcatttttgcaggagcagtatcatgaagcctaaacgcgatggatatatgtttttgaaggcagaaagcaaaattatgtttgccactttgcaaaggagctcactgtggtgtctgtgttccaaccactgaatctggaccccatctgtgaataagccattctgactcatatcccctatttaacagggtctctagtgctgtgaaaaaaaaaatgctgaacattgcatataacttatattgtaagaaatactgtacaatgactttattgcatctgggtagctgtaaggcatgaaggatgccaagaagtttaaggaatatgggagaaatagtgtggaaattaagaagaaactaggtctgatattcaaatggacaaactgccagttttgtttcctttcactggccacagttgtttgatgcattaaaagaaaataaaaaaaagaaaaaagagaaaagaaaaaaaaagaaaaaagttgtaggcgaatcatttgttcaaagctgttggcctctgcaaaggaaataccagttctgggcaatcagtgttaccgttcaccagttgccgttgagggtttcagagagcctttttctaggcctacatgctttgtgaacaagtccctgtaattgttgtttgtatgtataattcaaagcaccaaaataagaaaagatgtagatttatttcatcatattatacagaccgaactgttgtataaatttatttactgctagtcttaagaactgctttctttcgtttgtttgtttcaatattttccttctctctcaatttttggttgaataaactagattacattcagttggcctaaggtggttgtgctcggagggtttcttgtttcttttccattttgtttttggatgatatttattaaatagcttctaagagtccggcggcatctgtcttgtccctattcctgcagcctgtgctgagggtagcagtgtatgagctaccagcgtgcatgtcagcgaccctggcccgacaggccacgtcctgcaatcggcccggctgcctcttcgccctgtcgtgttctgtgttagtgatcactgcctttaatacagtctgttggaataatattataagcataataataaagtgaaaatattttaaaactacaa

SEQ ID NO: 1150 - protein, 444 aa, Homo sapiens
MEVTADQPRWVSHHHPAVLNGQHPDTHHPGLSHSYMDAAQYPLPEEVDVLFNIDGQGNHVPPYYGNSVRATVQRYPPTHHGSQVCRPPLLHGSLPWLDGGKALGSHHTASPWNLSPFSKTSIHHGSPGPLSVYPPASSSSLSGGHASPHLFTFPPTPPKDVSPDPSLSTPGSAGSARQDEKECLKYQVPLPDSMKLESSHSRGSMTALGGASSSTHHPITTYPPYVPEYSSGLFPPSSLLGGSPTGFGCKSRPKARSSTEGRECVNCGATSTPLWRRDGTGHYLCNACGLYHKMNGQNRPLIKPKRRLSAARRAGTSCANCQTTTTTLWRRNANGDPVCNACGLYYKLHNINRPLTMKKEGIQTRNRKMSSKSKKCKKVHDSLEDFPKNSSFNPAALSRHMSSLSHISPFSHSSHMLTTPTPMHPPSSLSFGPHHPSSMVTAMG

SEQ ID NO: 1151 - DNA, 3067 bp, Homo sapiens
ggcgccgtcttgatactttcagaaagaatgcattccctgtaaaaaaaaaaaaaaaatactgagagagggagagagagagagaagaagagagagagacggagggagagcgagacagagcgagcaacgcaatctgaccgagcaggtcgtacgccgccgcctcctcctcctctctgctcttcgctacccaggtgacccgaggagggactccgcctccgagcggctgaggaccccggtgcagaggagcctggctcgcagaattgcagagtcgtcgcccctttttacaacctggtcccgttttattctgccgtacccagtttttggatttttgtcttccccttcttctctttgctaaacgacccctccaagataatttttaaaaaaccttctcctttgctcacctttgcttcccagccttcccatccccccaccgaaagcaaatcattcaacgacccccgaccctccgacggcaggagccccccgacctcccaggcggaccgccctccctccccgcgcgcgggttccgggcccggcgagagggcgcgagcacagccgaggccatggaggtgacggcggaccagccgcgctgggtgagccaccaccaccccgccgtgctcaacgggcagcacccggacacgcaccacccgggcctcagccactcctacatggacgcggcgcagtacccgctgccggaggaggtggatgtgctttttaacatcgacggtcaaggcaaccacgtcccgccctactacggaaactcggtcagggccacggtgcagaggtaccctccgacccaccacgggagccaggtgtgccgcccgcctctgcttcatggatccctaccctggctggacggcggcaaagccctgggcagccaccacaccgcctccccctggaatctcagccccttctccaagacgtccatccaccacggctccccggggcccctctccgtctaccccccggcctcgtcctcctccttgtcggggggccacgccagcccgcacctcttcaccttcccgcccaccccgccgaaggacgtctccccggacccatcgctgtccaccccaggctcggccggctcggcccggcaggacgagaaagagtgcctcaagtaccaggtgcccctgcccgacagcatgaagctggagtcgtcccactcccgtggcagcatgaccgccctgggtggagcctcctcgtcgacccaccaccccatcaccacctacccgccctacgtgcccgagtacagctccggactcttcccccccagcagcctgctgggcggctcccccaccggcttcggatgcaagtccaggcccaaggcccggtccagcacaggcagggagtgtgtgaactgtggggcaacctcgaccccactgtggcggcgagatggcacgggacactacctgtgcaacgcctgcgggctctatcacaaaatgaacggacagaaccggcccctcattaagcccaagcgaaggctgtctgcagccaggagagcagggacgtcctgtgcgaactgtcagaccaccacaaccacactctggaggaggaatgccaatggggaccctgtctgcaatgcctgtgggctctactacaagcttcacaatattaacagacccctgactatgaagaaggaaggcatccagaccagaaaccgaaaaatgtctagcaaatccaaaaagtgcaaaaaagtgcatgactcactggaggacttccccaagaacagctcgtttaacccggccgccctctccagacacatgtcctccctgagccacatctcgcccttcagccactccagccacatgctgaccacgcccacgccgatgcacccgccatccagcctgtcctttggaccacaccacccctccagcatggtcaccgccatgggttagagccctgctcgatgctcacagggcccccagcgagagtccctgcagtccctttcgacttgcatttttgcaggagcagtatcatgaagcctaaacgcgatggatatatgtttttgaaggcagaaagcaaaattatgtttgccactttgcaaaggagctcactgtggtgtctgtgttccaaccactgaatctggaccccatctgtgaataagccattctgactcatatcccctatttaacagggtctctagtgctgtgaaaaaaaaaatgctgaacattgcatataacttatattgtaagaaatactgtacaatgactttattgcatctgggtagctgtaaggcatgaaggatgccaagaagtttaaggaatatgggagaaatagtgtggaaattaagaagaaactaggtctgatattcaaatggacaaactgccagttttgtttcctttcactggccacagttgtttgatgcattaaaagaaaataaaaaaaagaaaaaagagaaaagaaaaaaaaagaaaaaagttgtaggcgaatcatttgttcaaagctgttggcctctgcaaaggaaataccagttctgggcaatcagtgttaccgttcaccagttgccgttgagggtttcagagagcctttttctaggcctacatgctttgtgaacaagtccctgtaattgttgtttgtatgtataattcaaagcaccaaaataagaaaagatgtagatttatttcatcatattatacagaccgaactgttgtataaatttatttactgctagtcttaagaactgctttctttcgtttgtttgtttcaatattttccttctctctcaatttttggttgaataaactagattacattcagttggcctaaggtggttgtgctcggagggtttcttgtttcttttccattttgtttttggatgatatttattaaatagcttctaagagtccggcggcatctgtcttgtccctattcctgcagcctgtgctgagggtagcagtgtatgagctaccagcgtgcatgtcagcgaccctggcccgacaggccacgtcctgcaatcggcccggctgcctcttcgccctgtcgtgttctgtgttagtgatcactgcctttaatacagtctgttggaataatattataagcataataataaagtgaaaatattttaaaactacaa

SEQ ID NO: 1152 - protein, 443 aa, Homo sapiens
MEVTADQPRWVSHHHPAVLNGQHPDTHHPGLSHSYMDAAQYPLPEEVDVLFNIDGQGNHVPPYYGNSVRATVQRYPPTHHGSQVCRPPLLHGSLPWLDGGKALGSHHTASPWNLSPFSKTSIHHGSPGPLSVYPPASSSSLSGGHASPHLFTFPPTPPKDVSPDPSLSTPGSAGSARQDEKECLKYQVPLPDSMKLESSHSRGSMTALGGASSSTHHPITTYPPYVPEYSSGLFPPSSLLGGSPTGFGCKSRPKARSSTGRECVNCGATSTPLWRRDGTGHYLCNACGLYHKMNGQNRPLIKPKRRLSAARRAGTSCANCQTTTTTLWRRNANGDPVCNACGLYYKLHNINRPLTMKKEGIQTRNRKMSSKSKKCKKVHDSLEDFPKNSSFNPAALSRHMSSLSHISPFSHSSHMLTTPTPMHPPSSLSFGPHHPSSMVTAMG

SEQ ID NO: 1153 - DNA, 7773 bp, Homo sapiens
agagcctcggtggtttgcagcagtggaaccaggcaggcccagttgtgggtaggagaggccgtcacctgttgaggcctcccccccacacccccgcatcgccctgccctggcagagcccagcccccagtccccggagagcgcgcctgaggacggacggacggacggacggacagacctagggacggagggccaggggcaggggagatccaagaggccccgcgctggaatgcagttttctcgggcgagggagactttgcaccggagtggaaaatagtttggggtggggtttcgcaccgtcccctcctccccagccccgggccccctcccaggcgctttctgggagcttttagaactgcgctctgaagtttccagagagcgaggagcttttgcggcaggcagagacaatggaagaaaatgaaagccagaaatgtgagccgtgccttccttactcagcagacagaagacagatgcaggaacaaggcaaaggcaatctgcatgtaacatcaccagaagatgcagaatgccgcagaaccaaggaacgcctttctaatggaaacagtcgtggttcagtttccaagtcttcccgcaatatcccaaggagacacaccctaggggggccccgaagttccaaggaaatactgggaatgcaaacatctgagatggatcggaagagagaagcgttcctagaacatctgaagcagaagtacccccaccacgcctctgcaatcatgggtcaccaagagaggctgagagaccagacaaggagccccaaactgtctcacagtcctcaaccacccagtctgggtgacccggtcgagcatttatcagagacgtccgctgattctttggaagccatgtctgagggggatgctccaacccctttttccagaggcagccggactcgtgcgagccttcctgtggtgaggtcaaccaaccagacgaaagaaagatctctgggggttctctatctccagtatggagatgaaaccaagcagctcaggatgccgaatgaaatcacaagtgcagacacaatccgtgctctcttcgtaagtgcctttccacagcagctcaccatgaaaatgctggaatcgcccagtgtcgccatttacatcaaagatgaaagcagaaatgtctattatgaattaaatgatgtaaggaacattcaagacagatcactcctcaaagtgtacaacaaggatcctgcacatgcgtttaatcacacaccaaaaactatgaatggagacatgaggatgcagagagaacttgtttatgcaagaggagatggccctggggcccctcgccccggatctactgctcatccaccccatgcgattccaaattccccaccgtctactccagtgccccattccatgcccccctccccgtccagaattccttatgggggcacccgctccatggttgttcctggcaatgccaccatccccagggacagaatctccagcctgccagtctccagacccatctctccaagcccaagcgccattttagaaagaagagatgtcaagcctgatgaagacatgagtggcaaaaacattgcaatgtacagaaatgagggtttctatgctgatccttacctttatcacgagggacggatgagcatagcctcatcccatggtggacacccactggatgtccccgaccacatcattgcatatcaccgcaccgccatccggtcagcgagtgcttattgtaacccctcaatgcaagcggaaatgcatatggaacaatcactgtacagacagaaatcaaggaaatatccggatagccatttgcctacactgggctccaaaacaccccctgcctctcctcacagagtcagtgacctgaggatgatagacatgcacgctcactataatgcccacggcccccctcacaccatgcagccagaccgggcctctccgagccgccaggcctttaaaaaggagccaggcaccttggtgtatatagaaaagccacggagcgctgcaggattatccagccttgtagacctcggccctcctctaatggagaagcaagtttttgcctacagcacggcgacaatacccaaagacagagagaccagagagaggatgcaagccatggagaaacagattgccagtttaactggccttgttcagtctgcgctttttaaagggcccattacaagttatagcaaagatgcgtctagcgagaaaatgatgaaaaccacagccaacaggaaccacacagatagtgcaggaacgccccatgtgtctggtgggaagatgctcagtgctctggagtccacggtgcctcccagccagcctccacctgtgggcacctcagccatccacatgagcctgcttgagatgaggcggagcgtggcggaactcaggctccagctccagcagatgcggcagctccagctgcagaaccaggagttgctgagggcaatgatgaagaaggccgagctggaaatcagtggcaaagtgatggaaacaatgaagagactggaggatcccgtgcagcgacagcgcgtcctagtggagcaagagagacaaaaatatcttcatgaggaagagaagatcgtcaagaagttgtgcgagttggaagactttgttgaagacttgaagaaggactccacggcagccagccgattggttactctgaaagacgtggaagacggggctttcctcctgcgtcaagtgggagaggctgtagctaccctgaaaggagaatttccaaccttacaaaacaagatgcgagccatcctgcgcatagaagtggaggccgtgcggtttctgaaggaggagccacacaagctggacagtctcctgaagcgtgtgcgcagcatgacagacgtcctgaccatgctgcggagacatgtcactgatgggctcctgaaaggcacggacgcagcccaagccgcacagtacatggctatggaaaaggccacagccgcagaagtcctgaagagtcaggaggaggcagcccacacctccggccagcccttccacagcacaggtgcccctggcgatgcgaagtcggaagtggtgcctttgtccggcatgatggttcgccacgcgcagagctcccctgtggtcatccagccctcccagcactccgtggccctgctgaaccctgctcagaacttgcctcacgtggccagctccccagccgtcccccaggaagcaacctccactctgcagatgtcgcaggctccgcagtccccacagatacccatgaatgggtctgccatgcagagcttgttcattgaagaaatccacagtgtgagtgccaagaacagggcagtgtctatcgagaaagcagaaaagaaatgggaggaaaaaaggcaaaatctggatcactataatgggaaagagtttgagaagctcctagaagaagctcaggccaatatcatgaagtcaataccaaatctggagatgccgccagccacaggcccactgccaaggggagatgccccagtggacaaggtggaactttcagaagattctccaaattcggaacaggacttggaaaagctggggggaaagtcgccccctcctcctccgccacctcctcgtcgaagctacctgccaggatcgggactcaccaccacgaggtcaggcgatgtggtctacaccggcagaaaggagaacatcaccgctaaggcaagcagtgaagatgctggaccaagcccacagaccagagctacaaaatatccagcagaggagcctgcttcagcctggaccccatccccaccgcctgtcaccacctcctcctcaaaggatgaggaggaagaagaagaagaaggagacaaaataatggcagaactccaggcattccagaagtgttcctttatggatgtaaattcaaacagtcatgctgagccatcccgggctgacagtcacgttaaagacactaggtcgggcgccacagtgccacccaaggagaagaagaatttggaatttttccatgaagatgtacggaaatctgatgttgaatatgaaaatggcccccaaatggaattccaaaaggttaccacaggggctgtaagacctagtgaccctcctaagtgggaaagaggaatggagaatagtatttctgatgcatcaagaacatcagaatataaaactgagatcataatgaaggaaaattccatatccaatatgagtttactcagagacagtagaaactattcccaggaaactgtgcctaaggccagtttcggtttctctggcattagtccattagaagatgaaataaacaaagggtctaaaatctcaggcctgcaatactctatacctgacaccgagaaccagacgctgaattacggaaagacaaaggagatggaaaagcaaaatacggataagtgtcacgtttcctctcacactagactaacagaatcaagcgtgcatgattttaaaacagaagatcaagaggttatcacgacagattttggccaagttgttctaagacccaaggaggcaaggcatgctaacgtgaaccctaatgaggatggagaatcaagttcaagttctcccactgaagaaaatgcagccactgacaatattgccttcatgattaccgaaaccactgtccaggttctttccagtggggaggtgcatgatattgttagccaaaagggagaagacatacagacggttaatatcgatgccagaaaagagatgaccccccgacaagaagggactgacaatgaggatccagtcgtgtgcctggacaagaaaccagtgatcatcattttcgatgagcccatggacatccggtctgcctataagagactttcaactatctttgaggaatgtgatgaggaattagagagaatgatgatggaggaaaagatagaggaggaggaagaggaggaaaatggggattctgtagtccagaataataacacttcccagatgtctcataagaaggtggccccaggcaatcttagaaccggacaacaggtggaaacaaagtcacagccacactccctggccacagagaccagaaacccaggaggacaggaaatgaacagaacggagctgaacaagttcagccacgtggattctccaaattcggaatgcaagggtgaggacgcgaccgatgaccagtttgaaagccccaagaaaaagtttaaattcaaattccctaagaagcaactcgccgctctcactcaagccattcgcaccggaactaaaacagggaagaagactttgcaagtggtagtctatgaagaagaggaagaggatggcaccctgaaacagcacaaagaagccaagcgcttcgaaatcgctaggtctcaacctgaagacacccctgaaaacacagtgaggaggcaagagcagcccagcatcgagagtacatctccgatttcaagaactgatgaaattagaaaaaacacctacagaacattggatagcctggagcagaccattaaacagctcgaaaatacaatcagtgaaatgagtcccaaagccctagttgatacctcatgttcttccaacagagattctgttgcaagttcatcccacatagcccaagaggcctctccccgacccttgctagttccggatgaaggtcccactgccctagagccccctacgtcgataccttcagcttcacgtaagggctccagcggggccccacagacgagcaggatgcctgtccccatgagtgccaagaacagacccggaaccctggacaaacccggcaagcagtccaaactgcaggatccccgccaatatcgtcaggctaatggaagtgctaagaaatctggtggggactttaagcctacttccccctccttacctgcttctaagattccagccctttctcccagctctgggaaaagcagttctctgccctcttctagtggtgacagctctaacctccctaatccacctgctactaaaccatcgattgcttctaaccctctcagcccccaaacaggaccacctgctcactctgcctccctcatcccttctgtctctaatggctctttgaagtttcagagcctcactcatacaggtaaaggtcaccatctttcattctcaccgcagagtcaaaatggccgagcaccccctcctttgtcattttcctcctcccctccttctcctgcctcctccgtctcactgaatcaaggtgccaagggcaccaggaccatccatactcccagcctcaccagctacaaggcacagaatggaagttcaagcaaagccaccccatccacagcaaaagaaacctcttaaaggtcaaatcctattaggcacaagtcggagttacatttaaaaaaaattaacagtctacaacaactgttttcacaagagaatgtaacatattgctgtatcgtttgaggcttaatgctaaatatgtgctaaatactggattaatagatttcagtaaagctcgttcgttttgtttggttttctttttacctagttgctatagtgtctacagtctatactcaatacctataaaatgcagtaagcatgtgttacagaaagaggttctggtgggagagaaaggtgcgtgtgagacaggagaattgtcttaagcatataaaacatgtatgattccagaattttagtatgttttgtataaaactatttttcattacggagactagaagtgaacagagaattacacaagtgtgactatacaaattgtaaaacagatactataatatttccttttattttagtgttatttagctttattacagatttctatttttgtcaaaacttcatggttcctttcaagatcttttttgccaaaacattttgatactatagcattgtacatttgaaagtagtgttctagactataaaaccaatgaacttctacatgagccctacagacaggcatgtgtagaaggcaatttatcaaacctattgcactgccatgaaaagtgtgtataataatttgctagcccaagcaagctagttttctttgcttgcttcttttctttcttttttccttccttttttttttttttttcttttttaacatgttgagattctctagttgttttctttggcgtatctaaccccttcttttgttttctgagacctggtaacccacgctcttgcattgtggattttaaaatgtatactctgtacggttctgtaaaccgaaaaacttttgtaaatatataaatatacatagacataaaaatactgtatgtgacagcacatagagtagttttcccacaccaaagttaatttttatgcatgctttaaaagtatatatcgggaccggcagaaatggaagtatccatacatttttaaaaagcaacaagtttgcacagctagagtgtttttgtaaataaatgtatttgtataacacagtcatgtaatatacagaactataagcagagactttgcaaaactaaataaagggctgcatgcttattattttttgtaccttgtcactataactacttcctagtcaaagaacgaaatgtaactgttaccgagttaaatgtttttccgctttgagggatgtaaccacatccactcagaggacactacttttctgaaagctctggggtgactaatgatgagttcctaataaattaattgcaagtgtggtgccttggatgtggcctgttggctcgctttcttctctgtggcttatcaaggtgtagatgacagaaagcaaacctggatacagagtttccaccctcagttcctggaggggctcttattattttctctctttttaaaaaacttccagtagaagtaaagtggaaataaaatgtctttatcaaaaaaaaaaaaaaaaaaaa

SEQ ID NO: 1154 - protein, 1943 aa, Homo sapiens
MEENESQKCEPCLPYSADRRQMQEQGKGNLHVTSPEDAECRRTKERLSNGNSRGSVSKSSRNIPRRHTLGGPRSSKEILGMQTSEMDRKREAFLEHLKQKYPHHASAIMGHQERLRDQTRSPKLSHSPQPPSLGDPVEHLSETSADSLEAMSEGDAPTPFSRGSRTRASLPVVRSTNQTKERSLGVLYLQYGDETKQLRMPNEITSADTIRALFVSAFPQQLTMKMLESPSVAIYIKDESRNVYYELNDVRNIQDRSLLKVYNKDPAHAFNHTPKTMNGDMRMQRELVYARGDGPGAPRPGSTAHPPHAIPNSPPSTPVPHSMPPSPSRIPYGGTRSMVVPGNATIPRDRISSLPVSRPISPSPSAILERRDVKPDEDMSGKNIAMYRNEGFYADPYLYHEGRMSIASSHGGHPLDVPDHIIAYHRTAIRSASAYCNPSMQAEMHMEQSLYRQKSRKYPDSHLPTLGSKTPPASPHRVSDLRMIDMHAHYNAHGPPHTMQPDRASPSRQAFKKEPGTLVYIEKPRSAAGLSSLVDLGPPLMEKQVFAYSTATIPKDRETRERMQAMEKQIASLTGLVQSALFKGPITSYSKDASSEKMMKTTANRNHTDSAGTPHVSGGKMLSALESTVPPSQPPPVGTSAIHMSLLEMRRSVAELRLQLQQMRQLQLQNQELLRAMMKKAELEISGKVMETMKRLEDPVQRQRVLVEQERQKYLHEEEKIVKKLCELEDFVEDLKKDSTAASRLVTLKDVEDGAFLLRQVGEAVATLKGEFPTLQNKMRAILRIEVEAVRFLKEEPHKLDSLLKRVRSMTDVLTMLRRHVTDGLLKGTDAAQAAQYMAMEKATAAEVLKSQEEAAHTSGQPFHSTGAPGDAKSEVVPLSGMMVRHAQSSPVVIQPSQHSVALLNPAQNLPHVASSPAVPQEATSTLQMSQAPQSPQIPMNGSAMQSLFIEEIHSVSAKNRAVSIEKAEKKWEEKRQNLDHYNGKEFEKLLEEAQANIMKSIPNLEMPPATGPLPRGDAPVDKVELSEDSPNSEQDLEKLGGKSPPPPPPPPRRSYLPGSGLTTTRSGDVVYTGRKENITAKASSEDAGPSPQTRATKYPAEEPASAWTPSPPPVTTSSSKDEEEEEEEGDKIMAELQAFQKCSFMDVNSNSHAEPSRADSHVKDTRSGATVPPKEKKNLEFFHEDVRKSDVEYENGPQMEFQKVTTGAVRPSDPPKWERGMENSISDASRTSEYKTEIIMKENSISNMSLLRDSRNYSQETVPKASFGFSGISPLEDEINKGSKISGLQYSIPDTENQTLNYGKTKEMEKQNTDKCHVSSHTRLTESSVHDFKTEDQEVITTDFGQVVLRPKEARHANVNPNEDGESSSSSPTEENAATDNIAFMITETTVQVLSSGEVHDIVSQKGEDIQTVNIDARKEMTPRQEGTDNEDPVVCLDKKPVIIIFDEPMDIRSAYKRLSTIFEECDEELERMMMEEKIEEEEEEENGDSVVQNNNTSQMSHKKVAPGNLRTGQQVETKSQPHSLATETRNPGGQEMNRTELNKFSHVDSPNSECKGEDATDDQFESPKKKFKFKFPKKQLAALTQAIRTGTKTGKKTLQVVVYEEEEEDGTLKQHKEAKRFEIARSQPEDTPENTVRRQEQPSIESTSPISRTDEIRKNTYRTLDSLEQTIKQLENTISEMSPKALVDTSCSSNRDSVASSSHIAQEASPRPLLVPDEGPTALEPPTSIPSASRKGSSGAPQTSRMPVPMSAKNRPGTLDKPGKQSKLQDPRQYRQANGSAKKSGGDFKPTSPSLPASKIPALSPSSGKSSSLPSSSGDSSNLPNPPATKPSIASNPLSPQTGPPAHSASLIPSVSNGSLKFQSLTHTGKGHHLSFSPQSQNGRAPPPLSFSSSPPSPASSVSLNQGAKGTRTIHTPSLTSYKAQNGSSSKATPSTAKETS

SEQ ID NO: 1155 - DNA, 801 bp, Homo sapiens
atgccgaaaggaaagaaggccaaggggaagaaggtggttccggcccctgctggcatgaagaaacaggaggccaagaaagtggtgaatcccctgtttgagaaaaggcctgagaattttggcattggacaggacatccagcctaaaagagaactcacccactttgtgaaatggccccgctatatcaggttgcagcggcagagagccaccctctataaacggctgaaagtgcctcctgtgattaaccagtttacccaggccctggactgccaaacagctactcagctgcttaagctggcccacaagtacagaccagatccaaagcaagagaagaagcagaggctgttggcctgggccgagaagaaaactgctggcaaaggggacatccccactaagagaccacatgtccttcgagcaggaattgacaccgtcaccaccttggtggagaacaagaaagctcagctagtggtgatagcacacaacgtggatcccatcgggctggttatcttcttgcctgccctgtgtcgtaaaatgggggtcccttactgcattatcaaggggaaggcaagactgggccgtctagtgcacaggaagacctgcaccactgtcgccctcacacaggtgcacttggaagataaaggcggtttagctaagctggtggaagctatcaggaccaattacaatgacagatatgatgagatccgccgtcactggggtggcaatgtcctgggtcccaagtctgtggctcgcatcgccaagcttgaaaaggcaaaggctaaataacttgccactaaactgggttaa

SEQ ID NO: 1156 - DNA, 739 bp, Homo sapiens
atggaggtgggtagagatggagtcctggggaagacaaggaaagccttcaaagagagggaccactgggatgagcactgggataggggagggggtgtcagcctggtggacaagagccttatctatcaatacatggcccctgaggtggtggtagtcttcgtggaccaggccacgttctacgataagcattgtgacctggagagcctgggcatggtcctctacatcatgctgagtggctacctgcccttcgtgggtcactgcggggccaactgtggctgggaccggggtgaggtctgcagggtgtgccagaaaaagctgtttgaaagcatccaggaaggcaagtatgaatttcctgacaaagactgggcacacatctccagtgaggccaaatgcctcatctccaagctccaagctcctggggcgagatgcgaagcagaaacttagcgccgcccaagttctgcagcacccacgggtgcaggggcaagctccagaaaagggactccccactccgcaagtcctctagaggaagagcagcacaatggacctgacactcttcgcagctgaggccatcgcccttaactgccagctatctcagcacgaagagaacgaactagcagaggagccagaggcactggctgatggcctctgctccatgaagctttcccttccctgcaagtcaccctggcccggaggacaggagcccaaccacagcactctgaaatgctccagtcacaccttatag

SEQ ID NO: 1157 - DNA, 213 bp, Homo sapiens
atgaacattgactctggtgctgtggtcgccgtgcgggtctcagtaggagggttcactaggaaggcggcctgcgctcatggagatggcatctcagagatgatggcagagggagataatcgcagcaccaacctgctggctacagagactgcaagtctggaagaaacagctgcaaggatggggagaagtgatgctgatgctgataaagccctctga

SEQ ID NO: 1158 - protein, 70 aa, Homo sapiens [sequence omitted]

SEQ ID NO: 1159 - DNA, 2775 bp, Homo sapiens
ggactgccccgccctggtccagtgattgatcagcagtgattactgaggctttaatggtccgcttggatgggaattaattctgggatggataaataatgcatcgaggtttatgtagtccaaggcgagccgtccgtccggagccaggagaggtagccgagggagcctgacgggtgacgccagcggccacggggccccgaacgagcaggacatgaggggcgactaggcgcgaggacgagcaaaagcaagtggatgacagcatgaacggccctgcggggctggccggacggctgcaagaacatgctgagcccaaagatcaggcaggccaggagggcccgctccaaaagcctagtgatgggggagcagagccggagccctgggcggatgccgtgccctcacaggctgggccccgtgctgaaggcgggctggctgaagaagcagaggagcatcatgaagaactggcagcagcgctggtttgtgctgcgtggggatcagcttttctactacaaggacaaagatgagatcaagccccagggatttatttctctacaagggacacaggtgactgaacttcctcctggccccgaggacccagggaagcacctctttgagatcagcccaggtggtgccggggagcgggagaaggtgccggccaaccccgaggcgctcctgctcatggccagctcccagcgtgacatggaggactgggtgcaggccatccgccgagtcatctgggccccgctgggcggagggatctttgggcagcgcctagaggaaacagtccaccacgagcggaagtatggcccccgcctggcgcccctgctggtggagcagtgtgtggacttcatccgggagcgcgggctcactgaggaggggctgttccgcatgccaggccaggccaacctggtgagggacctgcaggattccttcgactgtggggagaagccactgtttgacagcacaacagacgtgcacacggtggcctccctgctgaagctgtacctgcgggagctccccgagcccgtggtccccttcgccaggtacgaggacttcctcagctgcgcccagctgctcaccaaggacgagggggagggcactctggagttggctaaacaagtgagcaaccttcctcaggcaaattacaacctgctcagatacatctgcaagtttctggatgaagttcaggcatactcaaatgtcaacaagatgagtgtccagaatctggcaaccgtttttggacctaacattctgcggccacaggtagaggacccagtaaccatcatggaaggcacttccctcgtccagcacctgatgaccgtcctcatccgcaaacacagccagctcttcacggcaccggtcccggaagggcccacctccccgcgcgggggcctgcaatgcgcagtggggtggggctccgaggaggtcaccagggacagccaaggagagcccggcggccccggcctgcccgcgcacaggacctcttccctggacggggcggccgtggcggtgctctccagaacagcccccacggggccggggagccggtgcagccctgggaagaaggtgcagaccctgcccagttggaagtcctccttccggcagccgaggtccctatcgggaagcccgaaggggggcggctcatccctggaggtgcccatcatctcctccggcgggaactggcttatgaacgggctgtcctccctgcgcggacaccgccgggcctcgtcgggagaccggctcaaggactcgggctccgtgcagagactctccacctacgacaatgtgcccgcgccgggcctggtccccggcatacccagcgtggccagtatggcgtggtccggggcctcgtccagcgagtcgtcggtggggggctcactcagcagctgcacggcctgccgcgccagcgactcgtctgcccgcagttccctgcacaccgactgggccctggagccctccccgctccccagcagcagcgaggaccccaagtccctggacctggaccacagcatggacgaggcgggcgcgggtgccagcaacagcgagcccagcgagccggacagccccacccgggaacacgcgcgccgctccgaggccttacaggggctggtcactgagctcagggccgagctgtgccgccagcggactgagtacgagaggagtgtgaaaagaatcgaagaagggagtgctgacctgagaaaacgaatgtcccggttagaagaagaactggaccaggaaaagaaaaaatacatcatgctggaaataaagctgcggaactctgaacgggcgcgggaggatgcggagaggaggaaccagctgttgcagagggaaatggaggagtttttttcgaccctaggaagcttgactgttggggcaaaaggtgccagggccccaaagtaaaaggaatggcagagctcacttctgtaccacgtctgctggtctccagccttgtatggagttagaagcgtctgtatctctggagcagccaggcgctctggagccagctggagagagagagatcctgatacctctgtggggactgtggggacttttgggaccccacacactccaggtgggatcagatgctgctccaaccatgcagttcctggtgagggtcagaaggggacggtaccaagagtagcgcttagcccttacccaggaaatatccttcatggccacagaaatggagggcgcccaggatccaggcagccaccgggaacagtcagctttctttattaaatgtgctcacaaagcaaaaaaaaaaaaaaaaaaaaaaaaaaa

SEQ ID NO: 1160 - protein, 698 aa, Homo sapiens
MLSPKIRQARRARSKSLVMGEQSRSPGRMPCPHRLGPVLKAGWLKKQRSIMKNWQQRWFVLRGDQLFYYKDKDEIKPQGFISLQGTQVTELPPGPEDPGKHLFEISPGGAGEREKVPANPEALLLMASSQRDMEDWVQAIRRVIWAPLGGGIFGQRLEETVHHERKYGPRLAPLLVEQCVDFIRERGLTEEGLFRMPGQANLVRDLQDSFDCGEKPLFDSTTDVHTVASLLKLYLRELPEPVVPFARYEDFLSCAQLLTKDEGEGTLELAKQVSNLPQANYNLLRYICKFLDEVQAYSNVNKMSVQNLATVFGPNILRPQVEDPVTIMEGTSLVQHLMTVLIRKHSQLFTAPVPEGPTSPRGGLQCAVGWGSEEVTRDSQGEPGGPGLPAHRTSSLDGAAVAVLSRTAPTGPGSRCSPGKKVQTLPSWKSSFRQPRSLSGSPKGGGSSLEVPIISSGGNWLMNGLSSLRGHRRASSGDRLKDSGSVQRLSTYDNVPAPGLVPGIPSVASMAWSGASSSESSVGGSLSSCTACRASDSSARSSLHTDWALEPSPLPSSSEDPKSLDLDHSMDEAGAGASNSEPSEPDSPTREHARRSEALQGLVTELRAELCRQRTEYERSVKRIEEGSADLRKRMSRLEEELDQEKKKYIMLEIKLRNSERAREDAERRNQLLQREMEEFFSTLGSLTVGAKGARAPK

SEQ ID NO: 1161 - DNA, 7021 bp, Homo sapiens
caacgtgctgagctaatagcgacagatagagggcagacagattcctgctagcagcttagtgttagttgcttgtggtaactaaggcaggtggcatacatctcagaacgtggagaatgatggtatgctttctgagttaacatgttgaactgttttgcttttctaaaaattttcctagtaacattttcttgatgatatgagagtggatatcaatgcctcacagaaacaagaggtggaacatgtgaatgaatcgtcttggaactagattatgagcactggttctttttaaagggatgtgcaagaggcagccttggcaagaaaacttgctgcataatcttacatggactaaagatgaaactttaaaccgcaaatcagctttgagtgaactttgacagaagatgtttcgacagttttatctctggacatgtttagcttcagggatcatcctgggctctctctttgaaatctgcttgggccagtatgatgatgattgcaaactagctaggggaggaccaccagctaccatagttgctattgatgaagaaagtcggaatggtacaattctggtggacaacatgctgatcaaagggactgctggaggaccagaccccaccatagaactttctttaaaggataatgtggattactgggtgttgatggatcctgttaagcaaatgcttttcctgaacagcaccggaagagttctggatagagatccaccgatgaacatacactccattgtggtgcaggtccagtgcatcaacaaaaaagtgggcactattatctaccatgaagtgcgaatagtggtgagagacaggaatgacaactcacccactttcaagcatgaaagctactatgccacagtgaatgagctcactccagttggtaccacaatattcacaggattttcaggagacaatggagctacagatatagatgatggaccaaatggacagatagagtatgttattcagtataatccagatgatccgacatccaatgacacctttgaaattcccctaatgttgactggaaatatagtgttaaggaagaggctcaactatgaagataagactcgctactttgtcataatccaagctaatgaccgtgcccaaaatctgaatgagaggcgaaccaccaccaccactctcacagtggatgttctggatggagatgacttgggtccaatgtttcttccttgtgtccttgtgccaaacactcgtgattgccgtccactcacttatcaagctgccatacctgagttgagaactccggaagaactgaaccccattattgttacgccaccaatccaagccattgatcaggaccggaatattcaaccgccatcagataggccaggaatcctctattccatccttgttgggactcctgaggattacccacgatttttccatatgcatcctaggacagcagaacttagtctcctggagccagtaaacagagactttcaccagaaatttgatttggttattaaggctgaacaagacaatggtcatcctcttcctgcctttgccggtctacacattgaaatactggatgaaaacaatcaaagtccatattttacaatgcccagttatcaaggctatatcctggaatctgccccagtgggagcaaccatttcggacagtctcaatttgacttcacctttaagaatagtagctctggacaaggacatagaagatacaaaagacccagagcttcacctttttctgaatgactacacctcagtcttcaccgtcacacagactggtattactcgctacctcaccttacttcaaccagtggacagggaagaacagcaaacttacaccttttcgataacagcatttgatggtgtacaagaaagtgagccagtcatcgtcaatattcaagtgatggatgcaaatgataacacgccaaccttccctgaaatatcctatgatgtgtatgtttatacagacatgagacctggggacagtgtcatacagctcactgcagtcgacgcagacgaagggtcaaatggggagatcacatatgaaatccttgttggggctcagggagacttcatcatcaataaaacaacagggcttatcaccatcgctccaggggtggaaatgatagtcgggcggacttacgcactcacggtccaagcagcggataatgctcctcctgcagagcgaaggaactccatctgcactgtgtatattgaagtgcttccaccaaataatcaaagccctcctcgcttcccacagctgatgtatagccttgaaattagtgaagccatgagggttggtgctgttttattaaatctacaggcaactgatcgagagggagactcaataacatatgccattgagaatggagatcctcagagagtttttaatctttcagaaaccacggggattctaaccttagggaaagcactggacagggaaagcactgatcgctacattctgatcatcacagcttcagatggcaggccagatgggacctcaactgccacagtaaacatagtggtgacagatgtcaatgacaatgctccagtgtttgatccttatctgccaagaaatttatctgtggtggaagaagaagccaatgcctttgtgggtcaagtaaaagcaacagaccctgatgctggaataaatggtcaagtgcactacagtttgggtaactttaataatctttttcgtatcacatccaatgggagcatttacacagcagtgaagcttaacagagaagtcagggactactatgaacttgttgttgtggcaacagatggagcagtacaccctcgtcattcaactctaaccttggccatcaaggttttggacattgatgataacagtcctgtgttcaccaattcaacatacactgtccttgttgaagagaatttgccagctgggactaccatccttcaaatagaggccaaagatgtcgaccttggagcaaatgtgtcttaccggataagaagcccagaagtgaagcacttttttgcactacatccatttacaggagaactatcgcttttaaggagtttagattatgaggcatttccagaccaagaagcaagtatcacttttctggtagaggcctttgatatttatggaacaatgccacctggtattgctactgtcacagtgattgtaaaggatatgaatgattatcctcctgtctttagtaaacgaatatacaaagggatggtggctccggatgcagtcaagggtacacctatcacaacagtttatgctgaagatgcagaccctcctggattacctgcaagtcgtgtgaggtatagagtagatgatgtacagtttccttaccctgccagtatttttgaagtggaagaagattctggaagagtaataacacgagtcaatcttaatgaagaacctacaacaatttttaagttggtggtggttgcttttgatgatggggagcctgtgatgtccagcagtgccacagtgaagattcttgtcttacatcctggtgagatcccacgcttcacacaggaggaatatagacctcctccagtaagtgaacttgccaccaaagggaccatggttggtgtaatttctgctgctgccattaatcaaagtattgtgtactccattgtttcaggaaatgaagaagatacatttggaattaataacatcacaggtgttatctatgtgaatggacctctggattatgagaccaggacaagctatgtacttcgagtccaagctgattccctggaagtggtccttgccaatctccgagttccttcaaaaagcaatacagctaaagtatacattgagattcaggatgaaaataatcatcccccagtgtttcagaaaaaattctacatcggaggtgtatctgaagatgcaagaatgtttacttctgtactcagagtgaaggctactgataaagatactggcaattatagtgtcatggcctacagactcataataccaccaattaaagagggaaaagaaggatttgtagtggaaacatatacagggcttatcaaaactgctatgctcttccataatatgaggagatcctacttcaagtttcaagttattgcaactgacgactatgggaagggactgagcggcaaagccgatgtactcgtctccgtggtcaatcagctggatatgcaagtcattgtttccaatgtgcctcctactctagtggaaaaaaagatagaagatcttacagagatcttggatcgctatgttcaggaacaaattcctggtgccaaggtcgtagtggagtccattggagctcgccggcatggagatgccttttccctagaagattacaccaaatgtgacttgactgtctatgcaattgacccccaaaccaacagagccatcgatagaaatgagctttttaaatttttggatggcaaactacttgatatcaataaagactttcagccgtattatggggaaggaggacgcattctggagatccggactccagaggcagtgaccagcattaaaaagagaggagaaagtctaggatacacagaaggggccttgttggctctggccttcatcatcatcctctgctgcattcctgccatcttggtggttttggtcagctacagacagtttaaagtacgtcaagctgagtgtacaaagactgcacgaattcaggccgcattacccgcggctaaaccagcagtgccggctcctgcaccagtggcagcgcccccgccgccgccgccgcctccgccaggtgcgcatctctatgaagaacttggagacagctcaattcttttccttctctaccattttcaacaaagcaggggaaataactcagtctcagaagacaggaaacatcaacaagttgtgatgcccttttcttccaatactattgaggctcacaagtcagctcatgtagacggatcacttaagagcaacaaactgaagtctgcaagaaaattcacatttctatctgatgaggatgacttaagtgcccataatcccctttataaggaaaacataagtcaagtatcaacaaattcagacatttcacagagaacagattttgtagacccattttcacccaaaatacaagccaagagtaagtctctgaggggcccaagagaaaagattcagaggctgtggagtcagtcagtcagcttacccaggaggctgatgaggaaagttccaaatagaccagagatcatagatctgcagcagtggcaaggcaccaggcagaaagctgaaaatgaaaacactggaatctgtacaaacaaaagaggtagcagcaatccattgcttacaactgaagaggcaaatttgacagagaaagaggaaataaggcaaggtgaaacactgatgatagaaggaacagaacagttgaaatctctctcttcagactcttcattttgctttcccaggcctcacttctcattctccactttgccaactgtttcaagaactgtggaactcaaatcagaacctaatgtcatcagttctcctgctgagtgttccttggaactttctccttcaaggccttgtgttttacattcttcactctctaggagagagacacctatttgtatgttacctattgaaaccgaaagaaatatttttgaaaattttgcccatccaccaaacatctctccttctgcctgtccccttccccctcctcctcctatttctcctccttctcctcctcctgctcctgctcctcttgctcctcctcctgacatttctcctttttctcttttttgtcctcctccctctcctccttctatccctcttcctcttcctcctcctacattttttccactttccgtttcaacgtctggtcccccaacaccacctcttctacctccatttccaactcctcttcctccaccacctccttctattccttgccctccacctccttcagcttcatttctgtccacagagtgtgtctgtataacaggtgttaaatgcacgaccaacttgatgcctgccgagaaaattaagtcctctatgacacagctatcaacaacgacagtgtgtaaaacagaccctcagagagaaccaaaaggcatcctcagacacgttaaaaacttagcagaacttgaaaaatcagtagctaacatgtacagtcaaatagaaaaaaactatctacgcacaaatgtttcagaacttcaaactatgtgcccttcagaagtaacaaatatggaaatcacatctgaacaaaacaaggggagtttgaacaatattgtcgagggaactgaaaaacaatctcacagtcaatctacttcactgtaatgttgcttttcttattttagtcgggcaaacctcttgttgatcatagtcttcaagttgaacatcaaatttgaacgtcaaagaagactctattattttaccccaaattcaatgaaatgcagttttttttctcgtttttaatttaaaaagatattaacctcatcactactaactcactcatataatagatttaccttactttttaaaaactacaaagtagcataatttgttctacatttatttgaaaagtaagtaattttaatctcttttttagtgggaatatgtgggcatgaaaattagatacccaacttaaaccaaaggcatgtctatcatgtggatgcagtaacatttacatttagtttttgatcgtagttttatatgaatgttccaagaaaaaagcagactgttacaaataagttaaaactgatatgattgataggttctgttttttcttgaagcctatgtatttggtaagaagaaatactaccgaagtaaaatataatgtacctagattgtaggagatgacagacataaggtatttcaaaataaatctcaggtgctataacatgtagtcatctgttttctgataagaacatcttttactctgacttgcttttatcttagtagtatgcttatggatttagtagtatgcttatggatttgataaatcttatactttttcagttgctgtcttattctctttatttctcattgtgctttcccttcccttctttataatgaaaataaatcttgagtcgttg

SEQ ID NO: 1162 - protein, 1955 aa, Homo sapiens
MFRQFYLWTCLASGIILGSLFEICLGQYDDDCKLARGGPPATIVAIDEESRNGTILVDNMLIKGTAGGPDPTIELSLKDNVDYWVLMDPVKQMLFLNSTGRVLDRDPPMNIHSIVVQVQCINKKVGTIIYHEVRIVVRDRNDNSPTFKHESYYATVNELTPVGTTIFTGFSGDNGATDIDDGPNGQIEYVIQYNPDDPTSNDTFEIPLMLTGNIVLRKRLNYEDKTRYFVIIQANDRAQNLNERRTTTTTLTVDVLDGDDLGPMFLPCVLVPNTRDCRPLTYQAAIPELRTPEELNPIIVTPPIQAIDQDRNIQPPSDRPGILYSILVGTPEDYPRFFHMHPRTAELSLLEPVNRDFHQKFDLVIKAEQDNGHPLPAFAGLHIEILDENNQSPYFTMPSYQGYILESAPVGATISDSLNLTSPLRIVALDKDIEDTKDPELHLFLNDYTSVFTVTQTGITRYLTLLQPVDREEQQTYTFSITAFDGVQESEPVIVNIQVMDANDNTPTFPEISYDVYVYTDMRPGDSVIQLTAVDADEGSNGEITYEILVGAQGDFIINKTTGLITIAPGVEMIVGRTYALTVQAADNAPPAERRNSICTVYIEVLPPNNQSPPRFPQLMYSLEISEAMRVGAVLLNLQATDREGDSITYAIENGDPQRVFNLSETTGILTLGKALDRESTDRYILIITASDGRPDGTSTATVNIVVTDVNDNAPVFDPYLPRNLSVVEEEANAFVGQVKATDPDAGINGQVHYSLGNFNNLFRITSNGSIYTAVKLNREVRDYYELVVVATDGAVHPRHSTLTLAIKVLDIDDNSPVFTNSTYTVLVEENLPAGTTILQIEAKDVDLGANVSYRIRSPEVKHFFALHPFTGELSLLRSLDYEAFPDQEASITFLVEAFDIYGTMPPGIATVTVIVKDMNDYPPVFSKRIYKGMVAPDAVKGTPITTVYAEDADPPGLPASRVRYRVDDVQFPYPASIFEVEEDSGRVITRVNLNEEPTTIFKLVVVAFDDGEPVMSSSATVKILVLHPGEIPRFTQEEYRPPPVSELATKGTMVGVISAAAINQSIVYSIVSGNEEDTFGINNITGVIYVNGPLDYETRTSYVLRVQADSLEVVLANLRVPSKSNTAKVYIEIQDENNHPPVFQKKFYIGGVSEDARMFTSVLRVKATDKDTGNYSVMAYRLIIPPIKEGKEGFVVETYTGLIKTAMLFHNMRRSYFKFQVIATDDYGKGLSGKADVLVSVVNQLDMQVIVSNVPPTLVEKKIEDLTEILDRYVQEQIPGAKVVVESIGARRHGDAFSLEDYTKCDLTVYAIDPQTNRAIDRNELFKFLDGKLLDINKDFQPYYGEGGRILEIRTPEAVTSIKKRGESLGYTEGALLALAFIIILCCIPAILVVLVSYRQFKVRQAECTKTARIQAALPAAKPAVPAPAPVAAPPPPPPPPPGAHLYEELGDSSILFLLYHFQQSRGNNSVSEDRKHQQVVMPFSSNTIEAHKSAHVDGSLKSNKLKSARKFTFLSDEDDLSAHNPLYKENISQVSTNSDISQRTDFVDPFSPKIQAKSKSLRGPREKIQRLWSQSVSLPRRLMRKVPNRPEIIDLQQWQGTRQKAENENTGICTNKRGSSNPLLTTEEANLTEKEEIRQGETLMIEGTEQLKSLSSDSSFCFPRPHFSFSTLPTVSRTVELKSEPNVISSPAECSLELSPSRPCVLHSSLSRRETPICMLPIETERNIFENFAHPPNISPSACPLPPPPPISPPSPPPAPAPLAPPPDISPFSLFCPPPSPPSIPLPLPPPTFFPLSVSTSGPPTPPLLPPFPTPLPPPPPSIPCPPPPSASFLSTECVCITGVKCTTNLMPAEKIKSSMTQLSTTTVCKTDPQREPKGILRHVKNLAELEKSVANMYSQIEKNYLRTNVSELQTMCPSEVTNMEITSEQNKGSLNNIVEGTEKQSHSQSTSL

SEQ ID NO: 1163 - DNA, 936 bp, Homo sapiens
atgggttcagcccaaggcttggcatattgtggatgcttcgtagaagttattgtgggcttactgtcagctgtgcacaaggcaccaggagaacaggggctggagcggacacagcaggaggaggataggccgcgctgggcgggcgtcgcggggccgcgcttggtgttcctgagccgcggccgaactttttcccaagaagtcccacgtttggaggcccgaggagcgggacggggaggagagactggagttcctggaaggagcagcagcagcagccccacaacatggcctcctccgcctcctcctctcccgcgggcaccgaggactccgctcctgcccagggtggctttggatcagattattcacgaagctctagaaaggtaagtgaacttggcattggccattgcttattatgcttcctgtctggctcttactcatgttgccattttgtggactaaaactcaaggcagttcaaaaatactgatatgcaggtgccatggatgctgttggagtgtgtgtcctaagagagagggtaagtgctggttttccattttaaacatagctcgtgatatcaagttgccccctcccttcattccctgactcccgtcttcctccaaaagcggctctcttggtttagtaagcatctctaccctgcaaagcggaaataatgaaaaatgagattcactttgcaagcttgttgggtgagcttctggagaataatttttaccaaaagcctgaaatcatttggcattgttggtgttttcaatgcatctgcatcacagcacattgcatttcacatctggccagtttggaatgaaacttagaaaatcaccagactatagtgatgtaattgtcatgaagtggtttttgtagcttagagaaaagaaaaacacttggctgaaagaatggtctgaagtcccacccaaagtaaaacattctaaa

SEQ ID NO: 1164 - protein, 125 aa, Homo sapiens [sequence omitted]

SEQ ID NO: 1165 - DNA, 1235 bp, Homo sapiens
ggggggggggggcacttggcttcaaagctggctcttggaaattgagcggagagcgacgcggttgttgtagctgccgctgcggccgccgcggaataataagccgggatctaccatacccattgactaactatggaagattataccaaaatagagaaaattggagaaggtacctatggagttgtgtataagggtagacacaaaactacaggtcaagtggtagccatgaaaaaaatcagactagaaagtgaagaggaaggggttcctagtactgcaattcgggaaatttctctattaaaggaacttcgtcatccaaatatagtcagtcttcaggatgtgcttatgcaggattccaggttatatctcatctttgagtttctttccatggatctgaagaaatacttggattctatccctcctggtcagtacatggattcttcacttgttaagagttatttataccaaatcctacaggggattgtgttttgtcactctagaagagttcttcacagagacttaaaacctcaaaatctcttgattgatgacaaaggaacaattaaactggctgattttggccttgccagagcttttggaatacctatcagagtatatacacatgaggtagtaacactctggtacagatctccagaagtattgctggggtcagctcgttactcaactccagttgacatttggagtataggcaccatatttgctgaactagcaactaagaaaccacttttccatggggattcagaaattgatcaactcttcaggattttcagagctttgggcactcccaataatgaagtgtggccagaagtggaatctttacaggactataagaatacatttcccaaatggaaaccaggaagcctagcatcccatgtcaaaaacttggatgaaaatggcttggatttgctctcgaaaatgttaatctatgatccagccaaacgaatttctggcaaaatggcactgaatcatccatattttaatgatttggacaatcagattaagaagatgtagctttctgacaaaaagtttccatatgttatgtcaacagatagttgtgtttttattgttaactcttgtctatttttgtcttatatatatttctttgttatcaaacttcagctgtacttcgtcttctaatttcaaaaatataacttaaaaatgtaaatattctatatgaatttaaatataattctgtaaatgtgaaaaaaaaaaaaaaaaaaaaa

SEQ ID NO: 1166 - protein, 297 aa, Homo sapiens
MEDYTKIEKIGEGTYGVVYKGRHKTTGQVVAMKKIRLESEEEGVPSTAIREISLLKELRHPNIVSLQDVLMQDSRLYLIFEFLSMDLKKYLDSIPPGQYMDSSLVKSYLYQILQGIVFCHSRRVLHRDLKPQNLLIDDKGTIKLADFGLARAFGIPIRVYTHEVVTLWYRSPEVLLGSARYSTPVDIWSIGTIFAELATKKPLFHGDSEIDQLFRIFRALGTPNNEVWPEVESLQDYKNTFPKWKPGSLASHVKNLDENGLDLLSKMLIYDPAKRISGKMALNHPYFNDLDNQIKKM

SEQ ID NO: 1167 - DNA, 948 bp, Homo sapiens
ccattgactaactatggaagattataccaaaatagagaaaattggagaaggtacctatggagttgtgtataagggtagacacaaaactacaggtcaagtggtagccatgaaaaaaatcagactagaaagtgaagaggaaggggttcctagtactgcaattcgggaaatttctctattaaaggaacttcgtcatccaaatatagtcagtcttcaggatgtgcttatgcaggattccaggttatatctcatctttgagtttctttccatggatctgaagaaatacttggattctatccctcctggtcagtacatggattcttcacttgttaaggtagtaacactctggtacagatctccagaagtattgctggggtcagctcgttactcaactccagttgacatttggagtataggcaccatatttgctgaactagcaactaagaaaccacttttccatggggattcagaaattgatcaactcttcaggattttcagagctttgggcactcccaataatgaagtgtggccagaagtggaatctttacaggactataagaatacatttcccaaatggaaaccaggaagcctagcatcccatgtcaaaaacttggatgaaaatggcttggatttgctctcgaaaatgttaatctatgatccagccaaacgaatttctggcaaaatggcactgaatcatccatattttaatgatttggacaatcagattaagaagatgtagctttctgacaaaaagtttccatatgttatgtcaacagatagttgtgtttttattgttaactcttgtctatttttgtcttatatatatttctttgttatcaaacttcagctgtacttcgtcttctaatttcaaaaatataacttaaaaatgtaaatattctatatgaatttaaatataattctgtaaatgtgaaaaaaaaaaaaaaaaaaaaa

SEQ ID NO: 1168 - protein, 240 aa, Homo sapiens
MEDYTKIEKIGEGTYGVVYKGRHKTTGQVVAMKKIRLESEEEGVPSTAIREISLLKELRHPNIVSLQDVLMQDSRLYLIFEFLSMDLKKYLDSIPPGQYMDSSLVKVVTLWYRSPEVLLGSARYSTPVDIWSIGTIFAELATKKPLFHGDSEIDQLFRIFRALGTPNNEVWPEVESLQDYKNTFPKWKPGSLASHVKNLDENGLDLLSKMLIYDPAKRISGKMALNHPYFNDLDNQIKKM

SEQ ID NO: 1169 - DNA, 2213 bp, Homo sapiens
gcgggactcggccttctgggcgcgcgcgacgtcagtttgagttctgtgttctccccgcccgtgtcccgcccgacccgcgcccgcgatgctggcgctgcgctgcggctcccgctggctcggcctgctctccgtcccgcgctccgtgccgctgcgcctccccgcggcccgcgcctgcagcaagggctccggcgacccgtcctcttcctcctcctccgggaacccgctcgtgtacctggacgtggacgccaacgggaagccgctcggccgcgtggtgctggagctgaaggcagatgtcgtcccaaagacagctgagaacttcagagccctgtgcactggtgagaagggcttcggctacaaaggctccaccttccacagggtgatcccttccttcatgtgccaggcgggcgacttcaccaaccacaatggcacaggcgggaagtccatctacggaagccgctttcctgacgagaactttacactgaagcacgtggggccaggtgtcctgtccatggctaatgctggtcctaacaccaacggctcccagttcttcatctgcaccataaagacagactggttggatggcaagcatgttgtgttcggtcacgtcaaagagggcatggacgtcgtgaagaaaatagaatctttcggctctaagagtgggaggacatccaagaagattgtcatcacagactgtggccagttgagctaatctgtggccagggtgctggcatggtggcagctgcaaatgtccatgcacccaggtggccgcgttgggctgtcagccaaggtgcctgaaacgatacgtgtgcccactccactgtcacagtgtgcctgaggaaggctgctagggatgttagacctcggccaggacccaccacattgcttcctaatacccacccttcctcacgacctcatttctgggcatctttgtggacatgatgtcacccaccccttgtcaagcattgcctgtgattgcccagcccagattcatctgtgccttggacatggtgatggtgatgggttgccatccaagtgaaagtcttttccttgaccaagggggacagtcagttttgcaaaaggactctaatacctgtttaatattgtcttcctaattgggataatttaattaacaagattgactagaagtgaaactgcaacactaacttccccgtgctgtggtgtgacctgagttggtgacacaggccacagaccccagagcttggcttttgaaacacaactcagggcttttgtgaaggttcccccgctgagatctttcctcctggttactgtgaagcctgttggtttgctgctgtcgtttttgaggagggcccatgggggtaggagcagttgaacctgggaacaaacctcacttgagctgtgcctagacaatgtgaattcctgtgttgctaacagaagtggcctgtaagctcctgtgctccggagggaagcatttcctggtaggctttgatttttctgtgtgttaaagaaattcaatctactcatgatgtgttatgcataaaacatttctggaacatggatttgtgttcaccttaaatgtgaaaataaatcctattttctatggaagactggtacctggtttctggaagaggggtctgtgacttggagctgatctttactgagctcgccgtggcagatgccatgctcaggacgttcatgtggatggtttcatgtcatcgtgctggcaacttgtcctccctgccttagagatgaggctcagacaaacgaccttagcacccatagcctatgccatgagcactggctccaccctgaatcccagctcctccccttagtgaccccaagtctgtttccctcagctgcataaggaggcgatatagtttgaatatttgtccccagccaaatctcatgttgaactgtaatccccagtgctggaggtggggcctgctacgaggtgtttggatcatggggacgggtatttcatggcttggtgctgttttcttgatggtgaattattgcaagatacggtcatttaaaattgtgtggcacctccccctgcccccttcttgctcctgctttcaccatgtgacatgcctgatcccccttcaccttttgccatggtcataagcttcctgaggcctccctggaagctgagcagatgccagcaccatgcttcctgtacatcctgcagaaccataagccaattaaacctttttaataataaaaaaaaaaaaaaa

SEQ ID NO: 1170 - protein, 207 aa, Homo sapiens
MLALRCGSRWLGLLSVPRSVPLRLPAARACSKGSGDPSSSSSSGNPLVYLDVDANGKPLGRVVLELKADVVPKTAENFRALCTGEKGFGYKGSTFHRVIPSFMCQAGDFTNHNGTGGKSIYGSRFPDENFTLKHVGPGVLSMANAGPNTNGSQFFICTIKTDWLDGKHVVFGHVKEGMDVVKKIESFGSKSGRTSKKIVITDCGQLS

SEQ ID NO: 1171 - DNA, 2486 bp, Homo sapiens
gcactgcctctggcacctggggcagccgcgcccgcggagttttccgcccggcgctgacggctgctgcgcccgcggctccccagtgccccgagtgccccgcgggccccgcgagcgggagtgggacccagcccctaggcagaacccaggcgccgcgcccgggacgcccgcggagagagccactcccgcccacgtcccatttcgcccctcgcgtccggagtccccgtggccagatctaaccatgagctaccctggctatcccccgcccccaggtggctacccaccagctgcaccaggtggtggtccctggggaggtgctgcctaccctcctccgcccagcatgccccccatcgggctggataacgtggccacctatgcggggcagttcaaccaggactatctctcgggaatggcggccaacatgtctgggacatttggaggagccaacatgcccaacctgtaccctggggcccctggggctggctacccaccagtgccccctggcggctttgggcagcccccctctgcccagcagcctgttcctccctatgggatgtatccacccccaggaggaaacccaccctccaggatgccctcatatccgccatacccaggggcccctgtgccgggccagcccatgccaccccccggacagcagcccccaggggcctaccctgggcagccaccagtgacctaccctggtcagcctccagtgccactccctgggcagcagcagccagtgccgagctacccaggatacccggggtctgggactgtcacccccgctgtgcccccaacccagtttggaagccgaggcaccatcactgatgctcccggctttgaccccctgcgagatgccgaggtcctgcggaaggccatgaaaggcttcgggacggatgagcaggccatcattgactgcctggggagtcgctccaacaagcagcggcagcagatcctactttccttcaagacggcttacggcaaggatttgatcaaagatctgaaatctgaactgtcaggaaactttgagaagacaatcttggctctgatgaagaccccagtcctctttgacatttatgagataaaggaagccatcaagggggttggcactgatgaagcctgcctgattgagatcctcgcttcccgcagcaatgagcacatccgagaattaaacagagcctacaaagcagaattcaaaaagaccctggaagaggccattcgaagcgacacatcagggcacttccagcggctcctcatctctctctctcagggaaaccgtgatgaaagcacaaacgtggacatgtcactcgcccagagagatgcccaggagctgtatgcggccggggagaaccgcctgggaacagacgagtccaagttcaatgcggttctgtgctcccggagccgggcccacctggtagcagttttcaatgagtaccagagaatgacaggccgggacattgagaagagcatctgccgggagatgtccggggacctggaggagggcatgctggccgtggtgaaatgtctcaagaataccccagccttctttgcggagaggctcaacaaggccatgaggggggcaggaacaaaggaccggaccctgattcgcatcatggtgtctcgcagcgagaccgacctcctggacatcagatcagagtataagcggatgtacggcaagtcgctgtaccacgacatctcgggagatacttcaggggattaccggaagattctgctgaagatctgtggtggcaatgactgaacagtgactggtggctcacttctgcccacctgccggcaacaccagtgccaggaaaaggccaaaagaatgtctgtttctaacaaatccacaaatagccccgagattcaccgtcctagagcttaggcctgtcttccacccctcctgacccgtatagtgtgccacaggacctgggtcggtctagaactctctcaggatgccttttctaccccatccctcacagcctcttgctgctaaaatagatgtttcatttttctgactcatgcaatcattcccctttgcctgtggctaagacttggcttcatttcgtcatgtaattgtatatttttatttggaggcatattttcttttcttacagtcattgccagacagaggcatacaagtctgtttgctgcatacacatttctggtgagggcgactgggtgggtgaagcaccgtgtcctcgctgaggagagaaagggaggcgtgcctgagaaggtagcctgtgcatctggtgagtgtgtcacgagctttgttactgccaaactcactcctttttagaaaaaacaaaaaaaaagggccagaaagtcattccttccatcttccttgcagaaaccacgagaacaaagccagttccctgtcagtgacagggcttcttgtaatttgtggtatgtgccttaaacctgaatgtctgtagccaaaacttgtttccacattaagagtcagccagctctggaatggtctggaaatgtca

SEQ ID NO: 1172 - protein, 505 aa, Homo sapiens
MSYPGYPPPPGGYPPAAPGGGPWGGAAYPPPPSMPPIGLDNVATYAGQFNQDYLSGMAANMSGTFGGANMPNLYPGAPGAGYPPVPPGGFGQPPSAQQPVPPYGMYPPPGGNPPSRMPSYPPYPGAPVPGQPMPPPGQQPPGAYPGQPPVTYPGQPPVPLPGQQQPVPSYPGYPGSGTVTPAVPPTQFGSRGTITDAPGFDPLRDAEVLRKAMKGFGTDEQAIIDCLGSRSNKQRQQILLSFKTAYGKDLIKDLKSELSGNFEKTILALMKTPVLFDIYEIKEAIKGVGTDEACLIEILASRSNEHIRELNRAYKAEFKKTLEEAIRSDTSGHFQRLLISLSQGNRDESTNVDMSLAQRDAQELYAAGENRLGTDESKFNAVLCSRSRAHLVAVFNEYQRMTGRDIEKSICREMSGDLEEGMLAVVKCLKNTPAFFAERLNKAMRGAGTKDRTLIRIMVSRSETDLLDIRSEYKRMYGKSLYHDISGDTSGDYRKILLKICGGND

SEQ ID NO: 1173 - DNA, 2535 bp, Homo sapiens
gcactgcctctggcacctggggcagccgcgcccgcggagttttccgcccggcgctgacggctgctgcgcccgcggctccccagtgccccgagtgccccgcgggccccgcgagcgggagtgggacccagcccctaggcagaacccaggcgccgcgcccgggacgcccgcggagagagccactcccgcccacgtcccatttcgcccctcgcgtccggagtccccgtggccaggtgtgtgtctggggaagagacttacagaagtggagttgctgagtcaaagatctaaccatgagctaccctggctatcccccgcccccaggtggctacccaccagctgcaccaggtggtggtccctggggaggtgctgcctaccctcctccgcccagcatgccccccatcgggctggataacgtggccacctatgcggggcagttcaaccaggactatctctcgggaatggcggccaacatgtctgggacatttggaggagccaacatgcccaacctgtaccctggggcccctggggctggctacccaccagtgccccctggcggctttgggcagcccccctctgcccagcagcctgttcctccctatgggatgtatccacccccaggaggaaacccaccctccaggatgccctcatatccgccatacccaggggcccctgtgccgggccagcccatgccaccccccggacagcagcccccaggggcctaccctgggcagccaccagtgacctaccctggtcagcctccagtgccactccctgggcagcagcagccagtgccgagctacccaggatacccggggtctgggactgtcacccccgctgtgcccccaacccagtttggaagccgaggcaccatcactgatgctcccggctttgaccccctgcgagatgccgaggtcctgcggaaggccatgaaaggcttcgggacggatgagcaggccatcattgactgcctggggagtcgctccaacaagcagcggcagcagatcctactttccttcaagacggcttacggcaaggatttgatcaaagatctgaaatctgaactgtcaggaaactttgagaagacaatcttggctctgatgaagaccccagtcctctttgacatttatgagataaaggaagccatcaagggggttggcactgatgaagcctgcctgattgagatcctcgcttcccgcagcaatgagcacatccgagaattaaacagagcctacaaagcagaattcaaaaagaccctggaagaggccattcgaagcgacacatcagggcacttccagcggctcctcatctctctctctcagggaaaccgtgatgaaagcacaaacgtggacatgtcactcgcccagagagatgcccaggagctgtatgcggccggggagaaccgcctgggaacagacgagtccaagttcaatgcggttctgtgctcccggagccgggcccacctggtagcagttttcaatgagtaccagagaatgacaggccgggacattgagaagagcatctgccgggagatgtccggggacctggaggagggcatgctggccgtggtgaaatgtctcaagaataccccagccttctttgcggagaggctcaacaaggccatgaggggggcaggaacaaaggaccggaccctgattcgcatcatggtgtctcgcagcgagaccgacctcctggacatcagatcagagtataagcggatgtacggcaagtcgctgtaccacgacatctcgggagatacttcaggggattaccggaagattctgctgaagatctgtggtggcaatgactgaacagtgactggtggctcacttctgcccacctgccggcaacaccagtgccaggaaaaggccaaaagaatgtctgtttctaacaaatccacaaatagccccgagattcaccgtcctagagcttaggcctgtcttccacccctcctgacccgtatagtgtgccacaggacctgggtcggtctagaactctctcaggatgccttttctaccccatccctcacagcctcttgctgctaaaatagatgtttcatttttctgactcatgcaatcattcccctttgcctgtggctaagacttggcttcatttcgtcatgtaattgtatatttttatttggaggcatattttcttttcttacagtcattgccagacagaggcatacaagtctgtttgctgcatacacatttctggtgagggcgactgggtgggtgaagcaccgtgtcctcgctgaggagagaaagggaggcgtgcctgagaaggtagcctgtgcatctggtgagtgtgtcacgagctttgttactgccaaactcactcctttttagaaaaaacaaaaaaaaagggccagaaagtcattccttccatcttccttgcagaaaccacgagaacaaagccagttccctgtcagtgacagggcttcttgtaatttgtggtatgtgccttaaacctgaatgtctgtagccaaaacttgtttccacattaagagtcagccagctctggaatggtctggaaatgtca

SEQ ID NO: 1174 - protein, 505 aa, Homo sapiens; identical to SEQ ID NO: 1172

SEQ ID NO: 1175 - DNA, 2731 bp, Homo sapiens
gcactgcctctggcacctggggcagccgcgcccgcggagttttccgcccggcgctgacggctgctgcgcccgcggctccccagtgccccgagtgccccgcgggccccgcgagcgggagtgggacccagcccctaggcagaacccaggcgccgcgcccgggacgcccgcggagagagccactcccgcccacgtcccatttcgcccctcgcgtccggagtccccgtggccagggattattggacctgcctggtttaaactattgtcttagttaattttgtgctgctctaacaaaatatcacagactgagtaatttataagcaatagtagcttatttggctcacagttctggaggctgagaagatcgtgaggctgcatctggcaagggccttcttgctgcttcataacatggcagaagacatcatgcgggtgtgtgtctggggaagagacttacagaagtggagttgctgagtcaaagatctaaccatgagctaccctggctatcccccgcccccaggtggctacccaccagctgcaccaggtggtggtccctggggaggtgctgcctaccctcctccgcccagcatgccccccatcgggctggataacgtggccacctatgcggggcagttcaaccaggactatctctcgggaatggcggccaacatgtctgggacatttggaggagccaacatgcccaacctgtaccctggggcccctggggctggctacccaccagtgccccctggcggctttgggcagcccccctctgcccagcagcctgttcctccctatgggatgtatccacccccaggaggaaacccaccctccaggatgccctcatatccgccatacccaggggcccctgtgccgggccagcccatgccaccccccggacagcagcccccaggggcctaccctgggcagccaccagtgacctaccctggtcagcctccagtgccactccctgggcagcagcagccagtgccgagctacccaggatacccggggtctgggactgtcacccccgctgtgcccccaacccagtttggaagccgaggcaccatcactgatgctcccggctttgaccccctgcgagatgccgaggtcctgcggaaggccatgaaaggcttcgggacggatgagcaggccatcattgactgcctggggagtcgctccaacaagcagcggcagcagatcctactttccttcaagacggcttacggcaaggatttgatcaaagatctgaaatctgaactgtcaggaaactttgagaagacaatcttggctctgatgaagaccccagtcctctttgacatttatgagataaaggaagccatcaagggggttggcactgatgaagcctgcctgattgagatcctcgcttcccgcagcaatgagcacatccgagaattaaacagagcctacaaagcagaattcaaaaagaccctggaagaggccattcgaagcgacacatcagggcacttccagcggctcctcatctctctctctcagggaaaccgtgatgaaagcacaaacgtggacatgtcactcgcccagagagatgcccaggagctgtatgcggccggggagaaccgcctgggaacagacgagtccaagttcaatgcggttctgtgctcccggagccgggcccacctggtagcagttttcaatgagtaccagagaatgacaggccgggacattgagaagagcatctgccgggagatgtccggggacctggaggagggcatgctggccgtggtgaaatgtctcaagaataccccagccttctttgcggagaggctcaacaaggccatgaggggggcaggaacaaaggaccggaccctgattcgcatcatggtgtctcgcagcgagaccgacctcctggacatcagatcagagtataagcggatgtacggcaagtcgctgtaccacgacatctcgggagatacttcaggggattaccggaagattctgctgaagatctgtggtggcaatgactgaacagtgactggtggctcacttctgcccacctgccggcaacaccagtgccaggaaaaggccaaaagaatgtctgtttctaacaaatccacaaatagccccgagattcaccgtcctagagcttaggcctgtcttccacccctcctgacccgtatagtgtgccacaggacctgggtcggtctagaactctctcaggatgccttttctaccccatccctcacagcctcttgctgctaaaatagatgtttcatttttctgactcatgcaatcattcccctttgcctgtggctaagacttggcttcatttcgtcatgtaattgtatatttttatttggaggcatattttcttttcttacagtcattgccagacagaggcatacaagtctgtttgctgcatacacatttctggtgagggcgactgggtgggtgaagcaccgtgtcctcgctgaggagagaaagggaggcgtgcctgagaaggtagcctgtgcatctggtgagtgtgtcacgagctttgttactgccaaactcactcctttttagaaaaaacaaaaaaaaagggccagaaagtcattccttccatcttccttgcagaaaccacgagaacaaagccagttccctgtcagtgacagggcttcttgtaatttgtggtatgtgccttaaacctgaatgtctgtagccaaaacttgtttccacattaagagtcagccagctctggaatggtctggaaatgtca

SEQ ID NO: 1176 - protein, 505 aa, Homo sapiens; identical to SEQ ID NO: 1172

SEQ ID NO: 1177 - DNA, 3419 bp, Homo sapiens
gagtcgctcaggagcaagctgtggcaagctggagggagggacacatcccgtgttccatccactccctcccttctcagcagtcctcgcctgttctcacgtgctcacaggcagttaggcagaagtgatccccgtggctctgccaaagacaagcctgttgggttgaaagaagaagaagaagaagaaaaaaaaactcaggcaaagtcacagcctcaaaattgttcactgaaagaagcgtgagtggagaagtgtgagaagatgaatggaccggtggatggcttgtgtgaccactctctaagtgaaggagtcttcatgttcacatcggagtctgtgggagagggacacccggataagatctgtgaccagatcagtgatgcagtgctggatgcccatctcaagcaagaccccaatgccaaggtggcctgtgagacagtgtgcaagaccggcatggtgctgctgtgtggtgagatcacctcaatggccatggtggactaccagcgggtggtgagggacaccatcaagcacatcggctacgatgactcagccaagggctttgacttcaagacttgcaacgtgctggtggctttggagcagcaatccccagatattgcccagtgcgtccatctggacagaaatgaggaggatgtgggggcaggagatcagggtttgatgttcggctatgctaccgacgagacagaggagtgcatgcccctcaccatcatccttgctcacaagctcaacgcccggatggcagacctcaggcgctccggcctcctcccctggctgcggcctgactctaagactcaggtgacagttcagtacatgcaggacaatggcgcagtcatccctgtgcgcatccacaccatcgtcatctctgtgcagcacaacgaagacatcacgctggaggagatgcgcagggccctgaaggagcaagtcatcagggccgtggtgccggccaagtacctggacgaagacaccgtctaccacctgcagcccagtgggcggtttgtcatcggaggtccccagggggatgcgggtgtcactggccgtaagattattgtggacacctatggcggctggggggctcatggtggtggggccttctctgggaaggactacaccaaggtagaccgctcagctgcatatgctgcccgctgggtggccaagtctctggtgaaagcagggctctgccggagagtgcttgtccaggtttcctatgccattggtgtggccgagccgctgtccatttccatcttcacctacggaacctctcagaagacagagcgagagctgctggatgtggtgcataagaacttcgacctccggccgggcgtcattgtcagggatttggacttgaagaagcccatctaccagaagacagcatgctacggccatttcggaagaagcgagttcccatgggaggttcccaggaagcttgtattttagagccagggggagctgggcctggtctcaccctggaggcacctggtggccatgctcctcttccccagacgcctggctgctgatcgccttccccacccaccaaccctcagggcaaagccaggtccctctcatttagcctgtcctgtcatcatcatggccagctggaggcaggggcttcctggtgctggaggttggatcttgatgtaaggatgggcatggtgttctcctgctgctccctcagactggggcaatgttaatttagtggaaaaggcacccccgtcaagagtgaattccctcactcgtctcccccaacagctggaccctgaccagctccccctccctccccttgcctgtgccaggtgaggtcagcacatctcaacaggcctcagggctccttgtgggcctgggctcctggacccccctttcacaggcagccagtgccctgagccagggtctccagaaagccccacccaggccaggcatgtggcaggggttagagcaggactgatgtctcctaagcacctgtaatgtgcgagggacccagctaataactgatctcgttttttcttcactgcaacatgatgaggtagtaccttttatatcccatttatagatgggggaaagcaaagcacagagagtctggataacttccacagggtcccacagccacgtgtttagacctagatgtataactaggagctttgactcaggagcctgtgacataccccctcccccaccgttgtctcatgccagtaacaggctcaaacaatgacaaagcagattcagaaatgaggccatggactctgtcctgaaggcctgaggttactggaaattaggggattaacccactagctcttgttgagccgtgggcaattgtctgaaaagtgaagacagaaccacagggctattttgtttgcttcatgtgtcccagaagatgactgagggtgagttggcttacctggcccatcagggtaggctggagttagggactgaccagcagctttagaatcccagccccctgaccactcagagacatgcagagattgggtttttggacttctggggtaagtggtctaagtccagtccagtcctatctgggcttcctggagcagaagcagcaacttgtcctagcacagatggccagccccttagacagaggccctcaagtctttctctttccctggtcccttgtatcccctgcaggctgagtgcatttggagggagtgagtggccctttcggatccagggaggctggtcctatggcctcatgttaaataggcggggcttgccttctggtgttggacaagcttctgagacgtcatgaggagattctgcctttgccaggtgactgtctggggagcgggtctgctcccaaggggcctgagcagtccttggcctgctaaggtcttggaacttgcctgcctttccatccatggccagcagcacctgccctacctgccccacttgtccttagcctggacctctgacagcagcatctctaccttctccccagctcccaggaccacaggctcaggcaggggcctccatgggccccaggggaacactggggacttggcctctctctagggtacatggtgctgggagaggcagcccaggaagtctcatctggggagcaggcagccagcatctgggccttggcctggagcacaaagaccctggctttcattttctctcaggtgaaaggaaattaaggcaacaaaagaagcccggctcctggtcacctaggaagcctcagattccttcccatggagggagggagtggtttgcaggtggccaagttcctctaacttggctcacactcgacatgaaaattcagaattttatactttccctaccctctagagaaataagatcttttttgtcagtttgtttgtatgaaactaaagcctttatttgttaatagttcctgctaaaacaatgaataaaaactcaaggagcaactaaaaaaaaaaaaaaaa

SEQ ID NO: 1178 - protein, 395 aa, Homo sapiens
MNGPVDGLCDHSLSEGVFMFTSESVGEGHPDKICDQISDAVLDAHLKQDPNAKVACETVCKTGMVLLCGEITSMAMVDYQRVVRDTIKHIGYDDSAKGFDFKTCNVLVALEQQSPDIAQCVHLDRNEEDVGAGDQGLMFGYATDETEECMPLTIILAHKLNARMADLRRSGLLPWLRPDSKTQVTVQYMQDNGAVIPVRIHTIVISVQHNEDITLEEMRRALKEQVIRAVVPAKYLDEDTVYHLQPSGRFVIGGPQGDAGVTGRKIIVDTYGGWGAHGGGAFSGKDYTKVDRSAAYAARWVAKSLVKAGLCRRVLVQVSYAIGVAEPLSISIFTYGTSQKTERELLDVVHKNFDLRPGVIVRDLDLKKPIYQKTACYGHFGRSEFPWEVPRKLVF

SEQ ID NO: 1179 - DNA, 790 bp, Homo sapiens
gctcctgggtggcgagcaggcgcgtgtgtagggacgaagtttcactcttgttgcccaggctggagtgcaatggcacaatctcagctcactgcaacctctgcctcccgggttcaagtgattctcctgcctcagccttccaagtagctgggattacaggagttagaaatggagtcaatatatcttcaaaagcaccttggggcctgtttaactcaaggtcttgcagaagtggcaagagttcgcccagtggatccgatagaatatttagcattgtggatttacaagtataaggaaaatgtgaccatggaacaactgagacaaaaggaaatggccaagctggagcgtgaaagagaattagctctgatggagcaggaaatgatggagaggctcaaagcagaggagctcttacttcagcagcaacagctggcattgcagctagagttggaaatgcaagaaaaggagaggcagagaatacaagaactacagagagctcaagaacaattaggcaaggagatgagaatgaatatggaaaatctagttaggaatgaagatattctacattcagaggaagcaacactagactcaggcaaaacactagctgaaatcagcgatcgttatggagcacctaacttgagcagagtggaagaacttgatgaaccaatgttttctgatattgcattaaacattgatcaagatttgtaggaccaaccaacctaagagcaataaatgtttttgtttgtttcaaatttcaaaaaaaaaaaaaaaaaaaaaaaaaagaaaaaaaaaaaaaaaa

SEQ ID NO: 1180 - protein, 177 aa, Homo sapiens
MESIYLQKHLGACLTQGLAEVARVRPVDPIEYLALWIYKYKENVTMEQLRQKEMAKLERERELALMEQEMMERLKAEELLLQQQQLALQLELEMQEKERQRIQELQRAQEQLGKEMRMNMENLVRNEDILHSEEATLDSGKTLAEISDRYGAPNLSRVEELDEPMFSDIALNIDQDL

SEQ ID NO: 1181 - DNA, 1842 bp, Homo sapiens
aaagcggaaggggcgcgcggatagagctcccagtgtgccaagcgtgggcggtatacagtaaacaaagacaacccctattcttatcaccttgcctactgagtgcaagtccaggaactgtgtaagcagaccctcagaggagctctgggaaacactgaaaaatagcctctccccccattggctgccaggatggaaactaactacctgaagaggtgctttggaaattgcctggcccaggcactggcagaggtggcgaaggttcggcccagtgacccaatagaatacctggctcactggctttatcattacaggaaaacagcaaaagcaaaagaagagaatagggaaaagaagatccacctgcaggaggaatatgacagtagcctcaaggaaatggaaatgacagaaatgctgaaacaggaagagtatcagattcaacagaactgtgaaaagtgtcacaaggaactgacttctgaaactgtttccacgaagaagaccatattcatgcaggaggacacaaacccccttgagaaggaggccttgaagcaggaattcctgccaggtacttccagtctgattccaggaatgcctcaacaggttcctccttcagagtctgctggccagattgaccagaacttcaaaatgccacaagaaataaattacaaggaggcttttcagcatgaagttgctcatgaaatgcctcctggctccaaatctcctttttaggttacagaaggtagatgcttctgatttacttctctcaaagctagaagccaagaaaatggccagctagaaccaagatttaaggggctgtaaaaggcaagttcagggactctccagcctactccttttctgaaaaacccttaatcatgtgaacatttgaactagttataggataaaataaactcagaataaggatttaaaataagtaaccaagtggctgtgactttttcctcttgttttatcaacgttttggagactacacaatgaaaacacatctgttggggtgatcagacccaacacccggccatgggggctacaaagtccagccgagtcaaaggaaagagaaaagacaagtcaagagagaaagtgggaccagggggccaatgctagtatggaggctgtgaagtccccaagctctggaagcccacactatttgttggtgatcaaacaaagaaacaggtgatgaggatgtgggagttgaaagaaagtggtgtatcaagcgaatgaactacagctgtgagggtttagcattttctttgaaacatatggctacttgagataatgggagtgctagaagcaaggagccagcaagtctggacacattacaaaggccacaaggggttttatcctggaccccggacatgttccaagccctgcctcaacttttctcccaacactaagctttcctcccaacacacatccatctcgtgtgttcatgtcttaacttttgcttcacttcacagtcaggcctctccgagtattttttacacatatcctggagtctacctatgtcactgatagcagatatttttcttcaacatatattatcaatgttttaatacttttcttcaattttagtaactggtaaaatacatgtaagatgtaccatcttaaccatttttaagtgtacagatcagttgtattaagtagattcatattcttgtgcaaccatcatcaccatccggctgcaaaactctttcatcttgcaaaactgaaactctacacccattaaaaaataactcgccatttctctctctccccagcccctggcaaccaccattctttctgtctctgtgatttagattactctgtaagtatgttgtataaatagactcatacaatgtt

SEQ ID NO: 1182 - protein, 177 aa, Homo sapiens
METNYLKRCFGNCLAQALAEVAKVRPSDPIEYLAHWLYHYRKTAKAKEENREKKIHLQEEYDSSLKEMEMTEMLKQEEYQIQQNCEKCHKELTSETVSTKKTIFMQEDTNPLEKEALKQEFLPGTSSLIPGMPQQVPPSESAGQIDQNFKMPQEINYKEAFQHEVAHEMPPGSKSPF

SEQ ID NO: 1183 - DNA, 1773 bp, Homo sapiens
gggtcacatggcggtggcgcggtagcgcgcgatgcagcacaggctagaggctgcgcaagcgcggggcccgcccctgggaccctccgggccgggcggtttggccccttagcgcccgggcgtcggggcggtaaaaggccggcagaagggaggcacttgagaaatgtctttcctccaggacccaagtttcttcaccatggggatgtggtccattggtgcaggagccctgggggctgctgccttggcattgctgcttgccaacacagacgtgtttctgtccaagccccagaaagcggccctggagtacctggaggatatagacctgaaaacactggagaaggaaccaaggactttcaaagcaaaggagctatgggaaaaaaatggagctgtgattatggccgtgcggaggccaggctgtttcctctgtcgagaggaagctgcggatctgtcctccctgaaaagcatgttggaccagctgggcgtccccctctatgcagtggtaaaggagcacatcaggactgaagtgaaggatttccagccttatttcaaaggagaaatcttcctggatgaaaagaaaaagttctatggtccacaaaggcggaagatgatgtttatgggatttatccgtctgggagtgtggtacaacttcttccgagcctggaacggaggcttctctggaaacctggaaggagaaggcttcatccttgggggagttttcgtggtgggatcaggaaagcagggcattcttcttgagcaccgagaaaaagaatttggagacaaagtaaacctactttctgttctggaagctgctaagatgatcaaaccacagactttggcctcagagaaaaaatgattgtgtgaaactgcccagctcagggataaccagggacattcacctgtgttcatgggatgtattgtttccactcgtgtccctaaggagtgagaaacccatttatactctactctcagtatggattattaatgtattttaatattctgtttaggcccactaaggcaaaatagccccaaaacaagactgacaaaaatctgaaaaactaatgaggattattaagctaaaacctgggaaataggaggcttaaaattgactgccaggctgggtgcagtggctcacacctgtaatcccagcactttgggaggccaaggtgagcaagtcacttgaggtcgggagttcgagaccagcctgagcaacatggcgaaaccccgtctctactaaaaatacaaaaatcacccgggtgtggtggcaggcacctgtagtcccagctacccgggaggctgaggcaggagaatcacttgaacctgggaggtggaggttgcggtgagctgagatcacaccactgtattccagcctgggtgactgagactctaactaaaaaaaaaaaaaaaaaaaaattgattgctgtgcctcattacaaatgcatatgatgtttgagtgctgttgtttgaaattatttttcttttcgggtcttcaaaaattcaagaaaagttgatgattgacttgaagattacaaaatttaaggttttttggcatgtgtgttttctattaataattggttatatgatgtcaaagtaatactttcataatagaattgacatgctctgggatagtttgacaaaggtaaattataaagtgaaatctcttgtttcattatcttccattctaacctcagagatctgtttctctagaaaaaatgtccatctctggctttaataaaattatgcatcagaaatcaaaaaaaaaaaaaaaaaaaaaaaaaa

SEQ ID NO: 1184 - protein, 229 aa, Homo sapiens
MSFLQDPSFFTMGMWSIGAGALGAAALALLLANTDVFLSKPQKAALEYLEDIDLKTLEKEPRTFKAKELWEKNGAVIMAVRRPGCFLCREEAADLSSLKSMLDQLGVPLYAVVKEHIRTEVKDFQPYFKGEIFLDEKKKFYGPQRRKMMFMGFIRLGVWYNFFRAWNGGFSGNLEGEGFILGGVFVVGSGKQGILLEHREKEFGDKVNLLSVLEAAKMIKPQTLASEKK

SEQ ID NO: 1185 - DNA, 2556 bp, Homo sapiens
aacttgctctaacttcctcggccgagccgggccgcgccgccgctgccgccgccgcgcgcggattctgcttctcagaagatgcactattatagatactctaacgccaaggtcagctgctggtacaagtacctccttttcagctacaacatcatcttctggttggctggagttgtcttccttggagtcgggctgtgggcatggagcgaaaagggtgtgctgtccgacctcaccaaagtgacccggatgcatggaatcgaccctgtggtgctggtcctgatggtgggcgtggtgatgttcaccctggggttcgccggctgcgtgggggctctgcgggagaatatctgcttgctcaactttttctgtggcaccatcgtgctcatcttcttcctggagctggctgtggccgtgctggccttcctgttccaggactgggtgagggaccggttccgggagttcttcgagagcaacatcaagtcctaccgggacgatatcgatctgcaaaacgtcatcgactcccttcagaaagctaaccagtgctgtggcgcatatggccctgaagactgggacctcaacgtctacttcaattgcagcggtgccagctacagccgagagaagtgcggggtccccttctcctgctgcgtgccagatcctgcgcaaaaagttgtgaacacacagtgtggatatgatgtcaggattcagctgaagagcaagtgggatgagtccatcttcacgaaaggctgcatccaggcgctggaaagctggctcccgcggaacatttacattgtggctggcgtcttcatcgccatctcgctgttgcagatatttggcatcttcctggcaaggacgctgatctcagacatcgaggcagtgaaggccggccgtcacttctgaggagcagagttgagggagccgagctgagccacgctgggaggccagagcctttctctgccatcagccctacgtccagagggagaggagccgacacccccagagccagtgccccatcttaagcatcagcgtgacgtgacctctctgtttctgcttgctggtgctgaagaccaagggtcccccttgttacctgcccaaacttgtgactgcatccctctggagtctacccagagacagagaatgtgtctttatgtgggagtggtgactctgaaagacagagagggctcctgtggctgccaggagggcttgactcagaccccctgcagctcaagcatgtctgcaggacaccctggtcccctctccactggcatccagacatctgctttgggtcatccacatctgtgggtgggccgtgggtagagggacccacaggcgtggaccgggcatctccctccatcaagcaaagcagcatgggggcctgcccgtaacgggaggcggacgtggccccgctgggcctctgagtgccagcgcagtctgctgggacatgcacatatcaggggttgtttgcaggatcctcagccatgttcaagtgaagtaagcctgagccagtgcgtggactggtgccacgggagtgccttgtccactgtccccctgtgtccaccagctattctcctggcgccggaactgcctctggtcttgatagcattaagccctgatggcgccggtggcgcggtgggcatggttcttcactgagagccggctctccttttcttaaagtgtgtaaatagtttatttataggggtaagaatgttctcacaccatttcacttcctcttcctctcctccagcattctcctctgagcagccttagatagtgtccatggctggagccgaccctttgagtccccttgagtgtcttaagaaccagcccacaacagcctctctttctcctccacatactgcagcctccctccatgcatcccacatacaagcactcccccactccccagcgtggcctcactgtcttctggtcttggtgctactgaaattgtcacccagaatttgaatcctgaccctccccactgcaagcccagggagccccagcccaagatggccagcctgaaactgttggccagggctcctcttgtggccatgtacccagggctggctggcctgccatttgcctctccccggagacagccgttcttctgcaaccacaccccgtgcctagccacaaccccaggctgcagctgctcagaagctccaggcattttgtttctggtgaccgcccctaatgggatatcggtgatcactggtccacccttcctgtcagggcttttctggggctgctcttggaaatgaagtcttaagtactgaataactcccctggggatagctggggcatttgtctagctgggctaccttctaacactttgccatagctcagaccacttctcatcgttcagggatggactgcaaccttaatttacttgccggagtgtacattctagtgtggtgtatactggtggctgttgatgacgattttttttttttttttacacaattctctgtagactaggagaagaatgcttgtgtttttcggaagtgtgatgcttctctttgactgccaaactcttttatggaatatatctttatattaaaaaaaaaa

SEQ ID NO: 1186 - protein, 270 aa, Homo sapiens
MHYYRYSNAKVSCWYKYLLFSYNIIFWLAGVVFLGVGLWAWSEKGVLSDLTKVTRMHGIDPVVLVLMVGVVMFTLGFAGCVGALRENICLLNFFCGTIVLIFFLELAVAVLAFLFQDWVRDRFREFFESNIKSYRDDIDLQNVIDSLQKANQCCGAYGPEDWDLNVYFNCSGASYSREKCGVPFSCCVPDPAQKVVNTQCGYDVRIQLKSKWDESIFTKGCIQALESWLPRNIYIVAGVFIAISLLQIFGIFLARTLISDIEAVKAGRHF

SEQ ID NO: 1187 - DNA, 5849 bp, Homo sapiens
ggggggcggcccgggactgcaccgggaccagcgcctccccgcttcgcgctgccctcggcctcgccccgggcccgggtggatgagccgcgcgcccgggggacatggaagcgctgacgctgtggcttctcccctggatatgccagtgcgtgtcggtgcgggccgactccatcatccacatcggtgccatcttcgaggagaacgcggccaaggacgacagggtgttccagttggcggtatccgacctgagcctcaacgatgacatcctgcagagcgagaagatcacctactccatcaaggtcatcgaggccaacaacccattccaggctgtgcaggaagcctgtgacctcatgacccaggggattttggccttggtcacgtccactggctgtgcatctgccaatgccctgcagtccctcacggatgccatgcacatcccacacctctttgtccagcgcaacccgggagggtcgccacgcaccgcatgccacctgaaccccagccccgatggtgaggcctacacactggcttcgagaccacccgtccgcctcaatgatgtcatgctcaggctggtgacggagctgcgctggcagaagttcgtcatgttctacgacagcgagtatgatatccgtgggcttcaaagctttctggaccaggcctcgcggctgggccttgacgtctctttacaaaaggtggacaagaacattagccacgtattcaccagcctcttcaccacgatgaagacagaggagctgaatcgctaccgggacacgcttcgccgcgccatcctgctgctcagcccacagggagcccactccttcatcaacgaggccgtggagaccaacctggcttccaaggacagccactgggtctttgtgaatgaggaaatcagtgacccggagatcctggatctggtccatagtgcccttggaaggatgaccgtggtccggcaaatctttccgtctgcaaaggacaatcagaaatgcacgaggaacaaccaccgcatctcctccctgctctgcgacccccaggaaggctacctccagatgctgcagatctccaacctctatctgtatgacagtgttctgatgctggccaacgcctttcacaggaagctggaggaccggaagtggcatagcatggcgagcctcaactgcatacggaaatccactaagccatggaatggtgggaggtccatgctggataccatcaaaaagggccacatcactggcctcactggggtgatggagtttcgggaggacagttcgaatccctatgtccagtttgaaatccttggcactacctatagtgagacttttggcaaagacatgcgcaagttggcgacatgggactcagagaagggcttgaatggcagcttgcaagagaggcccatgggcagccgcctccaaggattgactcttaaagtggtgactgtcttggaagagcctttcgtgatggtggctgagaacatcctaggacagcccaagcgctacaaagggttctccatagatgtcctggatgcactggccaaggctctgggctttaaatatgagatttaccaagcccctgatggcaggtacggtcaccagctccataacacctcctggaacgggatgatcggggagctcatcagcaagagagcagacttggccatctctgccatcaccatcaccccagagagggagagcgttgtggacttcagcaagcggtacatggactattcagtggggattctaattaagaagcccgaggagaaaatcagcatcttctccctctttgctccatttgatttcgctgtgtgggcctgcattgcagcagccatccctgtggttggtgtgctgatatttgtgttgaacaggatacaggctgtgagggctcagagtgctgcccagcccaggccgtcagcttctgccactctgcacagcgccatctggattgtctatggagccttcgtacagcaaggtggcgaatcttccgtgaactccatggccatgcgcatcgtgatgggcagctggtggctcttcacgctcattgtgtgctcctcctacacagccaaccttgctgccttcctcacagtgtccaggatggacaaccccataaggactttccaggacctgtccaaacaagtggaaatgtcttatggcactgtccgggattctgctgtatatgagtacttccgagccaagggcaccaaccccctggagcaggacagcacgtttgctgaactctggcggaccatcagcaagaacggaggggctgacaactgcgtgtccagtccttcagaaggcatcaggaaggcaaagaaggggaactacgccttcctgtgggatgtggccgtggtggaatacgcagccctgacggatgacgactgctcggtgactgtcatcggcaacagcatcagcagcaagggttacgggattgccctgcagcatggcagcccctacagggacctcttctcccagaggatcctggagctgcaggacacaggggacctggatgtgctgaagcagaagtggtggccgcacatgggccgctgtgacctcaccagccatgccagcgcccaggccgacggcaaatccctcaagctgcacagcttcgccggggtcttctgcatcctggccattggcctgctcctggcctgcctggtggctgccctggagttgtggtggaacagcaaccggtgccaccaggagacccccaaggaggacaaagaagtgaacttggagcaggtccaccggcgcatgaacagcctcatggatgaagacattgctcacaagcagatttccccagcgtcgattgagctctcggccctggagatggggggcctggctcccacccagaccttggagccgacacgggagtaccagaacacccagctctcggtcagcacctttctgccagagcagagcagccatggcaccagccggacactctcatcagggcccagcagcaacctgccgctgccgctgagcagctcggcgaccatgccctccatgcagtgcaaacacaggtcacccaacggggggctgttccggcagagcccggtgaagacccccatccccatgtccttccagcccgtgcctggaggcgtccttccagaggctctggacacctcccacgggacctccatctgactgcgccgcctgccctcctgcccaccctcccacccacccgaccagcagagctttttaatacaagaaaacaacaacacaaaccacacacactcgcacacacacacatacacagagactctttcatttttcttgtacatatgtgtaaataatgacagaatggagtggggtaaaagtgtattttgaatattcccaattttcgaagtcagtaaaaaaacacaaaaactgtatgaatgactttgtaaattttgttctatatgaataaaaaggcaaattacttgtgatcattctgaagtgccaaaggagcccccccattcctgggcctttctgagggcaggaggggcgaccagataaggagcccctctctgctgggggagaagggaagacgaggaaccccacatgccactcgctgccttgtcccacagcttgctgccccatttctttgctcctggcacctcgtcccttttagtccctcagcttgataaagagtgagtttggagcccgcattgggctggcccactgggttgctgtgctgtagggtgatcggctgttctgggtagcctggggctgaggaggtgccctggactcagggctatcctgtcctgtcttggatcttgcgggacgagttagtcaccgctgtgtgtgttgcagtgtgcctctgccccatgggcccgagagaagctgacaattacccatagtgaggtaattgagggctttgatactgagctgttctcatatcatactgttggccttgtttttcattttcttttcaaaattagaagaatcaaaaagtgatagaatattgggggaaggagggcagactccatcgtttcctcagggagactgggcggaggtggggttggtctggaagaaggtccatgggggcagggagttgcgaggtggggttagttgcatggaccaggtgaggtggtggaacaaaaggccaggtagaggaagaatattcccttgggtttggacccatggtcccaggtgagagaaggaagtgaggccatagatgcagggagtagaagctttgtggtgtcaggcaaacggactctgttagtaagagttgggggaggtgcccaggtgggtggaccagtactccaggtgatggggcatgctgagaaatagagaaaagagaccatgtttatttgggtaggaggaagccttgccttgcgccttaggtgagaagcataagtgtaactcccatccaccagggaagttgcttgtagccccaaaagtaaaggcctatctctgggtcataaatcctgcaggcagtccaacaaacagggctggctccagcacaaactctcccttccacctttacgaccctctccagaccagacctggagtcctcttcaagcagcaatccaacccagagcaggggccctccccactcaggcatctgataacctctgagatttccaggcctatccctgtgcaggtacagctgcagggaagcccagttttctaagcctaggaccacctaacagcgccccctccttcagttgccctttctgaggcaactaaactacagaatcagggaaagaaccattaggagtggaactgggggaatctgagttgtgtcacttcagttcctctcctaaagacaaaggttagtctgatctccagacccgtcagaatggaatacacagcccacatctgtcactgaaggaggtggagctcccacagccagcagtaatcagggagctgagagcctggttctgtgatcatggagaaatacaaagtcctattgattgcttcttctatagccttgtagagtttctagagagatgtatttatgagggtgataactagcccaggattgatttctttcctaaagtccctagtgacatgattgagcagtaaagaacggccaaatcacacagtcagctaaaagcactgtggggaagagagtgtttataattatgttatttattgctggatgctgagaatggtctgatattcgtgctacctaggcaatccattgacatttctccaatcagagcatgtggaccttggagccaggcatgctcagagaagcctaggtgggctaccatgaccccgaggaagagcaggctttgttttccatcagcacgttgggggccctgccctgaatggtcaatttttcacatatatatctctctatttttttaatcaaactctggtctcactgccttatctcacaccaactctgtttcctcattgccccctgagatggcctgtcttctggggtatagcttggatgtcttcttggatggttctgcttagaatgagtgtcaaggaggaaagagagggagatggaggatgtgtttgtgcgcctgtgtgtgtgtgtttgtgtgtgtgtgtgtgtgtgagagagagagagagagagagagagaccagcatcttcaagagaagtattctgcttatacaaaatccttaacacctcatggtgttattcttcaccatgtttatatatatatatatatatttttttttttttttagaattttctacccttggcatgaggggaaatgattgatattcaagcaagttctctaggaaaaaaaaaaacttcccaactcagatttctgtgtcagctcagaatgtatctttttttcatgctttgctctttggatttataactctgtttagactattccatacattttaggtatattttgtgccttcagacactgcaaataataatcagcatttggattaaagttgtttaataat

SEQ ID NO: 1188 - protein, 1009 aa, Homo sapiens
MEALTLWLLPWICQCVSVRADSIIHIGAIFEENAAKDDRVFQLAVSDLSLNDDILQSEKITYSIKVIEANNPFQAVQEACDLMTQGILALVTSTGCASANALQSLTDAMHIPHLFVQRNPGGSPRTACHLNPSPDGEAYTLASRPPVRLNDVMLRLVTELRWQKFVMFYDSEYDIRGLQSFLDQASRLGLDVSLQKVDKNISHVFTSLFTTMKTEELNRYRDTLRRAILLLSPQGAHSFINEAVETNLASKDSHWVFVNEEISDPEILDLVHSALGRMTVVRQIFPSAKDNQKCTRNNHRISSLLCDPQEGYLQMLQISNLYLYDSVLMLANAFHRKLEDRKWHSMASLNCIRKSTKPWNGGRSMLDTIKKGHITGLTGVMEFREDSSNPYVQFEILGTTYSETFGKDMRKLATWDSEKGLNGSLQERPMGSRLQGLTLKVVTVLEEPFVMVAENILGQPKRYKGFSIDVLDALAKALGFKYEIYQAPDGRYGHQLHNTSWNGMIGELISKRADLAISAITITPERESVVDFSKRYMDYSVGILIKKPEEKISIFSLFAPFDFAVWACIAAAIPVVGVLIFVLNRIQAVRAQSAAQPRPSASATLHSAIWIVYGAFVQQGGESSVNSMAMRIVMGSWWLFTLIVCSSYTANLAAFLTVSRMDNPIRTFQDLSKQVEMSYGTVRDSAVYEYFRAKGTNPLEQDSTFAELWRTISKNGGADNCVSSPSEGIRKAKKGNYAFLWDVAVVEYAALTDDDCSVTVIGNSISSKGYGIALQHGSPYRDLFSQRILELQDTGDLDVLKQKWWPHMGRCDLTSHASAQADGKSLKLHSFAGVFCILAIGLLLACLVAALELWWNSNRCHQETPKEDKEVNLEQVHRRMNSLMDEDIAHKQISPASIELSALEMGGLAPTQTLEPTREYQNTQLSVSTFLPEQSSHGTSRTLSSGPSSNLPLPLSSSATMPSMQCKHRSPNGGLFRQSPVKTPIPMSFQPVPGGVLPEALDTSHGTSI

SEQ ID NO: 1189 - DNA, 2831 bp, Homo sapiens
tgcccgacccggaagtgcttctcttttccttggcggaggagggagaccacagagccctgggttgtggaagaggtggctgttccctgtcatcagtatgcagcgattgctctttccgccgttgagggccttgaaggggaggcagtatctgccgctcctggctcctagggcagcgcctagagcacagtgtgattgcatcaggcgccctttgaggccagggcaatacagcaccatctctgaagtagctttgcaatctggaaggggtacagtgtcccttccctcaaaggctgctgagcgggtggtgggccgatggctcctggtctgcagtggaacagtggctggagcagttattcttggtggagtaactaggttgacagagtctggcctctcgatggtagattggcatttaataaaggagatgaagccacctacaagccaagaggaatgggaagcagaattccaaagataccagcaatttccagaatttaaaatcttgaatcatgatatgacactgacagaattcaagttcatctggtacatggagtactcacaccgaatgtggggtcgccttgtaggccttgtgtacatcctgcctgctgcctacttttggagaaagggctggctcagccgtggcatgaaaggacgtgttcttgccctctgtggcctcgtctgcttccagggtctgttgggatggtatatggtgaaaagtggactagaagaaaaatcagactcccatgacatccctcgggtcagtcagtaccgccttgctgcccacctgggatcagccctggttctttattgtgccagcttgtggacctcactgtcactgctactccctccgcacaagttgcctgaaacccaccaactcctacagttgagacgatttgctcatggaacagcaggtctggtgttccttacggccctctcaggggcttttgtggcagggctagatgctgggcttgtttataactcctttcccaaaatgggagaatcctggatcccggaggacctctttaccttctcccccatcctgaggaatgtttttgagaatcccaccatggtgcagtttgatcaccggattctgggaatcacttcagtcactgccattacagtgctctacttcctctctcggagaattccccttcctagaaggaccaagatggcagcagtgactctgctggctttggcgtatacacagggccctgtcttattcaactttacttttaaaatcagtgatttggatgaaggcatcagaaacatctgatttgaggatggagcaacccaatattgctaatataatagatgacagtggcaactgaaaacagtcccagaatgaccccatcgagatgaaattaaacagattagaaatgtaacatactcatttaaattaaataagttgtataagtttgggctgaagaaacctggccttatatcatttcatataaaaaagacgggattttagttgtcctcaggttcaatatgaaccaagtagtattcatgttgttattatatgataacagaaaaattagtggtacttcaggttttatcagtagaagtgtcacagccatagtcaaaatacccctaacatactgcatttcactctgggtaccaaatttaagcaagatattgatggccactaagtgtgtatccagaagaagagatcagaatgatgagtccagaacccctgtcacacagggaataggtgaaggaactagggatatttaactggagcagagaacatctggagagagagcaagattcctgtccttgagaagttgaagccgtctcatgcagaagagggaatgagcttccattatgctgcagagctggcagcaatggatgaaagttgcaggaagttagttttagttctgtagaaggcaagagtagggtagaccaaatcaaatgctcactggggtcaggctgatggagacagtaacactggcgagcaggtgccccagctcggactatactgctgagttctggtctgttgctgccactctacaggtccagggttgttagatcttctgggtttttgttttgctttttgaaataaggaaaataagcttatcttaagtttatttttccttggatatacctagattccatacagtgacaatacaaatacaaaggaagaacatctggatttcatccttgacctcatttacaaagcaaaaagagatgctggattcagatataaatgtttaattttgcagtgtttaagtcagcaaatcttctgttttttaaaaataagccacatatctagatttttctgtgaaagctctcaattaagtgttgggaactaatttcaagattttaaaaaatgttatgcaggcttaacgtgtctgagagccataaatgacctaacgtttcccgttagtctctgaactaggtgatctcagttctctttcaactccagtactctgtaagtttctgtgacctgtagtgtaccattctcaggtggtgatatggtttggatgttttgtcccctccaaatctcatgttcaaagtgtgacattcagtgttagaggtgggcctagtaggaggtatttgggtcatgggggcggatcccttatgtatgactttgtgccatccccatagtaatgagtgagttctcactctggttgtttatgcaagagctggttgtttaaaagagcctggaacttcctcctctctcgcttgctctctctcaccatgtgacacactggctccccttcaccttctgccatgattgtaagcttcgtgaggccctcaccagaagcagatgccagcgccatgcttcctatacagttctatgcagaacagtgagccaaataaacctcttttctttctaaaaa

SEQ ID NO: 1190 - protein, 388 aa, Homo sapiens
MQRLLFPPLRALKGRQYLPLLAPRAAPRAQCDCIRRPLRPGQYSTISEVALQSGRGTVSLPSKAAERVVGRWLLVCSGTVAGAVILGGVTRLTESGLSMVDWHLIKEMKPPTSQEEWEAEFQRYQQFPEFKILNHDMTLTEFKFIWYMEYSHRMWGRLVGLVYILPAAYFWRKGWLSRGMKGRVLALCGLVCFQGLLGWYMVKSGLEEKSDSHDIPRVSQYRLAAHLGSALVLYCASLWTSLSLLLPPHKLPETHQLLQLRRFAHGTAGLVFLTALSGAFVAGLDAGLVYNSFPKMGESWIPEDLFTFSPILRNVFENPTMVQFDHRILGITSVTAITVLYFLSRRIPLPRRTKMAAVTLLALAYTQGPVLFNFTFKISDLDEGIRNI

SEQ ID NO: 1191 - DNA, 4070 bp, Homo sapiens
tgcccgacccggaagtgcttctcttttccttggcggaggagggagaccacagagccctgggttgtggaagaggtggctgttccctgtcatcagtatgcagcgattgctctttccgccgttgagggccttgaaggggaggcagtatctgccgctcctggctcctagggcagcgcctagagcacagtgtgattgcatcaggcgccctttgaggccagggcaatacagcaccatctctgaagtagctttgcaatctggaaggggtacagtgtcccttccctcaaaggctgctgagcgggtggtgggccgatggctcctggtctgcagtggaacagtggctggagcagttattcttggtggagtaactaggttgacagagtctggcctctcgatggtagattggcatttaataaaggagatgaagccacctacaagccaagaggaatgggaagcagaattccaaagataccagcaatttccagaatttaaaatcttgaatcatgatatgacactgacagaattcaagttcatctggtacatggagtactcacaccgaatgtggggtcgccttgtaggccttgtgtacatcctgcctgctgcctacttttggagaaagggctggctcagccgtggcatgaaaggacgtgttcttgccctctgtggcctcgtctgcttccagggtctgttgggatggtatatggtgaaaagtggactagaagaaaaatcagactcccatgacatccctcgggtcagtcagtaccgccttgctgcccacctgggatcagccctggttctttattgtgccagcttgtggacctcactgtcactgctactccctccgcacaagttgcctgaaacccaccaactcctacagttgagacgatttgctcatggaacagcaggtctggtgttccttacggccctctcaggggcttttgtggcagggctagatgctgggcttgtttataactcctttcccaaaatgggagaatcctggatcccggaggacctctttaccttctcccccatcctgaggaatgtttttgagaatcccaccatggtgcagtttgatcaccggattctgggaatcacttcagtcactgccattacagtgctctacttcctctctcggagaattccccttcctagaaggaccaagatggcagcagtgactctgctggctttggcgtatacacaggtgggcttgggcatcagcacgctgctgatgtatgtcccaactcctctggccgccactcaccagtcaggctccttggctttgctcactggtgctctttggctgatgaatgaactccgaagagtcccaaaatgattcttagaggaccagcctcctgggactgtgactgcttttgagagctcttcagagatcataagaacttgggcttttctacgagatgaccttgacataccaagtggtttccaaatggtcaacttacttaaaaatcttttcctgttttgagatagtcactggatcaagaatgcattaagtgtggttaccctaaatgttcccttttaaatctgcttttcatgttgaaaatcagttttaatgtagagaaagaaatgtctgccatttgctgcttaacaggctttgtgtcaggtttttcagtgttggcaagctcttggttctacgtggatgatttctacgtggatgttctcctgagtccttaattctgcctaaatagaatttctttatgatcttaacttcacttccattaggtgaagattgaaaggataggattgacatacccaaagtagccagctggtcttcagcaaaaaaaaaaaagctaatgtcttctaatatcctgattttcagaaatggggaaattgcagattttgacaagcttaatgtgtatatgtagcaaaatggtttttaagtacttggaaaaggaggtaatcgccaaatagttccatttttttttttttttttgagacagagtttcactcttgttgcccaggctggagtacaatggcgtgatctcagctcactctgcaacctccacttcccaggttcaagcgattctcatgcctcagcctcccgagtagctgggactacaggcacaagtcaccatgcctggctaattttgtatttttagtagagaaggggtttcaccacattggccgggctggtcttgaactcctgacctcaggtaatccgcccatctcggcttcccaaagtgctgagattacaggcatgggccaccacgcccagctagttcctcttttgataaggctgttaacattacaaggtcagagagaggaatggaatcgacagtataaattggttcctgagagggtttcctaacagctttgtaataagaaaaatatggccttgatggtgtagtgcatggacatctacccagataaacaaattgttgactgctgaattaatgtgattttggtctctattgatatttcatagggccctgtcttattcaactttacttttaaaatcagtgatttggatgaaggcatcagaaacatctgatttgaggatggagcaacccaatattgctaatataatagatgacagtggcaactgaaaacagtcccagaatgaccccatcgagatgaaattaaacagattagaaatgtaacatactcatttaaattaaataagttgtataagtttgggctgaagaaacctggccttatatcatttcatataaaaaagacgggattttagttgtcctcaggttcaatatgaaccaagtagtattcatgttgttattatatgataacagaaaaattagtggtacttcaggttttatcagtagaagtgtcacagccatagtcaaaatacccctaacatactgcatttcactctgggtaccaaatttaagcaagatattgatggccactaagtgtgtatccagaagaagagatcagaatgatgagtccagaacccctgtcacacagggaataggtgaaggaactagggatatttaactggagcagagaacatctggagagagagcaagattcctgtccttgagaagttgaagccgtctcatgcagaagagggaatgagcttccattatgctgcagagctggcagcaatggatgaaagttgcaggaagttagttttagttctgtagaaggcaagagtagggtagaccaaatcaaatgctcactggggtcaggctgatggagacagtaacactggcgagcaggtgccccagctcggactatactgctgagttctggtctgttgctgccactctacaggtccagggttgttagatcttctgggtttttgttttgctttttgaaataaggaaaataagcttatcttaagtttatttttccttggatatacctagattccatacagtgacaatacaaatacaaaggaagaacatctggatttcatccttgacctcatttacaaagcaaaaagagatgctggattcagatataaatgtttaattttgcagtgtttaagtcagcaaatcttctgttttttaaaaataagccacatatctagatttttctgtgaaagctctcaattaagtgttgggaactaatttcaagattttaaaaaatgttatgcaggcttaacgtgtctgagagccataaatgacctaacgtttcccgttagtctctgaactaggtgatctcagttctctttcaactccagtactctgtaagtttctgtgacctgtagtgtaccattctcaggtggtgatatggtttggatgttttgtcccctccaaatctcatgttcaaagtgtgacattcagtgttagaggtgggcctagtaggaggtatttgggtcatgggggcggatcccttatgtatgactttgtgccatccccatagtaatgagtgagttctcactctggttgtttatgcaagagctggttgtttaaaagagcctggaacttcctcctctctcgcttgctctctctcaccatgtgacacactggctccccttcaccttctgccatgattgtaagcttcgtgaggccctcaccagaagcagatgccagcgccatgcttcctatacagttctatgcagaacagtgagccaaataaacctcttttctttctaaaaa

SEQ ID NO: 1192 - protein, 410 aa, Homo sapiens
MQRLLFPPLRALKGRQYLPLLAPRAAPRAQCDCIRRPLRPGQYSTISEVALQSGRGTVSLPSKAAERVVGRWLLVCSGTVAGAVILGGVTRLTESGLSMVDWHLIKEMKPPTSQEEWEAEFQRYQQFPEFKILNHDMTLTEFKFIWYMEYSHRMWGRLVGLVYILPAAYFWRKGWLSRGMKGRVLALCGLVCFQGLLGWYMVKSGLEEKSDSHDIPRVSQYRLAAHLGSALVLYCASLWTSLSLLLPPHKLPETHQLLQLRRFAHGTAGLVFLTALSGAFVAGLDAGLVYNSFPKMGESWIPEDLFTFSPILRNVFENPTMVQFDHRILGITSVTAITVLYFLSRRIPLPRRTKMAAVTLLALAYTQVGLGISTLLMYVPTPLAATHQSGSLALLTGALWLMNELRRVPK

SEQ ID NO: 1193 - DNA, 1378 bp, Homo sapiens
ctccgctttcgcgggggctgctggggcgtaggtgtcggggacgcgcgcacgggcgcgcgcagctgttgacgcgcttcttagctggtgcgcgccggagcccaaattccaagtggaaactgcaggcgcacgagggaggaacgcgtggagcatgaaaaggcagggggcctcctctgagcgaaaacgagcgcggataccgtccgggaaggccggagcagcaaatggatttctcatggaagtttgtgttgattcagtggaatcagctgtgaatgcagaaagaggaggtgctgatcggattgaattatgttctggtttatcagaggggggaactacacccagcatgggtgtccttcaagtagtgaagcagagtgttcagatcccagtttttgtgatgattcggccacggggaggtgattttttgtattcagatcgtgaaattgaggtgatgaaggctgacattcgtcttgccaagctttatggtgctgatggtttggtttttggggcattgactgaagatggacacattgacaaagagctgtgtatgtcccttatggctatttgccgccctctgccagtcactttccaccgagcctttgacatggttcatgatccaatggcagctctggagaccctcttaaccttgggatttgaacgcgtgttgaccagtggatgtgacagttcagcattagaagggctacccctaataaagcgactcattgagcaggcaaaaggcaggattgtggtaatgccaggaggtggtataacagacagaaatctacaaaggatccttgagggttcaggtgctacagaattccactgttctgctcggtctactagagactcgggaatgaagtttcgaaattcatctgttgccatgggagcctcactttcttgctcagaatattccctaaaggtaacagatgtgaccaaagtaaggactttgaatgctatcgcaaagaacatcctggtgtagccagacctctctgagagacatggatatcacaggatgaaggtagaactataatctgcaattctctatgacacagctttaaccttcttctctggccaggacagtcgcaatctttgttttaagtttcacatggccatggagaatgtgcccaagaagaaaaagaatttgaaacagagatacagtcacttcctttgcttagtcttaccagtgattgtcatcatggttaaagctggtctgtgcttcttccatagacagaagcttagtctgttttcagtggaattaattgatgaactgggaaaattttaactgcatggtatgaattcagagtgtgacttaagggtcaattcaaagcagtattttgacttttcatttgtaaaataaaaatttccactattacagtaaaaaaaaaaa

SEQ ID NO: 1194 - protein, 273 aa, Homo sapiens
MKRQGASSERKRARIPSGKAGAANGFLMEVCVDSVESAVNAERGGADRIELCSGLSEGGTTPSMGVLQVVKQSVQIPVFVMIRPRGGDFLYSDREIEVMKADIRLAKLYGADGLVFGALTEDGHIDKELCMSLMAICRPLPVTFHRAFDMVHDPMAALETLLTLGFERVLTSGCDSSALEGLPLIKRLIEQAKGRIVVMPGGGITDRNLQRILEGSGATEFHCSARSTRDSGMKFRNSSVAMGASLSCSEYSLKVTDVTKVRTLNAIAKNILV

SEQ ID NO: 1195 - DNA, 4930 bp, Homo sapiens
gataattcctgttccactttctttgatgaaacaagtaaagaagaaacaacacaatcatattaatagaagagtcttcgttccagacgcagtccaggaatcatgctggagaagttctgcaactctactttttggaattcctcattcctggacagtccggaggcagacctgccactttgttttgagcaaactgttctggtgtggattcccttgggcttcctatggctcctggccccctggcagcttctccacgtgtataaatccaggaccaagagatcctctaccaccaaactctatcttgctaagcaggtattcgttggttttcttcttattctagcagccatagagctggcccttgtactcacagaagactctggacaagccacagtccctgctgttcgatataccaatccaagcctctacctaggcacatggctcctggttttgctgatccaatacagcagacaatggtgtgtacagaaaaactcctggttcctgtccctattctggattctctcgatactctgtggcactttccaatttcagactctgatccggacactcttacagggtgacaattctaatctagcctactcctgcctgttcttcatctcctacggattccagatcctgatcctgatcttttcagcattttcagaaaataatgagtcatcaaataatccatcatccatagcttcattcctgagtagcattacctacagctggtatgacagcatcattctgaaaggctacaagcgtcctctgacactcgaggatgtctgggaagttgatgaagagatgaaaaccaagacattagtgagcaagtttgaaacgcacatgaagagagagctgcagaaagccaggcgggcactccagagacggcaggagaagagctcccagcagaactctggagccaggctgcctggcttgaacaagaatcagagtcaaagccaagatgcccttgtcctggaagatgttgaaaagaaaaaaaagaagtctgggaccaaaaaagatgttccaaaatcctggttgatgaaggctctgttcaaaactttctacatggtgctcctgaaatcattcctactgaagctagtgaatgacatcttcacgtttgtgagtcctcagctgctgaaattgctgatctcctttgcaagtgaccgtgacacatatttgtggattggatatctctgtgcaatcctcttattcactgcggctctcattcagtctttctgccttcagtgttatttccaactgtgcttcaagctgggtgtaaaagtacggacagctatcatggcttctgtatataagaaggcattgaccctatccaacttggccaggaaggagtacaccgttggagaaacagtgaacctgatgtctgtggatgcccagaagctcatggatgtgaccaacttcatgcacatgctgtggtcaagtgttctacagattgtcttatctatcttcttcctatggagagagttgggaccctcagtcttagcaggtgttggggtgatggtgcttgtaatcccaattaatgcgatactgtccaccaagagtaagaccattcaggtcaaaaatatgaagaataaagacaaacgtttaaagatcatgaatgagattcttagtggaatcaagatcctgaaatattttgcctgggaaccttcattcagagaccaagtacaaaacctccggaagaaagagctcaagaacctgctggcctttagtcaactacagtgtgtagtaatattcgtcttccagttaactccagtcctggtatctgtggtcacattttctgtttatgtcctggtggatagcaacaatattttggatgcacaaaaggccttcacctccattaccctcttcaatatcctgcgctttcccctgagcatgcttcccatgatgatctcctccatgctccaggccagtgtttccacagagcggctagagaagtacttgggaggggatgacttggacacatctgccattcgacatgactgcaattttgacaaagccatgcagttttctgaggcctcctttacctgggaacatgattcggaagccacagtccgagatgtgaacctggacattatggcaggccaacttgtggctgtgataggccctgtcggctctgggaaatcctccttgatatcagccatgctgggagaaatggaaaatgtccacgggcacatcaccatcaagggcaccactgcctatgtcccacagcagtcctggattcagaatggcaccataaaggacaacatcctttttggaacagagtttaatgaaaagaggtaccagcaagtactggaggcctgtgctctcctcccagacttggaaatgctgcctggaggagatttggctgagattggagagaagggtataaatcttagtgggggtcagaagcagcggatcagcctggccagagctacctaccaaaatttagacatctatcttctagatgaccccctgtctgcagtggatgctcatgtaggaaaacatatttttaataaggtcttgggccccaatggcctgttgaaaggcaagactcgactcttggttacacatagcatgcactttcttcctcaagtggatgagattgtagttctggggaatggaacaattgtagagaaaggatcctacagtgctctcctggccaaaaaaggagagtttgctaagaatctgaagacatttctaagacatacaggccctgaagaggaagccacagtccatgatggcagtgaagaagaagacgatgactatgggctgatatccagtgtggaagagatccccgaagatgcagcctccataaccatgagaagagagaacagctttcgtcgaacacttagccgcagttctaggtccaatggcaggcatctgaagtccctgagaaactccttgaaaactcggaatgtgaatagcctgaaggaagacgaagaactagtgaaaggacaaaaactaattaagaaggaattcatagaaactggaaaggtgaagttctccatctacctggagtacctacaagcaataggattgttttcgatattcttcatcatccttgcgtttgtgatgaattctgtggcttttattggatccaacctctggctcagtgcttggaccagtgactctaaaatcttcaatagcaccgactatccagcatctcagagggacatgagagttggagtctacggagctctgggattagcccaaggtatatttgtgttcatagcacatttctggagtgcctttggtttcgtccatgcatcaaatatcttgcacaagcaactgctgaacaatatccttcgagcacctatgagattttttgacacaacacccacaggccggattgtgaacaggtttgccggcgatatttccacagtggatgacaccctgcctcagtccttgcgcagctggattacatgcttcctggggataatcagcacccttgtcatgatctgcatggccactcctgtcttcaccatcatcgtcattcctcttggcattatttatgtatctgttcagatgttttatgtgtctacctcccgccagctgaggcgtctggactctgtcaccaggtccccaatctactctcacttcagcgagaccgtatcaggtttgccagttatccgtgcctttgagcaccagcagcgatttctgaaacacaatgaggtgaggattgacaccaaccagaaatgtgtcttttcctggatcacctccaacaggtggcttgcaattcgcctggagctggttgggaacctgactgtcttcttttcagccttgatgatggttatttatagagataccctaagtggggacactgttggctttgttctgtccaatgcactcaatatcacacaaaccctgaactggctggtgaggatgacatcagaaatagagaccaacattgtggctgttgagcgaataactgagtacacaaaagtggaaaatgaggcaccctgggtgactgataagaggcctccgccagattggcccagcaaaggcaagatccagtttaacaactaccaagtgcggtaccgacctgagctggatctggtcctcagagggatcacttgtgacatcggtagcatggagaagattggtgtggtgggcaggacaggagctggaaagtcatccctcacaaactgcctcttcagaatcttagaggctgccggtggtcagattatcattgatggagtagatattgcttccattgggctccacgacctccgagagaagctgaccatcatcccccaggaccccatcctgttctctggaagcctgaggatgaatctcgaccctttcaacaactactcagatgaggagatttggaaggccttggagctggctcacctcaagtcttttgtggccagcctgcaacttgggttatcccacgaagtgacagaggctggtggcaacctgagcataggccagaggcagctgctgtgcctgggcagggctctgcttcggaaatccaagatcctggtcctggatgaggccactgctgcggtggatctagagacagacaacctcattcagacgaccatccaaaacgagttcgcccactgcacagtgatcaccatcgcccacaggctgcacaccatcatggacagtgacaaggtaatggtcctagacaacgggaagattatagagtgcggcagccctgaagaactgctacaaatccctggacccttttactttatggctaaggaagctggcattgagaatgtgaacagcacaaaattctagcagaaggccccatgggttagaaaaggactataagaataatttcttatttaattttattttttataaaatacagaatacatacaaaagtgtgtataaaatgtacgttttaaaaaaggataagtgaacacccatgaacctactacccaggttaagaaaataaatgtcaccaggtacttgagaaacccctcgattg

SEQ ID NO: 1196 - protein, 1545 aa, Homo sapiens
MLEKFCNSTFWNSSFLDSPEADLPLCFEQTVLVWIPLGFLWLLAPWQLLHVYKSRTKRSSTTKLYLAKQVFVGFLLILAAIELALVLTEDSGQATVPAVRYTNPSLYLGTWLLVLLIQYSRQWCVQKNSWFLSLFWILSILCGTFQFQTLIRTLLQGDNSNLAYSCLFFISYGFQILILIFSAFSENNESSNNPSSIASFLSSITYSWYDSIILKGYKRPLTLEDVWEVDEEMKTKTLVSKFETHMKRELQKARRALQRRQEKSSQQNSGARLPGLNKNQSQSQDALVLEDVEKKKKKSGTKKDVPKSWLMKALFKTFYMVLLKSFLLKLVNDIFTFVSPQLLKLLISFASDRDTYLWIGYLCAILLFTAALIQSFCLQCYFQLCFKLGVKVRTAIMASVYKKALTLSNLARKEYTVGETVNLMSVDAQKLMDVTNFMHMLWSSVLQIVLSIFFLWRELGPSVLAGVGVMVLVIPINAILSTKSKTIQVKNMKNKDKRLKIMNEILSGIKILKYFAWEPSFRDQVQNLRKKELKNLLAFSQLQCVVIFVFQLTPVLVSVVTFSVYVLVDSNNILDAQKAFTSITLFNILRFPLSMLPMMISSMLQASVSTERLEKYLGGDDLDTSAIRHDCNFDKAMQFSEASFTWEHDSEATVRDVNLDIMAGQLVAVIGPVGSGKSSLISAMLGEMENVHGHITIKGTTAYVPQQSWIQNGTIKDNILFGTEFNEKRYQQVLEACALLPDLEMLPGGDLAEIGEKGINLSGGQKQRISLARATYQNLDIYLLDDPLSAVDAHVGKHIFNKVLGPNGLLKGKTRLLVTHSMHFLPQVDEIVVLGNGTIVEKGSYSALLAKKGEFAKNLKTFLRHTGPEEEATVHDGSEEEDDDYGLISSVEEIPEDAASITMRRENSFRRTLSRSSRSNGRHLKSLRNSLKTRNVNSLKEDEELVKGQKLIKKEFIETGKVKFSIYLEYLQAIGLFSIFFIILAFVMNSVAFIGSNLWLSAWTSDSKIFNSTDYPASQRDMRVGVYGALGLAQGIFVFIAHFWSAFGFVHASNILHKQLLNNILRAPMRFFDTTPTGRIVNRFAGDISTVDDTLPQSLRSWITCFLGIISTLVMICMATPVFTIIVIPLGIIYVSVQMFYVSTSRQLRRLDSVTRSPIYSHFSETVSGLPVIRAFEHQQRFLKHNEVRIDTNQKCVFSWITSNRWLAIRLELVGNLTVFFSALMMVIYRDTLSGDTVGFVLSNALNITQTLNWLVRMTSEIETNIVAVERITEYTKVENEAPWVTDKRPPPDWPSKGKIQFNNYQVRYRPELDLVLRGITCDIGSMEKIGVVGRTGAGKSSLTNCLFRILEAAGGQIIIDGVDIASIGLHDLREKLTIIPQDPILFSGSLRMNLDPFNNYSDEEIWKALELAHLKSFVASLQLGLSHEVTEAGGNLSIGQRQLLCLGRALLRKSKILVLDEATAAVDLETDNLIQTTIQNEFAHCTVITIAHRLHTIMDSDKVMVLDNGKIIECGSPEELLQIPGPFYFMAKEAGIENVNSTKF

SEQ ID NO: 1197 - DNA, 4011 bp, Homo sapiens
ggcgggcacccgcgcgcgcacactcgcacaccgcacctcagctcctgcccggcctcgcccccacccgcgagcgccgaacctcctggggccggatgccatgggtaacaacttctccagtatcccctcgctgccccgaggaaacccgagccgcgcgccgcggggccacccccagaacctcaaagactctatcgggggccccttccccgtcacttctcaccgatgccaccacaagcagaagcactgtccggcagtgctgcccagcggggggctcccagccgcgccgctgctcttccacccgcacaccaagggctcccagatcctcatggacctcagccacaaggctgtcaagaggcaggccagcttctgcaacgccatcaccttcagcaaccgcccggtcctcatctacgagcaagtcaggctgaagatcaccaagaagcagtgctgctggagcggggccctgcggctgggcttcaccagcaaggacccgtcccgcatccaccctgactcgctgcccaagtacgcctgccccgacctggtgtcccagagtggcttctgggccaaggcgctgcctgaggagtttgccaatgagggcaacatcatcgcattctgggtggacaagaagggccgtgtcttccaccgcatcaacgactcggctgttatgctgttcttcagcggggtccgcacggccgacccgctctgggccctggtggacgtctacggcctcacgcggggcgtccagctgcttgatagcgagctggtgctcccggactgtctgcggccgcgctccttcaccgccctgcggcggccgtcgctgcggcgcgaggcggacgacgcgcgcctctcggtgagcctatgcgacctcaacgtgccgggcgcggacggcgacgaggccgcgccggccgccagctgccccatcccgcagaactcactcaactcgcagcacagccgcgcgctgccggcgcagctcgacggcgacctgcgtttccacgccctgcgcgccggcgcgcacgtccgcatcctcgacgagcagacggtggcgcgcgtggagcacgggcgcgacgagcgcgcgctcgtcttcaccagccggcccgtgcgcgtggccgagaccatcttcgtcaaggtcacgcgctcgggtggcgcgcggcccggcgcgctgtcgttcggcgtcaccacgtgcgaccccggcacgctgcggccggccgacctgcccttcagccctgaggccctggtggaccgcaaggaattctgggccgtgtgccgcgtgcccgggcccctgcacagcggcgacatcctgggcctggtggtcaacgccgacggcgagctgcacctcagccacaatggcgcggccgccggcatgcagctgtgcgtggacgcctcgcagccgctttggatgctcttcggcctgcacgggaccatcacgcagatccgcatcctcggctccactatcctggccgagcggggtatcccatcactcccctgctcccctgcctccacgccaacctcgcccagtgccctgggcagcggcctgtctgaccccttgctcagcacgtgcagctctggccctctgggtagctctgctggtgggacagcccccaattcgccagtgagcctgcccgagtcgccagtgaccccaggtctgggccagtggagcgatgagtgcaccatttgctatgaacacgcggtggacacggtcatctacacatgtggccacatgtgcctctgctacgcctgtggcctgcgcctcaagaaggctctgcacgcctgctgccccatctgccgccgccccatcaagggcatcatcaagacctaccgcagctcctagcccgttgcggtggcccatcccgcatacccatcttctcgggcttcagcccagtcccagctgaggaacaagccagtggggccccttctcttcctcattttggaaacttttcctcctctattaaacatgggaaactgaagcccttgaaggtttggggagaggggggtatcaggcagggagggggcagaggcaaatcaccgggcagagggaggggaggagaggaggccgcactctccctgtctctcccgtctctgcacccagctcctctctgcatgctgagggctaaattgggatctcagcctgccctaatctttccccatttgaggcaggtttctaggaggtgtctgtagtccatgtggcacctttgtgagaattagaaaacatgtaccttcctctgggcagctgcagccctgagccaggacatgtggcctggctagtgcagcatggagtggattttaggctcatttgccctctcagccaactgcccttgtgcagtgtacagcctgctcaacaaccgccctgggcaggccgctcctgagctgctgtctccctctctgacctatgcctaccttctctttcttcgttccctgcccactgggcatggcagctgggggtgagaggctggtggttgcctcccgtcctgggcaggctgcagcctcatgccatgtctctctcccactacctgatgggcacatggacaggctgcagagggctccaggttctgggcccctggctgagaaggggaggatcctgtcctggctgtagccttcctgccccaatcatctcgctggatgccattgcccaggggtagcccttcggtatgggctggggagaagggttggtcttctgccagggtccctaagaacaggtttgcagctaccctctctgaccttttccccatatcttgtgctgtccagggcctaggctgatagtcagagcctgtggcacacctgggatgggccagggccctgggtggggaggtgtgggttccctgggccaagaccagcctttttactcagtttaattaatttatttatttggtttgtggttttgggttttttttgtttgtttgtttgtaggtgagttcccatcctctgggcccctagaaatgctgcctttgtgtgtggggtacctgggaaagggtgtggctgaggcagtcataatgcagtatcttcccctgactccagccacaaagctcatacccagccctaccaatcatgaattggaactccataaggaggggccaaattgggaggccttttggcaaacagtgtctattttacagagaggcaaaccaagcctccttagtgccctggggctgatggtcacccagagccatagagcacccttcctcctgggccagagctgggttatcatggttggcttaggtacctcaggtggcccaggaggtcccccctccataaggacgtcaaacttctaggagggccagtgttcctagtgtgggccaggaacaggacagggagaccttgtgatggcggggcagggagcctgttcgtagggaagatgaggaggcaagggctgcctctaacacctccaggttctctaagttctggggagggagcgccccacctgctgaggtcggtcctctcagccctgcctgccctggcctgggctctcccagcctcccagccctctgccccctcagatggctttttgtttttgtttttttttgcatccatcagagactgcacctctgtgtggcaggcagggcatgggttttagtcctggccactgaccagctgtgtggccctggccgagtcgtagccccctggagcccagcttccatttctataaaatggttgtttcgggagagaggggcaggctttctgtgtgactcgggagttcttccgtgagggctgccagggggtggtgtgccaggacctcaggctgggcctttgtgctggccttgcagtgggtgtgtggggaagtcactgtcccactatgggtctccactacccagtcactgaccctgggagaccccttctgtgtgggagggagcgggggctggctagcgggccccccagccagggatcccagaggctgagggttggggggaggaagccatcatctcattacctctgtcagtgcaggggtggctgctgcttcccttgtgcacttgggtcgctgtgattgtgaataaaagtgatttcgtaccaaaaaaaaaaaaaaaa

SEQ ID NO: 1198 - protein, 574 aa, Homo sapiens
MGNNFSSIPSLPRGNPSRAPRGHPQNLKDSIGGPFPVTSHRCHHKQKHCPAVLPSGGLPAAPLLFHPHTKGSQILMDLSHKAVKRQASFCNAITFSNRPVLIYEQVRLKITKKQCCWSGALRLGFTSKDPSRIHPDSLPKYACPDLVSQSGFWAKALPEEFANEGNIIAFWVDKKGRVFHRINDSAVMLFFSGVRTADPLWALVDVYGLTRGVQLLDSELVLPDCLRPRSFTALRRPSLRREADDARLSVSLCDLNVPGADGDEAAPAASCPIPQNSLNSQHSRALPAQLDGDLRFHALRAGAHVRILDEQTVARVEHGRDERALVFTSRPVRVAETIFVKVTRSGGARPGALSFGVTTCDPGTLRPADLPFSPEALVDRKEFWAVCRVPGPLHSGDILGLVVNADGELHLSHNGAAAGMQLCVDASQPLWMLFGLHGTITQIRILGSTILAERGIPSLPCSPASTPTSPSALGSGLSDPLLSTCSSGPLGSSAGGTAPNSPVSLPESPVTPGLGQWSDECTICYEHAVDTVIYTCGHMCLCYACGLRLKKALHACCPICRRPIKGIIKTYRSS

SEQ ID NO: 1199 - DNA, 3047 bp, Homo sapiens
catcgcccgaggcgtccgccctgcaaatctgccagcccccgagaggggtttggaaccttagcacccaagtctaagtcaacttcatagtgtgaacatggctacgcctcttcattcccgtccatgccgagcccccgactgcagcattcaaagcccccacggaggttgagccgggcacagaaacacagcagcgggagcagcaacaccagcactgccaacagacgagctcatctgcgcctttgtttagaacgcttaaaagttctgattccactaggaccagactgcacccggcacacaacacttggtttgctcaacaaagccaaagcacacatcaagaaacttgaagaagctgaaagaaaaagccagcaccagctcgagaatttggaacgagaacagagatttttaaagtggcgactggaacagctgcagggtcctcaggagatggaacgaatacgaatggacagcattggatcaactatttcttcagatcgttctgattcagagcgagaggagattgaagtggatgttgaaagcacagagttctcccatggagaagtggacaatataagtaccaccagcatcagtgacattgatgaccacagcagcctgccgagtattgggagtgacgagggttactccagtgccagtgtcaaactttcattcacttcatagaacccagcatgacataacagtgcagggcaaaatattcactgggccaattcaatacaaacaatctcttaaattgggttcatgatgcagtctcctctttaaaacaaaacaaaacaaaacaaaactatacttgaacaaaagggtcagaggacctgtatttaagcaaatacttagcaaaaagtggggcagagcctcccaaggagaacaaatattcagaatattcatattggaaaaatcacaatttttaatggcagcagaaaacttgtgtgaaattttcttgatttgagttgattgagaagaggacattggagatgccatcctctttctcttttctagtttgctcatactacattgagtagacacatttaaggatggggttatgaacccttcctgagctttatggtcctaaaagcaaaataaaaactattcgaatgaaaagacaagaaaatcaggtattaatcttggatagctaataatgagctattaaaactcagcctgggacagtttatcatgaagcctgtggatgatcaatcctttattattattttttttttttgaaaaaagctcatttcatgctctgcaaaaggagagactcccatgaagccttttgaaagggatcatcatgcagctcaactttctgttggattccatgctaagcaagctaaccttatcctgcattgttagcactaggcacccagctgccacctctccatcctgctgcccttaggccacatgggagcagtccatgcatgacagcctctatcctacaaggcctatgagtatggattgggggggccaaaaggaaaaagctccatgtgcctctttgtctgcgtgggtcagaagagttgtgcacgcagattagcaggccaaggtctgagccacagcagcatttttatttcagattttgataactgtttatatgtgttgaaaaccaaaatgacatctttttaaagcttatccataaaaaaaaatagatgtcttttatagtggaaaaacacatggggaaaaaaatcatctattttgatgcagcatttgataatgataaaacacctcacacctcactctttatagtgcacaaaatgaatgaggtctgggctaggtagaaaaagggtcaatgctatttttgtttttagaatcattaccttttaccagcttttaaccatctgatatctatagtagacacactatcatagttaacatagtaagttcagcacttgtctcattttaatgtaaagatttgcttccattttcctacaggcagtctctctcttcctcacagtcccactgtgcaggtgctattgttactcttacgaatattttcagtaatgttattttcttctaagtgaaatttctagcctgcactttgatgtcatgtgttccctttgtctttcaaactccaaggttcccttgtggccctctcccttaccctgggaaggcctcttggagaccttacccctggctgtttggactttgtatactttaaataatttaactacccttaattacttaaaaaaaaaaaaaagctttatgattttcataacttattgctgattttaatggattgttaatttcagtcctgtagttttattttatgtttagatagggctgggcaaggaaaaagaaaataaagacaaccatatttagcagtgcagttgagttgtgtgttaatgttagactatccctttgtgagtgacactttaacagcattcactgcttctatatatagtgtaccatcttggtcatacattacgcctcaacatatacttgtgctcttcctttgcctccagaagaagtttttccttgattgtgctatgtttcagtggaagaaattctttgaagtagatgtgagtgaaaaactgcatgcctttagaagcccagtatcagaacttgctacgtttcaggtgctagggacttaatgaaaaacaggacaaaacaattcctttttgtggcccaggtaaattatttctggtttcacttataattactaatggctgagtcaagatgttgtctctgtgtttgcttactcttgatcaagtgtgagacagtttgaagactgtgctaccatacaaagtgaatgaagccagtgactaagcttctgtttgttttgttattctcatggccttcgcttgcattatttgggccttcattcagatgaacttgaggtgccattttgttgcatatgtacaggattatgggctggaaagcatttgttataaacctatagtgcacattttaactgccccctaaattacccttccctgggtttgttttccttggggtggtgtagattgtatgagtaagaagtattaattttttaaaagacaaatcaactttgaagacacaaaagttaattggaagaaataaaaactgtgaacgaagaa

SEQ ID NO: 1200 - protein, 182 aa, Homo sapiens
MPSPRLQHSKPPRRLSRAQKHSSGSSNTSTANRRAHLRLCLERLKVLIPLGPDCTRHTTLGLLNKAKAHIKKLEEAERKSQHQLENLEREQRFLKWRLEQLQGPQEMERIRMDSIGSTISSDRSDSEREEIEVDVESTEFSHGEVDNISTTSISDIDDHSSLPSIGSDEGYSSASVKLSFTS

SEQ ID NO: 1201 - DNA, 3272 bp, Homo sapiens
cacgcgcgggctgcccgcggcacggcgggcgcggctggcgcggctggggcggcaggggcggcggagagcgcgccgagccgcggccgagctggcccgcccgcccgtcgcacatgttccggaacggcgcccggccgtagccgcctgcggcgcctcctgtcggcccgagaagggagtgcggagaggcgccggtcgccacccgcggtgcccatggagcgggtgaagatgatcaacgtgcagcgtctgctggaggctgccgagtttttggagcgccgggagcgagagtgtgaacatggctacgcctcttcattcccgtccatgccgagcccccgactgcagcattcaaagcccccacggaggttgagccgggcacagaaacacagcagcgggagcagcaacaccagcactgccaacagatctacacacaatgagctggaaaagaatcgacgagctcatctgcgcctttgtttagaacgcttaaaagttctgattccactaggaccagactgcacccggcacacaacacttggtttgctcaacaaagccaaagcacacatcaagaaacttgaagaagctgaaagaaaaagccagcaccagctcgagaatttggaacgagaacagagatttttaaagtggcgactggaacagctgcagggtcctcaggagatggaacgaatacgaatggacagcattggatcaactatttcttcagatcgttctgattcagagcgagaggagattgaagtggatgttgaaagcacagagttctcccatggagaagtggacaatataagtaccaccagcatcagtgacattgatgaccacagcagcctgccgagtattgggagtgacgagggttactccagtgccagtgtcaaactttcattcacttcatagaacccagcatgacataacagtgcagggcaaaatattcactgggccaattcaatacaaacaatctcttaaattgggttcatgatgcagtctcctctttaaaacaaaacaaaacaaaacaaaactatacttgaacaaaagggtcagaggacctgtatttaagcaaatacttagcaaaaagtggggcagagcctcccaaggagaacaaatattcagaatattcatattggaaaaatcacaatttttaatggcagcagaaaacttgtgtgaaattttcttgatttgagttgattgagaagaggacattggagatgccatcctctttctcttttctagtttgctcatactacattgagtagacacatttaaggatggggttatgaacccttcctgagctttatggtcctaaaagcaaaataaaaactattcgaatgaaaagacaagaaaatcaggtattaatcttggatagctaataatgagctattaaaactcagcctgggacagtttatcatgaagcctgtggatgatcaatcctttattattattttttttttttgaaaaaagctcatttcatgctctgcaaaaggagagactcccatgaagccttttgaaagggatcatcatgcagctcaactttctgttggattccatgctaagcaagctaaccttatcctgcattgttagcactaggcacccagctgccacctctccatcctgctgcccttaggccacatgggagcagtccatgcatgacagcctctatcctacaaggcctatgagtatggattgggggggccaaaaggaaaaagctccatgtgcctctttgtctgcgtgggtcagaagagttgtgcacgcagattagcaggccaaggtctgagccacagcagcatttttatttcagattttgataactgtttatatgtgttgaaaaccaaaatgacatctttttaaagcttatccataaaaaaaaatagatgtcttttatagtggaaaaacacatggggaaaaaaatcatctattttgatgcagcatttgataatgataaaacacctcacacctcactctttatagtgcacaaaatgaatgaggtctgggctaggtagaaaaagggtcaatgctatttttgtttttagaatcattaccttttaccagcttttaaccatctgatatctatagtagacacactatcatagttaacatagtaagttcagcacttgtctcattttaatgtaaagatttgcttccattttcctacaggcagtctctctcttcctcacagtcccactgtgcaggtgctattgttactcttacgaatattttcagtaatgttattttcttctaagtgaaatttctagcctgcactttgatgtcatgtgttccctttgtctttcaaactccaaggttcccttgtggccctctcccttaccctgggaaggcctcttggagaccttacccctggctgtttggactttgtatactttaaataatttaactacccttaattacttaaaaaaaaaaaaaagctttatgattttcataacttattgctgattttaatggattgttaatttcagtcctgtagttttattttatgtttagatagggctgggcaaggaaaaagaaaataaagacaaccatatttagcagtgcagttgagttgtgtgttaatgttagactatccctttgtgagtgacactttaacagcattcactgcttctatatatagtgtaccatcttggtcatacattacgcctcaacatatacttgtgctcttcctttgcctccagaagaagtttttccttgattgtgctatgtttcagtggaagaaattctttgaagtagatgtgagtgaaaaactgcatgcctttagaagcccagtatcagaacttgctacgtttcaggtgctagggacttaatgaaaaacaggacaaaacaattcctttttgtggcccaggtaaattatttctggtttcacttataattactaatggctgagtcaagatgttgtctctgtgtttgcttactcttgatcaagtgtgagacagtttgaagactgtgctaccatacaaagtgaatgaagccagtgactaagcttctgtttgttttgttattctcatggccttcgcttgcattatttgggccttcattcagatgaacttgaggtgccattttgttgcatatgtacaggattatgggctggaaagcatttgttataaacctatagtgcacattttaactgccccctaaattacccttccctgggtttgttttccttggggtggtgtagattgtatgagtaagaagtattaattttttaaaagacaaatcaactttgaagacacaaaagttaattggaagaaataaaaactgtgaacgaagaa

SEQ ID NO: 1202 - protein, 228 aa, Homo sapiens
MERVKMINVQRLLEAAEFLERRERECEHGYASSFPSMPSPRLQHSKPPRRLSRAQKHSSGSSNTSTANRSTHNELEKNRRAHLRLCLERLKVLIPLGPDCTRHTTLGLLNKAKAHIKKLEEAERKSQHQLENLEREQRFLKWRLEQLQGPQEMERIRMDSIGSTISSDRSDSEREEIEVDVESTEFSHGEVDNISTTSISDIDDHSSLPSIGSDEGYSSASVKLSFTS

SEQ ID NO: 1203 - DNA, 3470 bp, Homo sapiens
atacacacagactcacagcgagaccgacacacactcccatacactcacacacacaactgcaggcagcgaggctcgggaagtcaggccggcttttcgccccggcgccttctctgctccagccggccgggtctccctgggggcccggagctcggccgggccgcgcagccccgttagaggacgagctcggcggacccccgctcctccatgggcaaacgcgggcggccgcgcaaggaggcgcgctgcgagggcgcggggctggcccccgccgcgcccccggctgtgccccccgccgtggccgcgccccagcccccggccctgcccgaggaccccgctggggccaagcccaggtgccccttctcagacattttcaacaccagcgagaactcgatggagaagcacatcaacacttttctgcagaacgtgcagattctgctcgaggccgccagctacctggagcagatcgagaaagaaaacaaaaagtgtgaacatggctacgcctcttcattcccgtccatgccgagcccccgactgcagcattcaaagcccccacggaggttgagccgggcacagaaacacagcagcgggagcagcaacaccagcactgccaacagatctacacacaatgagctggaaaagaatcgacgagctcatctgcgcctttgtttagaacgcttaaaagttctgattccactaggaccagactgcacccggcacacaacacttggtttgctcaacaaagccaaagcacacatcaagaaacttgaagaagctgaaagaaaaagccagcaccagctcgagaatttggaacgagaacagagatttttaaagtggcgactggaacagctgcagggtcctcaggagatggaacgaatacgaatggacagcattggatcaactatttcttcagatcgttctgattcagagcgagaggagattgaagtggatgttgaaagcacagagttctcccatggagaagtggacaatataagtaccaccagcatcagtgacattgatgaccacagcagcctgccgagtattgggagtgacgagggttactccagtgccagtgtcaaactttcattcacttcatagaacccagcatgacataacagtgcagggcaaaatattcactgggccaattcaatacaaacaatctcttaaattgggttcatgatgcagtctcctctttaaaacaaaacaaaacaaaacaaaactatacttgaacaaaagggtcagaggacctgtatttaagcaaatacttagcaaaaagtggggcagagcctcccaaggagaacaaatattcagaatattcatattggaaaaatcacaatttttaatggcagcagaaaacttgtgtgaaattttcttgatttgagttgattgagaagaggacattggagatgccatcctctttctcttttctagtttgctcatactacattgagtagacacatttaaggatggggttatgaacccttcctgagctttatggtcctaaaagcaaaataaaaactattcgaatgaaaagacaagaaaatcaggtattaatcttggatagctaataatgagctattaaaactcagcctgggacagtttatcatgaagcctgtggatgatcaatcctttattattattttttttttttgaaaaaagctcatttcatgctctgcaaaaggagagactcccatgaagccttttgaaagggatcatcatgcagctcaactttctgttggattccatgctaagcaagctaaccttatcctgcattgttagcactaggcacccagctgccacctctccatcctgctgcccttaggccacatgggagcagtccatgcatgacagcctctatcctacaaggcctatgagtatggattgggggggccaaaaggaaaaagctccatgtgcctctttgtctgcgtgggtcagaagagttgtgcacgcagattagcaggccaaggtctgagccacagcagcatttttatttcagattttgataactgtttatatgtgttgaaaaccaaaatgacatctttttaaagcttatccataaaaaaaaatagatgtcttttatagtggaaaaacacatggggaaaaaaatcatctattttgatgcagcatttgataatgataaaacacctcacacctcactctttatagtgcacaaaatgaatgaggtctgggctaggtagaaaaagggtcaatgctatttttgtttttagaatcattaccttttaccagcttttaaccatctgatatctatagtagacacactatcatagttaacatagtaagttcagcacttgtctcattttaatgtaaagatttgcttccattttcctacaggcagtctctctcttcctcacagtcccactgtgcaggtgctattgttactcttacgaatattttcagtaatgttattttcttctaagtgaaatttctagcctgcactttgatgtcatgtgttccctttgtctttcaaactccaaggttcccttgtggccctctcccttaccctgggaaggcctcttggagaccttacccctggctgtttggactttgtatactttaaataatttaactacccttaattacttaaaaaaaaaaaaaagctttatgattttcataacttattgctgattttaatggattgttaatttcagtcctgtagttttattttatgtttagatagggctgggcaaggaaaaagaaaataaagacaaccatatttagcagtgcagttgagttgtgtgttaatgttagactatccctttgtgagtgacactttaacagcattcactgcttctatatatagtgtaccatcttggtcatacattacgcctcaacatatacttgtgctcttcctttgcctccagaagaagtttttccttgattgtgctatgtttcagtggaagaaattctttgaagtagatgtgagtgaaaaactgcatgcctttagaagcccagtatcagaacttgctacgtttcaggtgctagggacttaatgaaaaacaggacaaaacaattcctttttgtggcccaggtaaattatttctggtttcacttataattactaatggctgagtcaagatgttgtctctgtgtttgcttactcttgatcaagtgtgagacagtttgaagactgtgctaccatacaaagtgaatgaagccagtgactaagcttctgtttgttttgttattctcatggccttcgcttgcattatttgggccttcattcagatgaacttgaggtgccattttgttgcatatgtacaggattatgggctggaaagcatttgttataaacctatagtgcacattttaactgccccctaaattacccttccctgggtttgttttccttggggtggtgtagattgtatgagtaagaagtattaattttttaaaagacaaatcaactttgaagacacaaaagttaattggaagaaataaaaactgtgaacgaagaa

SEQ ID NO: 1204 - protein, 295 aa, Homo sapiens
MGKRGRPRKEARCEGAGLAPAAPPAVPPAVAAPQPPALPEDPAGAKPRCPFSDIFNTSENSMEKHINTFLQNVQILLEAASYLEQIEKENKKCEHGYASSFPSMPSPRLQHSKPPRRLSRAQKHSSGSSNTSTANRSTHNELEKNRRAHLRLCLERLKVLIPLGPDCTRHTTLGLLNKAKAHIKKLEEAERKSQHQLENLEREQRFLKWRLEQLQGPQEMERIRMDSIGSTISSDRSDSEREEIEVDVESTEFSHGEVDNISTTSISDIDDHSSLPSIGSDEGYSSASVKLSFTS

SEQ ID NO: 1205 - DNA, 7282 bp, Homo sapiens
gtgcttggctacagccgctgctgcctctcgcgaactgggctccggggctcccggctcccgagaactagaagagaaacgcgagcgaagggatcgaaacccggggggttaccgacttgcagacaccgccaggacagtctgtaacgcaggaagatcccagcggctccgggtctggtgaggggaccataagcatgactgatagcgaatgaggaagggcagccctaaacttttcaagcaaagcctcagagttttgggttcactcattagcataggaaatcgattcaccgaaaacccaaacaaagaaaaacaagccgacagtccaggcaggatgcaggcaaatccagttcgggattaagggtaaaaggctttttgggttttttttcctttggtttgattttttaaaatatggggaggggggtgacatctacccgattctaggctccggcaggaacgcaatgggttaatgaatggacaagccgcggagtattgatcggctgccgccggagaaagaaagaaaaacaaaaaccagaccgaacctgccttcccgctgtggctgctcggcgccccaattaagcagggtcatctcaggctggctgcatgcctcagctgaagatcccagctcctgtcaatgccacctctctgcttgactgtctccttccagattcgagcaggtatgagctgggaagaatgaaggcagggcatgcccgtgtgccagctctgcacagctggatagctgaggaaagatgtggaggagaagccggggattgtgtggaagtctaagggtgttgtttgccctttgggttccagaagatgcatgccaggaccctgggtggcactgccaggaagcaacagagaggagataaaactcacagcagacagacttgccttaacaacaactcccttgaattaaaacacgcttttcaagaaaacaaattatcagttcgatcagcaaacagcagagaagtttctctcataatggcaaagaagggccgggttgctgaccagtgaaagagcttcagaaaaggagaggggagatgagatggccagaaggagcaagagcaccgtacatccctggacaacctcattctaatgggtcaggggctgggacgtgcattttggagtgcaggagaagtggcaactcacaaatgctagattttcttctagagatgaccaagctgtagttcttaaagcagtggcactagggcagaaaactctcacactttgatgtgcacacacagcccctggggatcttgttgacatgtagattctgattccgtaagtcgggctgagattctgcatttccaacaagctcctagatgaggtccattttgctggtccatgaaacacacttagaataagtagcaaggtataggaggatactgactttgctcagtgatgcttgggcttccgtccaaactaaaataaaacaaaagcagacataaatggcccaattcaacagcctgagaagtttggtgataatgacccaagccctggcctggtgaccaagtggctgctcagagagctctatctccaaactccttcccttcctgcctcccctccaagagtgagtaatgtgccagagttcattggggtctgctgtccccagggaaaggtggcccagttgccaagtgcaagtgtatagaacggcttacctgtgcaaagctatcagccctggacctatgggcctagaaacattacttgccactcactcactcactatcattcattcatttctgcaacaaacacttcctgagcatatgctatacaccaggccctgagctcagctctggggatacaggatgaatggcagattgtgccatcaggaagccgactgcacagtcagcccgctggagcacatatgaaaaacaatacggatgttttgatttattatcatattgatcattatgatggtagcgtatacttttggaaggcttgccatacattaggcattgtgctaagcacattatatggttaatctcatcaatcttcacaacctatgtggcaggtactattattaaacccacttcaaagaggagggaactgaacctcagagagggtaagtgacttgcacaaggacacaagctagtgaggagaggaactgagaggaatggccagacaggccatcagcctctgtccccacatgctgggtctgagtgtctgacggtggacacattcccttcctggagggagagctcctagggagctgatggcagcactgagtctggaatgtgatgggagtgcattagatgacgtgggtgatctgatgagtacagaggcgtcacactgcaatgacttcatgcacatatctccccttgaatgcacagagattcagcagaggccaggagctcaagtttctggcccagtgtccccctcttcccctggggaaagccagggacacactgcctggctttgctacacctttctaggcaaaggcagtatgctctccctctccttggcctccctggctgtccacacatccacacccactcacacacacatgcacatgatcatacacattacacaagcccacatgcccacagacatgctcacactcacactcacatgcatacactgccatacacaacacacatacatacattcacacacacttgcacacacacacacacacacagttctgatggccaatcttttggggctatgttgacactgtgaagcaggtgaaacaaagtctttgccactccctgctttgggcctattatgtttgttttatagtttaactctcaaaagacaactttattttccaaaattattcaggttcccagccaggtgcagtggctcacacctgtaatcccagtactttgggaggccaaggcgggcagatcacctgaggtcaggagtttgagaccagcttggccaacatggtgaaacccagtctctactaaaaatacaaaaattagccagacatggtggcacacacatgtaatcccagctattcgggaggctgaggcaggagaatcgcttgaacccgggaggcggaggttgcagtgggccaagatcgtgccactgcactccagcctgggcaacagagcaagactccatctcaaaaaacaaaaacaaaatcattcaggttctgtaggggaccctcactgtgtcctggattccattccacttttaaagtcccaaacagcttgtatggccacttcccttgacacccaaaccagataggagtcttaaatgacacagagtattgatggtttctttaaaaggaaatccactctcaatgggaagctggataacttcgcatccagatttcatccatcttgggctttggtggctgctgtttgtttttgtgcaggagaatctctcccagccaacgtcgatttcactaacacagtggttaacctttgctctctactcctgcatcaatcttccgcctaccgcatgttgagccatgctgctttctggcattccttttggattttcagtttactacccaactaccagtcctaataacatcagataaaagggcttccgctgtgctgcacttgttttcaaaaactataaatgccatcgacccagagttaagtccagcctcagagagacagaatataaatacccaagtggccctgggccactgagttcctcagacattatgtgctatgggagttccagaaagggggattgcctggttttgagtgcagaaggcttcctggaggaggcgagatttctgatgggcctctgttatgagctaaattgagtccaccccaaaattcagatgttcaaatcctaacctgtagtacctaagcatgtggccttatttggaagcagaagcataacagaggtaattcgttaagatgaggtcacagtggaagagggtggaccccaatctgatacaactcgtgtccttataaaaagcagaaatttgaagacagacacacaagaagatgaaggcagagacctggctgatgcggctataagccaaggaacgccaaagattgccagcaaagcaccagcagccagggagaggcctcgaacaaattctccctcccagcaaaaaggaggaaggaaggaacctccaaaagaagcaggccaggcacagtggctcacgcctgtaatcccagtactttgggaggttaaggcaggcggatcacctgagatcaagagttcaagaccagcctggccaacatggtgaaacctcatctctacagaaaaatacaaaaattagtcaggtgtagtggcgtgcacctgtagtcccagttactcgggaggctgaggcaagagaatcgcttgaacctgggaggtggaggttgcagtgagccaagatcgtgccattgcactccagcctgggtgacagagcgagactccatctcagaaaaacaaaaaagaaccctactgacacctggatttcagacttccagcctccagaactgtgagatgttacatttctgtcatttaaacacccagtttgtagtactttgttgcaacagctctagtgagctaatacagccttgtaggacaggtaggaatttgtaatgcacagagaaagccaactggccacagttgttgaaaataatagaatcgaagcgcccctatcactaccaccccaggccatcactttcaaagctgttcaaaatgatgcagccgcgtgagaaggccggaaggccagggcgggagatgggctccaggtgggcccaggctgcctgcagaaccagcttgcctcactgcctggttgccaaggagcacctgtggctaggaggagatgcccaggaagaaaatttggccacatccctgcctgcctccctggcaatgggtgatgctctctgccagctggcccagctcccccaccacatacctggctaggagtcagtaggaaaacagtgtgtgtttgtagggctctgcactgaagggcattagatccatgcaaaggctaataaattagagataagtgggatttgtagatttgctggaggttagagctgcagggtctggcatcagctctgggtcttttccatggccccaggctggctcaggtgtgagctgaagaggcaaaactgtctgtttaggttgcattgggttcccctgaaagatctgttgaagtcctaacctcgggtacctctgtttgtgctatttgcaaacaggctctttgcagatgtaatcaaggaaagatgaggcaacgctgatttagtcaggccttaatccagtgactggtgtcttcataagacaaggaaatctggacacagacacacaaagaggaaaaagccaaagacacagagacacatgtacacagggagaactccatgggacaacgcaggcacagatcggagtgacgcggctgcaagccaaggagcgccaagattgccagcaaccccctggggctgcaagaggtgagaaggagccttcggagggaacatgcactgctgattccttgattccagatttctgacctccagaagcatgggagaacagatttcccttgtttgaaggcacccagtctgtggtccttcatcatggcagccctcaggaatggatacaggcccttccctgcctgcctggtggagcagcctccaaggggagcctttgctagcaggaagaggcatcgcatggagctcagacccgcctcagaggaacttctctcagcctcctctctccgcacacccgaccaaggtgtgaaatccctcccctttacctctgccacttgcaggtggcaggatgctggagctgtccctgcctctttgtaaagtgagggaagggcagccctctctgctctttttttttttttttttgagacagagtctcactctgtctcccaggctggagtgcaatagcacgatctcggctcactgcaacctccgcctcccaggttcaagcgattctcctgcctcaacctcctgagtagctggaattacaggtgcctgccaccacgcccagctaattttgtattgttagtagagccagggtttcaccatgtcggccaggctagtctcaaactcctgacctcaggtgatccacctgcctcggcctcccaaagtgctgcgattacagacatgagccaccacgcccggcctgctccacttctaaggcttcttgtgacaatgtaagagaaaggagatgacagagctttgcaacgggaggagggctatgtgttctggtgaccaattcactgtcttgtgtcgggacaggaagaagcccttcatacgggcagcaggctgggagccagggaggaggaaagatcacgatccactccctggtacatggcccttctgcaccccgcagtctccttccaggtgccacaacgagaaggcacacatccttggcacagcacttgaggcttttcaccactggctgcactcacccctccagactcactgccttgcaccaacccttttccgcccaccccactctatgctgtccacagcctccaccccagccacctgattctgcaggccaatgtcacattcttccagtccaggttctattctggcatttcttgtcattattttgctgagaatgtgtctctcttgactttgaacttattgagagcaggaatcatgactcagccatatatcccagcacttggcccagggcctgtcgtttccagggtaggtggtctaggctgattgaaggaatggcatttagtctttaaaatgaaagcatgttgcctagcttggttatttttgaactctataatcaaggactacgtttacctgaatagcctctgcagaacaccaattccgtaaggtgcttcacacacacacaccaattctatcatttaatacattttggaaaggctacatactactacagcctcttttacagattagcaatgtccatgagcgcactaaaggttgagacattctgcagtgaagaagcctatttcattttgtttaaccaagtatttctcaaatttatttgatcatatgtggcagaaaatgctgtgtctggcattcttcatttccctcttcctcctttaacatggaacccctgatgtctttagcttggcacatcgccacccagaataaaaactacctttcccagctcttcctgcagctaggggcagccctgggataaattctggacaatgaaatacaggcagaagtaaatcatatacgatttccatgaagggaccttaaacagaagtgtgcccttctcttccccacacattcctcctcctgtctgaaatgtagatgcaactgctggcatttgagcagccatcttgggccatgtggtagcttcttatggatgatctaggactaattcaagggtctagatttacctccaaactttgtttatctacaaaaaataaaactctatcttcttaaagcta

SEQ ID NO: 1206 - DNA, 6059 bp, Homo sapiens
gggcgggcgggaggcgcggaggcagcggaggctgctcggccgcaaggaggcaggcgggaggccaggggtgcagaattggggcggggggctcccttcacccccgcagccctccgcccgggtccgtgtggccaggcctcacgtgcccgcaggcctggggaaggtggagacaggggcgggggtccgcgcagaggcctgcacggcgcggccaggtgatggtgggcctctgtgtttctccagacgaaaggggacccccggagcggccgtgcccctgggctgcccccgcgaggcgttttgacatcagccatagggaagtcggggagccctgagcctgcctgtttccgttaagtgtccttaggatgcagtgattaaggaattaggctctccctccgggaggggcactgcctgtgctagggaactcgggggcagagaaacaggacaggatgatgctgtccgagcaagcccaaaagtggtttccaacccacgtgcaggtcacagtgctccaagccaaagatctgaagccaaaaggcaaaagtggtaccaatgacacatacactataattcagctgggcaaggaaaagtactccacctctgtagctgagaaaacccttgagccagtttggaaggaggaggcctctttcgagctacctggattgctaattcagggaagtccagagaaatacattcttttccttatagttatgcacaggtccctggtgggtctggataaatttttagggcaggtggcaatcaatctcaatgacatctttgaggacaaacaaagaaggaaaacagagtggtttagattagaatccaaacaaggaaaacgaatcaaaaacaggggtgagataaaggtcaatattcagtttatgaggaacaatatgaccgcaagtatgtttgacttatcaatgaaggacaaaaccagatctccttttgcaaagttaaaagataagatgaagggtagaaaaaatgatggaacattttctgatacgtcttctgcaatcattccaagtactcacatgcccgatgccaatagtgaattttcaagtggtgaaatacagatgaaatccaaaccaaaaaagccttttctcttgggtcctcagcgactctcgtcagcgcattcaatgtctgatttatctgggtcccatatgtcttctgagaaactgaaggctggcaccataggtcaaacacatcttctcggacaccagttagattcctttggaacagttccagaaagtggaagtctcaaatctccacacagaagaacattaagctttgatacttctaaaatgaaccaacctgacagcattgtggatgaaggtgaattgtgtttcggaagacaaaatgacccatttacaaatgtgactgcttcattaccccaaaaatttgcaacactgccaaggaagaaaaatccatttgaagaaagcagcgaaacatgggacagcagcatgaatttattttcaaaaccaattgaaataagaaaagaaaataaaagagagaaaagggagaaagttagcctgtttgaaagagtgactggaaaaaaagatagcagaagatctgataaacttaacaatgggggatctgatagcccttgtgacttgaaatcacctaatgcatttagtgaaaatcgccaggactattttgattatgagtcaaccaatccatttacagcaaaattcagggcttcaaatataatgccatcttcaagttttcatatgagtccaacaagcaatgaagacctcaggaaaatcccggacagcaacccctttgatgccactgcagggtatcgtagtctgacctatgaagaggttctacaggagctggtgaaacacaaagaactccttaggaggaaagacacccacatccgggaactcgaggactacatcgacaacctccttgtaagggtaatggaagaaacgcccagtattctcagagtgccatatgaaccatccaggaaagctggcaaattctctaacagttaataaagccaattgtattgtattgataattggacaaagagagagaaagaaagaaggaaggaaggaaaaacttgttactgaaagagactacactatcaggtttcattacatattctcctttattgtgaagagtagttttacctgtaaatattagcagggactatcaagagtgacctttgaagcaagctaaatcatttaaatgtttaaattgaaaatgggccagattctcaatgaataagtggttccttaggactcactcaggtgctggtactgacccactaatctgccataggcccagaaatatcttcagaagtacgtgagttgttcctcaggaatagatttttcataaagcagaattgatcctgtggctggtttctcagaaatcagtttgtagaaatatttagcttcaggaatactgctcgttataaacactactaaaaaaacagtttatattttatatacacatatgtacatgaatatatatatattcatgtatcttgtatataaaatataggcatatacctcatatatacatgtgtttttagaacatttagaaacaattgattgcctctaaagttaggctaccaatttcttgatttgaaaatgtgtgtgctctattgatgcaagacaagtcatccttcctactgtcatggtttgttatagagaagctgcttcaaatcactcttgactacatggaccttggtttcaaagtgagctgctatatattattctagcatcaaagtttttctctttccccaaaagtgatgatctcaagtccttttttaaagaatgacaaattttaggagacttcattaacttcataacagcatgaatttatttgaattaattaacatttgagtttgtttaaggtataagcagaagataagctaatatagcttgttttgttgaaattctgcatgcctttaaatcactagcaaagcaaatattataaagttatatctgaaaataattgtgggaagtatgtgattgcctggtgtgtctgataacccaaagcagcgggcagattccaggaatgaagaattaggcttggtttcaggttacataaataatagagcagatggttgcctttgggtcttgaaccaaaataagacttactaaaggaagagtgagtttttagaagagaactttacgagcgtgacattatgcattactccacatccaccctttaagaattgatttattacaaaattatgttctattttaaagtccactcccccaaaatactgatttcttccatggattatttttatatgatttgtacaaattttttctgaaatttaagttgacaagcaatgttataaaaatattgctaatcttctgcttatttttcagcctttaaagtctgaaatactataaaacactgagagtatctatgtctttctgaatttaaaatgaaaattcatgtccatatggagacttacatattccccaatctttccatgaattgcatttttttctaatacttatctctgttaagactccattgaaagttaaacaaaaagccgatataatagtttgggttttttttttttgcttattttagtattttgaatcagagaatacttggccaagctcgtatttgtaaactaaaaccccttgttatttgtatcttctgcatttcagttttactgtaagaacatacattttgaaattatgaacatttttttcataaaaattaaatgctttaagaaatggagaaggaaaaatagcttttatcaatttttttctcctcaagattctgtaataaacctcaaagtctggtgtagaatggtattttcccgtttgaggtcttggtagttttttttttttttttaaacatggtgccacttttaattaactaaatgttacaaaattctcagcatttgtttttgtctggtagtattattgagtcttttcatacacttcttaaaatgtgaaaatctatgttttcagtattatgacagtatctgcagatactataataatatgctttggccaaatttgctgtttatagagtgaaccaagatgtcagttttgtattggggatatgttttacataaatagaactcatttaaaagtatggttcaagtactgctcttctttttatggggaaattgatttttaaggagcgattcttttcctatataaaagctattgaggcttagctttattcatacatgagtgatttggttataactcaatcaaaatttttatctttaaatctgagacaagtattatatttaaaactagatctattaatacattcatcactgcctgaaaatttgctgttctaatgtttgtgaattttcactcattacctagagtaaacttattgcatattttcataatcagtcaaaataataaaactaaaaacaaaaagtaaaaattagttcccaagtaaatatatcagtgtttcctgtgtttgggcagaagtgcaaagtagttttaatttctcacgttgtagaaaaagaggccaaaaaggtcaccttagtttatttttccaaaacataactttaggtattctaatgtattttgttagttgcttagaaatggaaataaaatatatgtgcttattaaataatgcacagtacactagattatagagtttatttttgcttttatgctttaaagaatgcatgcccaaaacactactaccaacaggaggattttttaaaatcacagaattgatatttatctcaagactatcttaagctaatgtacttctgttacataattaaactatttctgctattatttttaaagcagtattattttataaccaattctaaaattcagctttaaaaatattgaacataccttcctaccacttacgcttcaagtttcatttattgaataccagggtcatatcttagaattgtatataaaacaacatgtaacccattcatgaaaaacgtttttaagtattgctttttgctgctatgttctgcattgagcctagttttgccattgtcccctgaatgtagtattatctatagattatacataactacatctattgcttttggtggtaaatcaagatttagttgtaattttccagctgtgaaaatgttgccttgtatttaaaagggtttcatgaatggaaacctaagtaaaactaagctcattagtgacagacttgttttcttcttgttattcctccagcaactccctcaccaccacgcctccctgcctaccatccccggaagggtgcttattctttaacaaagagaatctaaaaaaaaaaacaaaaaactgttgtctaatatatctacagtaaatgttacactagagcttttattttcctctgtagcttttcagaagaagcaatttaccttggatttgtaaatcaagctgaaacttttttgatgttcatgtactcatatgtcttgtaggtggtaggtgtcacttgtgtgtatgtgtaagtgaagtatgatgcatgctcattcacttggtccctttgaaataagggaaaggatcacagtgctgctgggccatgatggtatgtagaagggtctgtcagcacacatggaaagcccccatttgcacagatgtagaactttaataatccagatgcaatcattggaagtatttaatatgcaattggtagcaccttagctaattaatctgcatatgaagcattttctgatatatttaataagaggtatagaagctcttcaagcattaaaatagagttgatgtttcattccatttgttttatccatcaaaaaatgcactctcacagtggagttgaagtctaatacatgatacatgtgggcctgttagtcttcgaagcttccagatggtttgtgttttgaggtacaaaaaaatgctgcagatctagaaatgcatatatttagcgggtatttgaaagatagaagcattatttataactgaagagtataacacttatcttcttaagtaaatgctctcataacttgtatacatttttgcaggtacaaattcaaaagtatgtaagcattgtataatgtgacaattgtataatttatgtaatctgatgcatgaatcagaatttttatataatatatgattattgacttatagttgattaaagtgtttaaactt

SEQ ID NO: 1207 - protein, 512 aa, Homo sapiens
MMLSEQAQKWFPTHVQVTVLQAKDLKPKGKSGTNDTYTIIQLGKEKYSTSVAEKTLEPVWKEEASFELPGLLIQGSPEKYILFLIVMHRSLVGLDKFLGQVAINLNDIFEDKQRRKTEWFRLESKQGKRIKNRGEIKVNIQFMRNNMTASMFDLSMKDKTRSPFAKLKDKMKGRKNDGTFSDTSSAIIPSTHMPDANSEFSSGEIQMKSKPKKPFLLGPQRLSSAHSMSDLSGSHMSSEKLKAGTIGQTHLLGHQLDSFGTVPESGSLKSPHRRTLSFDTSKMNQPDSIVDEGELCFGRQNDPFTNVTASLPQKFATLPRKKNPFEESSETWDSSMNLFSKPIEIRKENKREKREKVSLFERVTGKKDSRRSDKLNNGGSDSPCDLKSPNAFSENRQDYFDYESTNPFTAKFRASNIMPSSSFHMSPTSNEDLRKIPDSNPFDATAGYRSLTYEEVLQELVKHKELLRRKDTHIRELEDYIDNLLVRVMEETPSILRVPYEPSRKAGKFSNS

SEQ ID NO: 1208 - DNA, 3232 bp, Homo sapiens
gactggaggcgcgcgacgcgggcgcaatggcggggacccggggcttgatgctgcttgggcctggcccagtggcgggtcctagggacgtgggtacctgcagaggccggcagatggagattcagaaacataaggacaacaagaaacttccccaaggtatcattatagtctttagacttcagacacacaccacacctcaaatatatacacaactgaaaggaaaattaaggaagtttttcaaagaaccctattccgagtaagaagtgtgttgcatgaatttctaagaaatgtatttctcacaagtctggagatgggaagtcaaagaccaaagtaccagcagaatggttgtctagtgagggccctcttcctcctagatgacagtctttgcactgtgtcctcaagggtagaaggaatgagccagctctctggggtctcttttataaaagtgctaatcccagtcaagagggctctgccaggggccctgcctcccaatattatcaccttggtgctaaccaatattttctaacttccatttgctactctaatgttaactctgttatctcaattttaataataataatagctgacatttgctgatgacatgccttacactgcattcattaacatctcaatctcatttaatttgaaagagataaagcaacagccaatacacacattaccactttttttcctatcctgttacaaaggagatgaggttgtgggagaactctctttaggcattgttcacatcaggacacttgagaaacagatccttcatatcctttggacaactcttgtacttcagttggctttaagcattatcagagcatccttgacatgatgccaggtcctaacaccgcttcagtgaaagctcagagacaagcaaaagataattgatctattttgtgccgcatgacatactcgatgagcagcaacatatactgtggtgtttggcctccataaactgcagagaaattgaaatatagtaataaactttatgcacggacaaagggtgacctaggatatcactgaactcttctgccttcataaccaaatgtcaaaatgctaatagtctgttccttgtggaaaaatgttgagttttcattcgggagatcaggacttacacactaactcaacctacagtagacacttgctagagaataaaacacaataatgcacgtagaatcgttctgtaaactgtaaagaattttacaaatatgaaattttattatggttttagtcttgtatctattaaatgtatacctattagcatgcacacttttttcttctagcatcaaaggttgcttaaaataacagtggaacatttaaaagcaagagaattctaatttaccatcattcaaattatgttaaatccaactcaactttataagctaaggaacatgtgaaggataaataaaaatttgatagttaagaagataaatatatgcagataaattatgtgatgagtcaaattgattattacaggacaatatactgtattaataaaacagactaaatttaaatgtattgtgcaatggcaaacctagtgccttcttggaaaaacatgccttaacaagctcatgtggttgcaaggttgataatatcttgataataacttatgttgttcttattcctagtaattgctggcctccttatgaccttccgcctagtttcaggcagtagctaggagagctagactaactgctccagagaagtgaggccaaggcatgcaacagagtcacttctccgcttttccatttcaaagtagacaataggggaagatataacaaaagccaaaatttatgcagtaaagaaaaaattggggaagaatgcaattaatgaaagacctacactatacaaggatttcactggacgaagtgaagaatagggagcttgtaaagaagatcaagatagttggacaggtggaatgtctccaagacctttccactcgcctccccacttgttgagcatgggagctgggcaaatggatgatagaccatccagataaattttggcatctaaaagtaattgtcacttgcatcttgtttctcaagaaggaccttgaaagtaagcaaactcctagagctccctaatcccatgcaccacattggcttggagcagcaacagtagcagtagaatagcagagcagggggactcaaggccaagacggtcttgttacaggcaactccctgagcctccttccatccgagaggtacctgagaacctctaaaaatttcatttccccctgaaaggtgagaaagtgactgagagagggctgataaactagggtcctccaggtcgggattgggaaaattcagaatatacatggataaagaaccagggactggccatgataggacctacacctattacttcatatgacttgctaataggagtcaatgctgacagccatagaccttcctgggcttctccctggggcctcaatttcagtccagcgttaagaacttagttttggtctcagggagaaggatagggagatggaaattttacctgagtttaaaaacctgaatttatgcagatatgacattttctggatacattttgacaagagtagaactaggggaatcaaaatagagattatgttgagtaacagggaaatagagttacagttcttgcctatcatctgagtatatggactgaaatactgtacctgctacatacattgtaagcaaagtgaggtcatggccagagcccaagggtttgaggagccttctatgacgtgatgagatggtcttgggtcccctatatgattagcttgtggtggtacattaggactaaatattccaaatgcattaacataaagctgaagtgatgtccttagtgaacttggtcttaaaaattaagagcattttggttgggtgacctaccaacaacatacagggaagagatacaggatcttggttgattctcactgcagtagacattgattttgtggtgtagcagcttgtaaaattaatgcaaatttgagatgaactaataaaaatatagttcatgaaggtgccccactacttgccctacctctcctctcctgttacaatagatcacccatctttgttcccatctgaggactcaggtaatggacttcatctcttcttgtcttctcaaggattttgcatctgccattatcctttctccctcctgtatcctcagttgttttcttctctactggatcaatgtcatcaacatacaaatattatctagtatttctcatatt

SEQ ID NO: 1209 - DNA, 756 bp, Homo sapiens
cgcgacgcgggcgcaatggcggggacccggggcttgatgctgcttgggcctggcccagtggcgggtcctagggacgtgggtacctgcagaggccggcagatggagattcagaaacataaggacaacaagaaacttccccaaggtatcattatagtctttagacttcagacacacaccacacctcaaatatatacacaactgaaaggaaaattaaggaagtttttcaaagaaccctattccgagtaagaagtgtgttgcatgaatttctaagagccagaaaatgcatgacacaggagaagatgtaccctcatctgttcagtgagagatgtgcaaatcaacatcaacacagaactgctgaagaaaaaaaatatgtctctgaaaagcaacttattcactggagatgtgaggagccatccgcacatcacaattctatagacatcaaacgcatgaagcatttcggatctgctttaagactgaggcagactttccatctggacacagccgaccatccatgtgtcattacaatgaatccagcacttccctggaagctggaagggtcaaattcaacttcaactctgccacttcctgcttaacttgctgtttaaccttgggcaagctgccatcccacacgaggccgaaggtgtcggtttttaaaatacagaaatttggttccatgagggattatcaatatactgctggtgggccaaattccatctgctacttgcctttgtaaataaagttttattgaaacacaaa

SEQ ID NO: 1210 - DNA, 2737 bp, Homo sapiens
tgacgaaggggcccgaccgcgccgcgtttcgggagcggacgtccgagccacggccgaggcccgattagtccgtccggcaccgctcgggcactttcggaagggaagaggtggagaaccgacgttcgggagcattcggcctcggggacattcggctcgtctcggctcggcctcgggctgactcggcttccgccggcggcgggaacgggcgaaacccgcggcactaagctctctctgagaggcagaattgcgccggccgccggcgagaatctgcctagagccgtccagccctgtcggccggggacgacagccgcctcagcctgtcaggacagtgaggagagcaggggccgagtctctcggaagccctcgtgaggactcggacctattcggactgattcggcttcccacttcggggaacttcgaccctcctcggttcaggactcggtctcggctcggcggcttcgtgcaggttcggctcctactcgggcagcctctgttcgcctcggctccgctccgcgggcggactcggctcggctctgctcggcggctggctgccttttcggtccctattcgggcggcggcttcgggcggcctcggcccagctcgggcgtcctcttcgggccccgcttcgggctccgcgaccggcgcttcgggcggtcccggacggcgccttcgggaaggctcggcggagtccggatggaggactcggactcggcggcaaagcagctgggcctggctgaggcggcggcggtggcggccgcggccgctgtggcggcggcggccgcggccgcggcaggaggcgaggcggaggagccggtgctgagcagggacgaggactcggaggaggacgcagactcggaggcggagcgggagacgccgcgggtcacggcagtggcggtgatggcggcggagcccgggcacatggacatgggcgccgaggccctgcccggccccgacgaggccgccgctgccgcagccttcgcagaggtgaccacagtgacagtggccaacgtgggggctgctgcagacaatgtcttcaccacgtctgtggcgaacgcggcatccatctcaggacatgttctgtctggtaggacggcccttcagatcggggacagcctgaacaccgaaaaagcgacactgattgtcgtccacacagatgggagcatcgtggagaccaccgggctgaaaggcccggcagctcccctcaccccaggtcctcagtctcctccaacccctctggctcccggccaagaaaaaggtggaactaaatacaactgggacccttctgtgtacgacagtgagctgcccgtacggtgccggaacatcagcggcactctgtacaagaacaggctcggctcaggcggccggggacggtgcatcaagcagggggagaactggtacagtcccaccgagtttgaggccatggcaggaagagccagcagtaaggactggaaaagaagcattcgctacgcgggccgacccttgcagtgcctcatccaggatgggatcttaaaccctcacgctgcctcttgcacctgtgctgcctgctgcgacgacatgaccttaagtggcccagtcaggctttttgtgccttacaaaaggcgcaagaaggagaatgaactgcccacaactcccgtgaagaaggactcccccaagaacatcacattgcttccagccaccgcggctaccaccttcaccgtgaccccctcgggacagatcacgacctcgggggcactgacctttgaccgagcgtccacggtagaggccactgctgtcatatcagagagtccggcccagggcgacgtcttcgcaggggccacagtccaagaggccagcgtgcagcccccatgcagggccagccaccctgagcctcactaccccggctatcaggacagctgccagatcgcaccgtttccagaagctgcgttgccaacgtcacatcccaaaatagtgttgacatccctgcctgcgctggcggtcccacccccgactcccaccaaagcggcacctcccgcgttggtcaatgggctggagctgtcagagccgcggagctggctgtacctagaagagatggtcaactccttgctcaacacagcgcagcagctgaagacgctgtttgagcaagccaagcatgccagcacctaccgagaagctgccacaaaccaggccaagatccacgctgacgcagagcggaaggagcagtcctgcgttaactgcggccgggaggctatgagcgagtgcaccggctgccacaaggtcaactactgctccaccttctgccaacgcaaggactggaaggatcaccagcacatatgcggccagtcagcagctgtcaccgtccaggcagacgaagtccacgtggctgaaagcgtgatggagaaggtgaccgtgtgaggctccatcggccgccctgggagctggggcccctcgcactcctgtgaggcttttgcaggtcgaaggcccccctgaggactctggggggacgttgagaagaggggtgtgggaaggtaaagaaacttgctggacaagtcattaacacactttaagcgaatggtgccctgggaagcgcactccccctgcccgggccccctgcccgctcgcggacagattttttatccctgggatcatgagcgtccggtcttgcccacagggcctgtgctgcgacgcacatacatacgtgttgtgtctgtcaataaagtgtaaataaggtctccctgccaaaaaaaaaaaaaaaaaaaaa

SEQ ID NO: 1211 - protein, 565 aa, Homo sapiens
MEDSDSAAKQLGLAEAAAVAAAAAVAAAAAAAAGGEAEEPVLSRDEDSEEDADSEAERETPRVTAVAVMAAEPGHMDMGAEALPGPDEAAAAAAFAEVTTVTVANVGAAADNVFTTSVANAASISGHVLSGRTALQIGDSLNTEKATLIVVHTDGSIVETTGLKGPAAPLTPGPQSPPTPLAPGQEKGGTKYNWDPSVYDSELPVRCRNISGTLYKNRLGSGGRGRCIKQGENWYSPTEFEAMAGRASSKDWKRSIRYAGRPLQCLIQDGILNPHAASCTCAACCDDMTLSGPVRLFVPYKRRKKENELPTTPVKKDSPKNITLLPATAATTFTVTPSGQITTSGALTFDRASTVEATAVISESPAQGDVFAGATVQEASVQPPCRASHPEPHYPGYQDSCQIAPFPEAALPTSHPKIVLTSLPALAVPPPTPTKAAPPALVNGLELSEPRSWLYLEEMVNSLLNTAQQLKTLFEQAKHASTYREAATNQAKIHADAERKEQSCVNCGREAMSECTGCHKVNYCSTFCQRKDWKDHQHICGQSAAVTVQADEVHVAESVMEKVTV

SEQ ID NO: 1212 - DNA, 1613 bp, Homo sapiens
cgaacgtcggttctccacctcttcccttccgaaagtgcccgagcggtgccggacggactaatcgggcctcggccgtggctcggacgtccgctcccgaaacgcggcgcggtcgggccccttcgtcaggagacgcgaaaatggccgaaggagcgcgagcgcgcgggccgagaggctgccgggatcgcgacggaccggcgggcggggcggggagaggatcctccacagtgctctcttcagttccccttcaaatgctgttttatctcagcggaacgtactacgccctgtatttcctcgccacgctcctgatgatcacgtataaaagtcaggtgttcagctatcctcaccgctacctggtcctcgatcttgctctgctgtttctgatggggattctagaagcagttcggttatacctgggcaccaggggcaacctgacagaggctgagaggccgctggccgccagcctggccctcacggctggcaccgccctcctctctgcccacttcctgctttggcaggccctagtgttgtgggcggactgggccctcagcgccacgctcctggcccttcacggcctggaggccgtcctgcaggtggttgccatcgcggccttcaccaggtagctacggacacccgggataccccacactggggccctcctcctgggcctgaccagtcccccagctgtcacctccccattcctggacaggaagggcacttttcctagtgactggccatagatggttttggatggttccatctgttctggcaggagtgggagcaggagccagggcagaacaaactgctggaggccctggtgttgggaacagctgcggggagggtagggaccagacagaactgccttcaagatgagtcccaggagcgcacactcagccctgtcagtggggtctggctttagcagccaggcctccacagacccccatgggcccccagggccgagagggaggacagagcccttcagaacagaggcctcatctcactgcatcccccatcaccccctagttccccaatggtcctaatttgtgttctgagatcccagtttactccgtggccaggccccacctgtgtttccaagtcgggctggagacgcaggatggggtaggccttgtgctctgagcaaccccagctctgcctcacaggcaggcaggcccggtgcaagagtggactctgggttcctaaagcaataaatgcaaacaagccaacagctctgctgcctagcaatttccatcttagccacacttctcccttcaggggcttcggaggagaggtcagggctaaggccggggatgagactgcaggagagagagcagcggagggccacattcggagcctccgtccactccagttttatcagcttttgccttttgcacggagtgctaaacaaattctagctctgtgtttttttcccattcccagatttactatcagttctccttaaaaagtatctaagctgttacagtagctttcccttcacttgattctattgtgtgttttctatgtttggaataattacacccaaatatctagatattttctcttcaccgcattttgtaaataaagagatgtgtatgcctccctgaaaaaaaaaaaaaaaa

SEQ ID NO: 1213 - protein, 160 aa, Homo sapiens
MAEGARARGPRGCRDRDGPAGGAGRGSSTVLSSVPLQMLFYLSGTYYALYFLATLLMITYKSQVFSYPHRYLVLDLALLFLMGILEAVRLYLGTRGNLTEAERPLAASLALTAGTALLSAHFLLWQALVLWADWALSATLLALHGLEAVLQVVAIAAFTR

SEQ ID NO: 1214 - DNA, 3181 bp, Homo sapiens
gtcgacggccattaccaatcgcgaaaccccgcaacctgtcgctcaggttcctcctctcccggccccgccccggcccggccccgccgagcgtcccacccgcccgcgggagacctggcgccccggccgaggcgcgaacagacggacgcaccggcgagcgccgaggggacaggccgagcgcggggcgccggaggcaggtgtgggacaggcactggcctcagaccggggccacactgaggtctgcccttctcccgctggccgccacccaagacaccatgagccagtccggggccgtgagctgctgcccgggtgccaccaatggcagcctgggccggtccgacggtgtggccaagatgagccccaaggacctgtttgagcagaggaagaagtattccaactccaacgtcatcatgcacgagacctcgcagtaccacgtccagcacctggccacattcatcatggacaagagcgaagccatcacgtctgtggacgacgccatccggaagctggtgcagctgagctccaaggagaagatctggacccaggagatgctgctgcaggtgaacgaccagtcgttgcggctgctggacatcgagtcacaggaggagctggaagacttcccgctgcccacggtgcagcgcagccagacggtcctcaaccagctgcgctacccgtctgtgctgctgctcgtgtgccaggactcggagcagagcaagccggatgtccacttcttccactgcgatgaggtggaggcagagctggtgcacgaggacatcgagagcgcgttggccgactgccggctgggcaagaagatgcggccgcagaccctgaagggacaccaggagaagattcggcagcggcagtccatcctgcctcctccccagggcccggcgcccatccccttccagcaccgcggcggggattccccggaggccaagaatcgcgtgggcccgcaggtgccactcagcgagccaggtttccgccgtcgggagtcgcaggaggagccgcgggccgtgctggctcagaagatagagaaggagacgcaaatcctcaactgcgccctggacgacatcgagtggtttgtggcccggctgcagaaggcagccgaggctttcaagcagctgaaccagcggaaaaaggggaagaagaagggcaagaaggcgccagcagagggcgtcctcacactgcgggcacggcccccctctgagggcgagttcatcgactgcttccagaaaatcaagctggcgattaacttgctggcaaagctgcagaagcacatccagaaccccagcgccgcggagctcgtgcacttcctcttcgggcctctggacctgatcgtcaacacctgcagtggcccagacatcgcacgctccgtctcctgcccactgctctcccgagatgccgtggacttcctgcgcggccacctggtccctaaggagatgtcgctgtgggagtcactgggagagagctggatgcggccccgttccgagtggccgcgggagccacaggtgcccctctacgtgcccaagttccacagcggctgggagcctcctgtggatgtgctgcaggaggccccctgggaggtggaggggctggcgtctgcccccatcgaggaggtgagtccagtgagccgacagtccataagaaactcccagaagcacagccccacttcagagcccacccccccgggggatgccctaccaccagtcagctccccacatactcacaggggctaccagccaacaccagccatggccaagtacgtcaagatcctgtatgacttcacagcccgaaatgccaacgagctatcggtgctcaaggatgaggtcctagaggtgctggaggacggccggcagtggtggaagctgcgcagccgcagcggccaggcggggtacgtgccctgcaacatcctaggcgaggcgcgaccggaggacgccggcgccccgttcgagcaggccggtcagaagtactggggccccgccagcccgacccacaagctacccccaagcttcccggggaacaaagacgagctcatgcagcacatggacgaggtcaacgacgagctcatccggaaaatcagcaacatcagggcgcagccacagaggcacttccgcgtggagcgcagccagcccgtgagccagccgctcacctacgagtcgggtccggacgaggtccgcgcctggctggaagccaaggccttcagcccgcggatcgtggagaacctgggcatcctgaccgggccgcagctcttctccctcaacaaggaggagctgaagaaagtgtgcggcgaggagggcgtccgcgtgtacagccagctcaccatgcagaaggccttcctggagaagcagcaaagtgggtcggagctggaagaactcatgaacaagtttcattccatgaatcagaggaggggggaggacagctaggcccagctgccttgggctggggcctgcggaggggaagcccacccacaatgcatggagtattatttttatatgtgtatgtattttgtatcaaggacacggagggggtgtggtgctggctagaggtccctgcccctgtctggaggcacaacgcccatccttaggccaaacagtacccaaggcctcagcccacaccaagactaatctcagccaaacctgctgcttggtggtgccagccccttgtccaccttctcttgaggccacagaactccctggggctggggcctctttctctggcctcccctgtgcacctggggggtcctggcccctgtgatgctcccccatccccacccacttctacatccatccacaccccagggtgagctggagctccaggctggccaggctgaacctcgcacacacgcagagttctgctccctgaggggggcccgggaggggctccagcaggaggccgtgggtgccattcgggggaaagtgggggaacgacacacacttcacctgcaagggccgacaacgcaggggacaccgtgccggcttcagacactcccagcgcccactcttacaggcccaggactggagctttctctggccaagtttcaggccaatgatccccgcatggtgttgggggtgctggtgtgtcttggtgcctggacttgagtctcaccctacagatgagaggtggctgaggcaccagggctaagcaattaaaccagttaagtctcccaggaaaaaaaaaaaaaaaa

SEQ ID NO: 1215 - protein, 715 aa, Homo sapiens
MSQSGAVSCCPGATNGSLGRSDGVAKMSPKDLFEQRKKYSNSNVIMHETSQYHVQHLATFIMDKSEAITSVDDAIRKLVQLSSKEKIWTQEMLLQVNDQSLRLLDIESQEELEDFPLPTVQRSQTVLNQLRYPSVLLLVCQDSEQSKPDVHFFHCDEVEAELVHEDIESALADCRLGKKMRPQTLKGHQEKIRQRQSILPPPQGPAPIPFQHRGGDSPEAKNRVGPQVPLSEPGFRRRESQEEPRAVLAQKIEKETQILNCALDDIEWFVARLQKAAEAFKQLNQRKKGKKKGKKAPAEGVLTLRARPPSEGEFIDCFQKIKLAINLLAKLQKHIQNPSAAELVHFLFGPLDLIVNTCSGPDIARSVSCPLLSRDAVDFLRGHLVPKEMSLWESLGESWMRPRSEWPREPQVPLYVPKFHSGWEPPVDVLQEAPWEVEGLASAPIEEVSPVSRQSIRNSQKHSPTSEPTPPGDALPPVSSPHTHRGYQPTPAMAKYVKILYDFTARNANELSVLKDEVLEVLEDGRQWWKLRSRSGQAGYVPCNILGEARPEDAGAPFEQAGQKYWGPASPTHKLPPSFPGNKDELMQHMDEVNDELIRKISNIRAQPQRHFRVERSQPVSQPLTYESGPDEVRAWLEAKAFSPRIVENLGILTGPQLFSLNKEELKKVCGEEGVRVYSQLTMQKAFLEKQQSGSELEELMNKFHSMNQRRGEDS

SEQ ID NO: 1216 - DNA, 1319 bp, Homo sapiens
cgcgcccgtcccgtcgccgccgccgccgccgcagacccctcggtcttgctatgtcgagctcacccgtgaagcgtcagaggatggagtccgcgctggaccagctcaagcagttcaccaccgtggtggccgacacgggcgacttccacgccatcgacgagtacaagccccaggatgctaccaccaacccgtccctgatcctggccgcagcacagatgcccgcttaccaggagctggtggaggaggcgattgcctatggccggaagctgggcgggtcacaagaggaccagattaaaaatgctattgataaactttttgtgttgtttggagcagaaatactaaagaagattccgggccgagtatccacagaagtagacgcaaggctctcctttgataaagatgcgatggtggccagagccaggcggctcatcgagctctacaaggaagctgggatcagcaaggaccgaattcttataaagctgtcatcaacctgggaaggaattcaggctggaaaggagctcgaggagcagcacggcatccactgcaacatgacgttactcttctccttcgcccaggctgtggcctgtgccgaggcgggtgtgaccctcatctccccatttgttgggcgcatccttgattggcatgtggcaaacaccgacaagaaatcctatgagcccctggaagaccctggggtaaagagtgtcactaaaatctacaactactacaagaagtttagctacaaaaccattgtcatgggcgcctccttccgcaacacgggcgagatcaaagcactggccggctgtgacttcctcaccatctcacccaagctcctgggagagctgctgcaggacaacgccaagctggtgcctgtgctctcagccaaggcggcccaagccagtgacctggaaaaaatccacctggatgagaagtctttccgttggttgcacaacgaggaccagatggctgtggagaagctctctgacgggatccgcaagtttgccgctgatgcagtgaagctggagcggatgctgacagaacgaatgttcaatgcagagaatggaaagtagcgcatccctgaggctggactccagatctgcaccgccggccagctgggatctgactgcacgtggcttctgatgaatcttgcgttttttacaaattggagcagggacagatcatagatttctgattttatgtaaaattttgcctaatacattaaagcagtcacttttcctgtgctgtttcaaaaaaaaaaaaaaaaaaaaaaaaaaaaaaaaaaaaaaaaaaaaaaaaaaaaaaaaaaaaaaaaaaaaaaaaaaaaa

SEQ ID NO: 1217 - protein, 337 aa, Homo sapiens
MSSSPVKRQRMESALDQLKQFTTVVADTGDFHAIDEYKPQDATTNPSLILAAAQMPAYQELVEEAIAYGRKLGGSQEDQIKNAIDKLFVLFGAEILKKIPGRVSTEVDARLSFDKDAMVARARRLIELYKEAGISKDRILIKLSSTWEGIQAGKELEEQHGIHCNMTLLFSFAQAVACAEAGVTLISPFVGRILDWHVANTDKKSYEPLEDPGVKSVTKIYNYYKKFSYKTIVMGASFRNTGEIKALAGCDFLTISPKLLGELLQDNAKLVPVLSAKAAQASDLEKIHLDEKSFRWLHNEDQMAVEKLSDGIRKFAADAVKLERMLTERMFNAENGK

SEQ ID NO: 1218 - DNA, 4378 bp, Homo sapiens
gcagacccagcgccgagcccgagccatggcgtccgagcggctccctaacaggcccgcctgtctgctcgtggccagcggcgccgccgaaggtgtgtcggcccagtccttcctccactgtttcacgatggccagcaccgccttcaacctgcaggtggccacccctggggggaaagccatggaatttgtggatgtgactgagagcaatgcacgctgggtgcaagacttccgcctcaaggcttacgccagccccgccaagctcgagtccatcgatggtgcccggtaccatgccctcctgatccccagctgtcctggggccctgaccgacctggccagcagtggctccctggcccgtatcctgcagcacttccactctgagagcaaacccatctgcgccgtcggccacggtgtcgccgccctgtgctgtgccaccaacgaggacagatcctgggtgttcgacagctacagcctgacagggccctctgtgtgtgagctcgtcagggcccccggcttcgcccgcctgccgctcgtggtggaggacttcgtgaaggattcgggcgcctgcttcagtgcaagcgagcctgacgctgtccacgtcgtgctggaccgccacctggtcacaggccagaatgccagctccactgtcccggccgtgcagaacctgctcttcctctgtggcagccggaaatgaacctgctgggtagatgcaccccctgagacagcccaggtgtctccagaggcagccccgtctcaggcttcagggaccccgcctcttccctcctgacaagggccctggatggcagcctggtctggccctgatgggattgttggaggcctcctggaatcagctctgagggggtgtcggctctcctggagggtccaaacccccatcctcctgcatgttctctggtaggaggcagagaaaagaccccacgtgcctggagagctgtgctagctgctaggtggtcctcgggaattccaggctgggttttctagggaggactggttgtcacgtgtggtcactgttgactagacagagtcggctcgggggtcctctgtgtgggtttgccctgctgtggcctgtctgccacccaccacctctttcactgttggtgggggccttgaggggagggcccagccggcgggagctggctcagaactttggccaaaggtgaacggaattttttaggagcagcagcctcctgccccaaggccgaccggcactggcagcactttcctgttgaagaaatcttcctggcgtgtggtttcaaagtgtaagcacctcagtgatgcaccctgtcctaagcattgagaggcacgtttacttgtgaatatgagaccatgagattctcaatgataggaaagtgctgtcccccacggccttgcacagtggcctcgggtagagcggctatcaagagcagacagtggtccagcctgctgggcacctggcctgggctgtggccctccagcgggctgccccctggccccaggttagggcgtccaggagaggcttaggccctctacttcctcacagttccccagtttgagccatcgaaggccttcttcctgcccacctccccgtctcagccacagccgttcccaagcaccagcgtggctcctggtgccagtgacctgccaggaggccccttgtgattataaaaccgttcagttgggccgggcgcagtggctcacacctgtaaccccagcactttgggaggccgaggcgggcggatcacgaggtcaggagatcgagaccatcctggctaacatggtgaaaccccatctctactaaaaaacaaaaatacaaaaagttagcctggcatggtggtgggtgtgtgtagtcccagctacttgggaggctgaggcaggagaatggcgtgaacctgggaggcagagcttgcagtgagctgagatcgtgccactgcactccagcctgggcaatagagtgagactccatctcaaaaaaaaaacgttcagttggctgggcgcggtggctcacgcctgtaatcccagcactttgggaggccaaggtgggtggatcatctgaagtcaggagtttgggaaaagcctggccaacatggtgaaactaaaatacaaaaatgagccgggtgtggtgtcaggcgcctgtattcccagctacttgggaggctgagacgtgagaattgcttgaacctgggaggcggaagttgcagtgagccaagattgcgccattgcactccaacctgggcaatgagtgaaactccgtctcaaaaataaaaaataataaaataaagccgttcaataaggagaatttggaaaaaagtggaagaaggaagcgctgcagccacatccccgccctgaaggctgcgtccctccagtgcctcgcagattagtcaggatgcccacttagcactggccacggggccttgctctgtcccgggtccactctcatccccgtgtggtgatggacctctgtggacaaatgctttttattttatttattttttgagatggagtttgtctctcgtcacccaggctggagtgcagtggcacaatcttggctcactgcaacctctgtctcccgggttcaagcgattctcctgcctcagcctccggagtagctgggattacaggtgtgcgccaccacgcctggctaatttttgtatttttcgtagagaccgagtttcaccatgttggccaggctggtctcgaactcctgacctcaagtgatcctcccgcctcggcctcccaaagtgttaggattacaggcgtgagccactgcgcccggcgtaatttttgtttttagtagagatggggtttcatcatgttggccaggctggtcttgaactcctgacctcaggtgatccatcttcctcagcctcccaaagtgctgggattacaggcgtgagccgccacgtccggctaacaagtacttttttatttttattttattttttggatggagtctcactctgtcgcccaggctggaacacagtggcacgatctcggctcactgcagcctccgcctcccgggttcaagtgattctcctgcctcagcctcccaagtagctaggactacaggtgcacaccaccacacccagctaatttttgtatttttcctttttttttttttttgagatggagtcttgctctgttggcaggctggagtgcagtggcgcgatctcagctcactgcaacctctgcctctgcctcccagattcaagcagttctcctgcctcagcctcccgagtaactgggactacaggtgcatgccactacgcccagctagtttttgtattttcagtagagacggggtttcaccatgttggccaggatggtctcgatctcttgacctcatgatctgcccgcctcggcttcccaaagtgctgggactacaggcaagctcatgtcttaatgtcctagtccatttgggctcctataagaaaatactgtaaactggccgggcacggtggctcacgcctgtaatcccagcactttgggaggctgaggcaggtggatcacctgaggtcaggagttcgagaccagcctggccaagatggtgaaaccccgtctctactaaaaatacagaaattagccgggcgcggtggtgggcgcctgtaatcccatttacttgggaggctgaggcaggagaatcgcttgaacccaggaggcggaggttgcagtgagctgacatcgtgccactgcactctagtctgggtgacagagcaagactccatctcaaaaaaaaaaaaaaagaaaatattgtaaacctagtggcttataaacaacagaaatcagtttcagttttggaggctggaagcccaagatgaaagcaccagtagatgcaacctcttttgtgagggtgatggtcccatgatgaggctgtgcccctgccctgtgaccggatgacctcccaaatgccccacctaataccatccccttgcaggtgaggacttaagcaggtgggttttggggggacgtgctcaggccacagcagggtgcatgaagagccagtgagcctcattgagcccctctggtcagccagatctgacattgagcccagcattgaagatcaaagcaggtggggctttgggatgtgaagtgggttctgacgcggggccccacagacctgtctccgcgtgagctgcctgcaggcccctgcgtcattcctcagctgcgtgcgaggcctctggcttggagagcctccccgctgtgcacagttctctctttgccagggcagggcttggggcagcaccaggctggggcagaggaggaaagcaagaggacagacctccagaagagcagcggagggcgggtgaggatttccccatataccagtgtgtgttcatctacccatgaggaataaaaccatgcagcagcatgcaaaaaaaaaaaaaaaaaa

SEQ ID NO: 1219 - protein, 220 aa, Homo sapiens
MASERLPNRPACLLVASGAAEGVSAQSFLHCFTMASTAFNLQVATPGGKAMEFVDVTESNARWVQDFRLKAYASPAKLESIDGARYHALLIPSCPGALTDLASSGSLARILQHFHSESKPICAVGHGVAALCCATNEDRSWVFDSYSLTGPSVCELVRAPGFARLPLVVEDFVKDSGACFSASEPDAVHVVLDRHLVTGQNASSTVPAVQNLLFLCGSRK

SEQ ID NO: 1220 - DNA, 1646 bp, Homo sapiens
agcagtgcattgtgggaaactcccgagctctcctccgcgttcgcagccgccgtcatcccgcggaggagcgcgcagccccggggaggccggaggacgcgcccatagaatgcccaggggcgacaaactgtcctgagcccctctggtgcagccacctgcctgtcccatacgccccgcccaccatggagtccagagggaagtcagccagcagccccaagcccgacaccaaggtgccccaggtcaccaccgaggccaaggtacccccggcagccgatgggaaagcccccttgaccaagccctcgaagaaggaggccccggccgagaagcagcagccgccagcagcccccaccacggcacctgccaagaagacctcggccaaggccgaccctgcccttctcaacaaccacagcaacctgaagccagcccccacggtccccagcagtcccgatgcaaccccggagcccaagggtcctggggacggggcggaggaagatgaggctgccagtggggggcctgggggccgaggtccctggtcctgtgagaacttcaaccccctgctggtggctgggggtgtggccgtggcagccatagccctgattctcggtgtggccttcctggtccggaaaaaataatacctgggggccaggcggggggcacggagccacttcctgtacagacccgaggaagccagtgcatgcagagttcacccttacctattcgtacacacgcacattcattacacacctacatacgcccccaacacacgcgcacggtgaagaggacgcccgagcccacccctgctgacccaggacttccccaacctccagggcagaaagagcccaggctccggggtccacagcacaggatgtggggcgagggcacagctggggaacggcaagaaaggaatggaccctgtgtgtggccccccccacccctggcggctgggtgatcctgggcccccagggctggtctgagtgcaggtgggggtgccgggatgggttgggcctgggcccggccctcgtggggacattaaagggcgcggtggctccactcgccccatttctgctctttgcgtaccccccgggggtctgcctgggcgaatgcagtgggacggacctggggtgggcactcacctcagcagagcctcaatgccacctccccacaccacccaagcctagctgggtgggaagacggagccctgaagcctgcgtgtggagggggtgctgcccaagggtcgccttccccagcttgtgctccaggggagccccgacgccggcggggaggcagggatgtcgagggcccctcacagctgtgcccgccctgccccgctagactgcccctccagcttgcacccagcaccacctgagtctaaccagcgtataatgcaataacaggtagagtagaactgcttttggcggcgaccgtcacacactgtcctcagcccactgcacctggggaagcccctcgtgcagcccctccttagcacatccagtcccagcgtggcccttggcgcgcagcagcaggcgaactcccagaaggtggtggtgggcactgtgagaacgtggcctgccctcactggccagtggccacaggaaccccgggcctgagtggaggctgagtctgaaataaactctgtcgtctgaaggctg

SEQ ID NO: 1221 - protein, 149 aa, Homo sapiens [sequence omitted]

SEQ ID NO: 1222 - DNA, 2780 bp, Homo sapiens
gtggaagagccatccagagtgagtgcctggggcagagtgagagcaggaccagcgggcaggtggcggagcgggggtcggtggtggatggcccagccctggaaagccgaggtgaaggttacgagtccctgaggatctgtgggtgtgagccagccgcgtggccctgggcaacggcgctgccggacagaagtggcggttgctgacgcctggaaattcccctgaaggtggagcaccacccaacccccctgggtcccaccctccctcaaggcctcctccacctccacctccaccccgcctggcctggcgtccacctctgcggctcctacctgggtgcaatcgagttaaatggctgataagcagatcagcctgccagccaagctcatcaatggcggcatcgccgggctgatcggtgtcacctgcgtgtttcccatcgacctggccaagaccaggctgcagaaccagcagaacggccagcgcgtgtacacgagcatgtccgactgcctcatcaagaccgtccgctccgagggctacttcggcatgtaccggggagctgctgtgaacttgaccctcgtcacccccgagaaggccatcaagctggcagccaacgacttcttccgacatcagctctctaaggacgggcagaagctgaccctgcttaaagagatgctggcgggctgtggggctggcacctgccaggtgatcgtgaccacgcccatggagatgctgaagatccagctgcaggatgcagggcgcattgccgcccagaggaagatcctggctgcccagggccagctctcggcccaggggggtgcccagccctcagtggaggctccagctgcccctcggcccacggccacccagctgacccgcgacctgctgcggagccgtggcattgccggtctctacaagggactcggggccacgctgctcagggatgtccccttctctgtggtgtacttcccgctctttgccaacctgaaccagctgggccgcccggcgtccgaggagaagtcgcctttctacgtgtccttcctggccggctgtgtggctgggagtgccgccgctgtggccgtcaacccctgtgatgtggtgaagacgcggctccagtcacttcagcgaggcgtcaacgaggacacctactctgggatcctggactgtgccaggaagatcctgcggcacgagggcccctcggccttcctgaagggcgcctactgccgcgcgctggtcatcgcgccccttttcggcatcgcacaggtggtctacttcctgggcatcgcggagtccctgctggggctgctgcaggacccccaggcctgagcccagcacccgctccaccccagccagctgggcagggccggtgtggggctggagccaggcagctagcccaggacggagcaagggaagacccctccccagccctcccgtcggcaggggcagcagggggcagggtgcagggtccacataggtggtgcacacgcaagccccccggggtgctgcctgcaccgttgggatcaatgtctcatttatgtagaaaatgcagaaatctttacattcctcaagctagcccctgccccaatcctgccctggcctgaacacccccagggacagagctggtctctgggctgggggcccccgggcctgggccgggcaggctggaccatacccccagtccaccagctccagtctccacagccatcctggcccacacaggcaccccacacaaacctgtttattgaatctgctggacccaagcggctctccagcccttccgtccttccccagccgctcttgtcgccttggcaggacttgactctgcctccctggccagccttgcaagaggactggggtctcctgccctctctgttgagccaggaatcccaagtgaggggttgccctgaggtctgactcttggggcaagcccgccacccactgtgggactttctggtgggctcctcagctcccaccccaggctggggcccagattgtgaggtctgtgtgcatgtgtgtgtgtatgtgtgtgtgcatgcgtgtgtgtgttgtggggatctggcctggcccttggggatggggctgctggggactgccccccttcccgccgtggccaggcgctctgtgtgctgtgtgtgccccaggctctgttgaccccgtccaggaactaacttacccagcttggtctctcctgagtcctccaccctggcctgggattggccagggagcagggcgggcattgggaccagtgtggagcctgagggtgcctgccctgctctggagggagggccaggagctgccacacccccaagtcctctcagggcccaccctcctttttcagcctctgcataaggcccctgggtacactgcagaagccccatccttcccgcctccgggcataaggcccctgaccacacttcagaagccccatcccccctgccaccgggcgatccctgctgtgagccgaagctctccctgccccgccctggccatgtgatcgtgttggtgacagaccctgatgtgctggtgctgtgtccccaaaaccggggccctccacagaggccccttcccagcgacactacctggggctcaggcctggacccccccagttcacggttgctcctgggagctgcccctcccgtcacatcagaaccttggaagctgctgctgctgcttacagaattatatttttttcttttgaagagttttaagaagttgtaactttttgtgtcttgtcatgtcagagaataaataaatattctaagtagaaaaaaaaaaaaaaaaaaaaaaaaaaa

SEQ ID NO: 1223 - protein, 323 aa, Homo sapiens
MADKQISLPAKLINGGIAGLIGVTCVFPIDLAKTRLQNQQNGQRVYTSMSDCLIKTVRSEGYFGMYRGAAVNLTLVTPEKAIKLAANDFFRHQLSKDGQKLTLLKEMLAGCGAGTCQVIVTTPMEMLKIQLQDAGRIAAQRKILAAQGQLSAQGGAQPSVEAPAAPRPTATQLTRDLLRSRGIAGLYKGLGATLLRDVPFSVVYFPLFANLNQLGRPASEEKSPFYVSFLAGCVAGSAAAVAVNPCDVVKTRLQSLQRGVNEDTYSGILDCARKILRHEGPSAFLKGAYCRALVIAPLFGIAQVVYFLGIAESLLGLLQDPQA

SEQ ID NO: 1224 - DNA, 3046 bp, Homo sapiens
gccggcgggatcccaggcgccgagcgcccgctgagcagccaccctttgcgcgccgcctgcagcgcagcttccccgggcgctgcctggacaggcctgcctgcgtgctgggacatgtctggcctccaaggaccgtcggtgggcgatggctgcaacggtggaggggccagagctggaggcagctgctgccgcaggagatgcttcagaggattcggacgcagggtccagggcgctgcctttcctgggcggcaaccggctgagcttggacctgtaccccgggggctgccagcagctgctgcacctgtgtgtccagcagcctctgcagctgctgcaggtggaattcttgcgtctgagcactcacgaggaccctcagctgctggaggccaccctggcccagctgcctcagagcctgtcctgcctccgctccctggtcctcaaagggtcgatctgggacctcggaccctggctctgagggccacatccgcctccccccttcccaggagggcaacgccgggacacactgggtgcctgtctccggggtgccctgaccaacctgcccgctggtctgagtggcctggcccatctggcccacctggacctgagcttcaacagcctggagacactgccggcctgtgtcctgcagatgcgaggtctgggtgcgctcttgctgtctcacaactgcctctctgagctgcctgaggctctgggggccctccccgccctcaccttcctcacagtgacacacaaccgcctgcagacgctgcccccagcactgggggccctatccaccctgcagcgcctcgatctctctcagaatctgctggacacgctacctcctgagattggaggcctgggcagcctcctggagctcaacctggcctccaaccggctgcagagcctcccagcctctctggcgggacttcggtccttgcggctccttgtcctgcacagcaacctcctggcctctgtgccagctgacttggcccgccttccactcctcacccggctcgacctgagggacaaccagctccgggacctgccccctgagctgctagacgccccctttgtgcgcctgcaggggaaccccctgggtgaggcctcgccagacgccccgagttcaccagtggcagccctcattccagaaatgcccagactgttcctgacctcagatttggacagctttcctgtgacccctcaaggctgctcagtgaccctggcctgtggcgtccgcctgcagttcccagcgggagccaccgccacccccatcaccatccgctatcggctgctgctgccggagccaggcctcgtccccctgggtcctcatgacgccctgctcagccatgtgctggagctgcagccccatggggtggccttccagcaggatgtggggctgtggctgctcttcaccccaccgcaggcccggcgctgccgtgaagtggtggtcaggacccggaatgacaacagctggggtgacctggagacctacctggaggaagaggcaccccagcggctctgggctcactgccaggtgccccacttctcctggttccttgtggtttcccgccctgtgtccaatgcctgcctggtgccaccggaggggacactgctgtgctcctcgggtcatcctggggtcaaagtcatcttcccccctggggccactgaggagcctcgtcgagtctccatgcaggtggtgcgcatggctggccgagagctgcaggccctcctgggagaaccagaggctgcagtgagccccctgctgtgcctgtcacagagcggtccccccagcttcctccaaccggtcaccgtgcagctgcctctgccctctggcatcacaggcctcagtctggaccgctcccgcctgcacctgttgtactgggcccctcctgcagccacctgggatgacatcacagctcaggtggtcctggagctcacccacctgtactggctctggtacaccaccaagaactgtgtgggaggcctggctcggaaggcctgggagcggctgcggctgcaccgtgtgaacctcatcgctctgcagcggcgccgggaccctgagcaggtcctgctgcagtgcctgccccgaaacaaggtggacgccacccttcggcggctgctggagcggtaccggggccccgagccctctgacacggtggagatgttcgagggcgaagagttctttgcggccttcgagcgcggcatcgacgtggatgctgaccgccctgactgtgtggagggcagaatctgctttgtcttctactcgcacctgaagaatgtgaaggaggtatacgtgaccaccactctggaccgggaggctcaggctgtgcggggccaggtgtccttctaccgtggcgcggtgcctgtgcgggtgcccgaggaggctgaggctgcccggcagaggaagggcgcagacgccctgtggatggccactctgcccatcaagctgccgagacttcgagggtccgaggggccacggcggggggctggcctctccttggcacccttgaatctgggagatgccgagaccggctttctgacgcagagcaacctgctgagtgtggctgggcgtctgggtctggactggccagccgtggccctgcacctgggggtgtcctaccgggaggtgcagcgcatccggcacgagttccgggatgatctggatgagcagatccgtcacatgctcttctcctgggctgagcgccaggctgggcagccaggggctgtggggctcctggtgcaggccctggagcagagtgaccggcaggacgtggctgaagaggtgcgcgcagtcttggagctcggccgccgcaagtaccaggacagcatccgacgcatgggcttggcccccaaggaccccgctctgcctggctcctcggctccacagcccccagagcctgcccaggcctaggccccacagacttttaggctggcccagatattccccagtggatgggcagagcccccaccttcaagtctctccagtgtgtggggacgggtccctgtgagcaacaaaactgcactgtttctttcacctcaaaaaaaaaaaaaaaaa

SEQ ID NO: 1225 - protein, 753 aa, Homo sapiens
MRGLGALLLSHNCLSELPEALGALPALTFLTVTHNRLQTLPPALGALSTLQRLDLSQNLLDTLPPEIGGLGSLLELNLASNRLQSLPASLAGLRSLRLLVLHSNLLASVPADLARLPLLTRLDLRDNQLRDLPPELLDAPFVRLQGNPLGEASPDAPSSPVAALIPEMPRLFLTSDLDSFPVTPQGCSVTLACGVRLQFPAGATATPITIRYRLLLPEPGLVPLGPHDALLSHVLELQPHGVAFQQDVGLWLLFTPPQARRCREVVVRTRNDNSWGDLETYLEEEAPQRLWAHCQVPHFSWFLVVSRPVSNACLVPPEGTLLCSSGHPGVKVIFPPGATEEPRRVSMQVVRMAGRELQALLGEPEAAVSPLLCLSQSGPPSFLQPVTVQLPLPSGITGLSLDRSRLHLLYWAPPAATWDDITAQVVLELTHLYWLWYTTKNCVGGLARKAWERLRLHRVNLIALQRRRDPEQVLLQCLPRNKVDATLRRLLERYRGPEPSDTVEMFEGEEFFAAFERGIDVDADRPDCVEGRICFVFYSHLKNVKEVYVTTTLDREAQAVRGQVSFYRGAVPVRVPEEAEAARQRKGADALWMATLPIKLPRLRGSEGPRRGAGLSLAPLNLGDAETGFLTQSNLLSVAGRLGLDWPAVALHLGVSYREVQRIRHEFRDDLDEQIRHMLFSWAERQAGQPGAVGLLVQALEQSDRQDVAEEVRAVLELGRRKYQDSIRRMGLAPKDPALPGSSAPQPPEPAQA

SEQ ID NO: 1226 - DNA, 3025 bp, Homo sapiens
gccggcgggatcccaggcgccgagcgcccgctgagcagccaccctttgcgcgccgcctgcagcgcagcttccccgggcgctgcctggacaggcctgcctgcgtgctgggacatgtctggcctccaaggaccgtcggtgggcgatggctgcaacggtggaggggccagagctggaggcagctgctgccgcaggagatgcttcagaggattcggacgcagggtccagggcgctgcctttcctgggcggcaaccggctgagcttggacctgtaccccgggggctgccagcagctgctgcacctgtgtgtccagcagcctctgcagctgctgcaggtggaattcttgcgtctgagcactcacgaggaccctcagctgctggaggccaccctggcccagctgcctcagagcctgtcctgcctccgctccctggtcctcaaaggagggcaacgccgggacacactgggtgcctgtctccggggtgccctgaccaacctgcccgctggtctgagtggcctggcccatctggcccacctggacctgagcttcaacagcctggagacactgccggcctgtgtcctgcagatgcgaggtctgggtgcgctcttgctgtctcacaactgcctctctgagctgcctgaggctctgggggccctccccgccctcaccttcctcacagtgacacacaaccgcctgcagacgctgcccccagcactgggggccctatccaccctgcagcgcctcgatctctctcagaatctgctggacacgctacctcctgagattggaggcctgggcagcctcctggagctcaacctggcctccaaccggctgcagagcctcccagcctctctggcgggacttcggtccttgcggctccttgtcctgcacagcaacctcctggcctctgtgccagctgacttggcccgccttccactcctcacccggctcgacctgagggacaaccagctccgggacctgccccctgagctgctagacgccccctttgtgcgcctgcaggggaaccccctgggtgaggcctcgccagacgccccgagttcaccagtggcagccctcattccagaaatgcccagactgttcctgacctcagatttggacagctttcctgtgacccctcaaggctgctcagtgaccctggcctgtggcgtccgcctgcagttcccagcgggagccaccgccacccccatcaccatccgctatcggctgctgctgccggagccaggcctcgtccccctgggtcctcatgacgccctgctcagccatgtgctggagctgcagccccatggggtggccttccagcaggatgtggggctgtggctgctcttcaccccaccgcaggcccggcgctgccgtgaagtggtggtcaggacccggaatgacaacagctggggtgacctggagacctacctggaggaagaggcaccccagcggctctgggctcactgccaggtgccccacttctcctggttccttgtggtttcccgccctgtgtccaatgcctgcctggtgccaccggaggggacactgctgtgctcctcgggtcatcctggggtcaaagtcatcttcccccctggggccactgaggagcctcgtcgagtctccatgcaggtggtgcgcatggctggccgagagctgcaggccctcctgggagaaccagaggctgcagtgagccccctgctgtgcctgtcacagagcggtccccccagcttcctccaaccggtcaccgtgcagctgcctctgccctctggcatcacaggcctcagtctggaccgctcccgcctgcacctgttgtactgggcccctcctgcagccacctgggatgacatcacagctcaggtggtcctggagctcacccacctgtacgcacgcttccaggtcacacacttctcctggtactggctctggtacaccaccaagaactgtgtgggaggcctggctcggaaggcctgggagcggctgcggctgcaccgtgtgaacctcatcgctctgcagcggcgccgggaccctgagcaggtcctgctgcagtgcctgccccgaaacaaggtggacgccacccttcggcggctgctggagcggtaccggggccccgagccctctgacacggtggagatgttcgagggcgaagagttctttgcggccttcgagcgcggcatcgacgtggatgctgaccgccctgactgtgtggagggcagaatctgctttgtcttctactcgcacctgaagaatgtgaaggaggtatacgtgaccaccactctggaccgggaggctcaggctgtgcggggccaggtgtccttctaccgtggcgcggtgcctgtgcgggtgcccgaggaggctgaggctgcccggcagaggaagggcgcagacgccctgtggatggccactctgcccatcaagctgccgagacttcgagggtccgaggggccacggcggggggctggcctctccttggcacccttgaatctgggagatgccgagaccggctttctgacgcagagcaacctgctgagtgtggctgggcgtctgggtctggactggccagccgtggccctgcacctgggggtgtcctaccgggaggtgcagcgcatccggcacgagttccgggatgatctggatgagcagatccgtcacatgctcttctcctgggctgagcgccaggctgggcagccaggggctgtggggctcctggtgcaggccctggagcagagtgaccggcaggacgtggctgaagaggtgcgcgcagtcttggagctcggccgccgcaagtaccaggacagcatccgacgcatgggcttggcccccaaggaccccgctctgcctggctcctcggctccacagcccccagagcctgcccaggcctaggccccacagacttttaggctggcccagatattccccagtggatgggcagagcccccaccttcaagtctctccagtgtgtggggacgggtccctgtgagcaacaaaactgcactgtttctttcacctcaaaaaaaaaaaaaaaaaaaaaaa

SEQ ID NO: 1227 - protein, 910 aa, Homo sapiens
MAATVEGPELEAAAAAGDASEDSDAGSRALPFLGGNRLSLDLYPGGCQQLLHLCVQQPLQLLQVEFLRLSTHEDPQLLEATLAQLPQSLSCLRSLVLKGGQRRDTLGACLRGALTNLPAGLSGLAHLAHLDLSFNSLETLPACVLQMRGLGALLLSHNCLSELPEALGALPALTFLTVTHNRLQTLPPALGALSTLQRLDLSQNLLDTLPPEIGGLGSLLELNLASNRLQSLPASLAGLRSLRLLVLHSNLLASVPADLARLPLLTRLDLRDNQLRDLPPELLDAPFVRLQGNPLGEASPDAPSSPVAALIPEMPRLFLTSDLDSFPVTPQGCSVTLACGVRLQFPAGATATPITIRYRLLLPEPGLVPLGPHDALLSHVLELQPHGVAFQQDVGLWLLFTPPQARRCREVVVRTRNDNSWGDLETYLEEEAPQRLWAHCQVPHFSWFLVVSRPVSNACLVPPEGTLLCSSGHPGVKVIFPPGATEEPRRVSMQVVRMAGRELQALLGEPEAAVSPLLCLSQSGPPSFLQPVTVQLPLPSGITGLSLDRSRLHLLYWAPPAATWDDITAQVVLELTHLYARFQVTHFSWYWLWYTTKNCVGGLARKAWERLRLHRVNLIALQRRRDPEQVLLQCLPRNKVDATLRRLLERYRGPEPSDTVEMFEGEEFFAAFERGIDVDADRPDCVEGRICFVFYSHLKNVKEVYVTTTLDREAQAVRGQVSFYRGAVPVRVPEEAEAARQRKGADALWMATLPIKLPRLRGSEGPRRGAGLSLAPLNLGDAETGFLTQSNLLSVAGRLGLDWPAVALHLGVSYREVQRIRHEFRDDLDEQIRHMLFSWAERQAGQPGAVGLLVQALEQSDRQDVAEEVRAVLELGRRKYQDSIRRMGLAPKDPALPGSSAPQPPEPAQA

SEQ ID NO: 1228 - DNA, 2902 bp, Homo sapiens
gcttccccgggcgctgcctggacaggcctgcctgcgtgctgggacatgtctggcctccaaggaccgtcggtgggcgatggctgcaacggtggaggggccagagctggaggcagctgctgccgcaggagatgcttcagaggattcggacgcagggtccagggcgctgcctttcctgggcggcaaccggctgagcttggacctgtaccccgggggctgccagcagctgctgcacctgtgtgtccagcagcctctgcagctgctgcaggtggaattcttgcgtctgagcactcacgaggaccctcagctgctggaggccaccctggcccagctgcctcagagcctgtcctgcctccgctccctggtcctcaaaggagggcaacgccgggacacactgggtgcctgtctccggggtgccctgaccaacctgcccgctggtctgagtggcctggcccatctggcccacctggacctgagcttcaacagcctggagacactgccggcctgtgtcctgcagatgcgaggtctgggtgcgctcttgctgtctcacaactgcctctctgagctgcctgaggctctgggggccctccccgccctcaccttcctcacagtgacacacaaccgcctgcagacgctgcccccagcactgggggccctatccaccctgcagcgcctcgatctctctcagaatctgctggacacgctacctcctgagattggaggcctgggcagcctcctggagctcaacctggcctccaaccggctgcagagcctcccagcctctctggcgggacttcggtccttgcggctccttgtcctgcacagcaacctcctggcctctgtgccagctgacttggcccgccttccactcctcacccggctcgacctgagggacaaccagctccgggacctgccccctgagctgctagacgccccctttgtgcgcctgcaggggaaccccctgggtgaggcctcgccagacgccccgagttcaccagtggcagccctcattccagaaatgcccagactgttcctgacctcagatttggacagctttcctgtgacccctcaaggctgctcagtgaccctggcctgtggcgtccgcctgcagttcccagcgggagccaccgccacccccatcaccatccgctatcggctgctgctgccggagccaggcctcgtccccctgggtcctcatgacgccctgctcagccatgtgctggagctgcagccccatggggtggccttccagcaggatgtggggctgtggctgctcttcaccccaccgcaggcccggcgctgccgtgaagtggtggtcaggacccggaatgacaacagctggggtgacctggagacctacctggaggaagaggcaccccagcggctctgggctcactgccaggtgccccacttctcctggttccttgtggtttcccgccctgtgtccaatgcctgcctggtgccaccggaggggacactgctgtgctcctcgggtcatcctggggtcaaagtcatcttcccccctggggccactgaggagcctcgtcgagtctccatgcaggtggtgcgcatggctggccgagagctgcaggccctcctgggagaaccagaggctgcagtgagccccctgctgtgcctgtcacagagcggtccccccagcttcctccaaccggtcaccgtgcagctgcctctgccctctggcatcacaggcctcagtctggaccgctcccgcctgcacctgttgtactgggcccctcctgcagccacctgggatgacatcacagctcaggtggtcctggagctcacccacctgtacgcacgcttccaggtcacacacttctcctggtactggctctggtacaccaccaagaactgtgtgggaggcctggctcggaaggcctgggagcggctgcggctgcaccgtgtgaacctcatcgctctgcagcggcgccgggaccctgagcaggtcctgctgcagtgcctgccccgaaacaaggtggacgccacccttcggcggctgctggagcggtaccggggccccgagccctctgacacggtggagatgttcgagggcgaagagttctttgcggccttcgagcgcggcatcgacgtggatgctgaccgccctgactgtgtggagggcagaatctgctttgtcttctactcgcacctgaagaatgtgaaggaggtgtccttctaccgtggcgcggtgcctgtgcgggtgcccgaggaggctgaggctgcccggcagaggaagggcgcagacgccctgtggatggccactctgcccatcaagctgccgagacttcgagggtccgaggggccacggcggggggctggcctctccttggcacccttgaatctgggagatgccgagaccggctttctgacgcagagcaacctgctgagtgtggctgggcgtctgggtctggactggccagccgtggccctgcacctgggggtgtcctaccgggaggtgcagcgcatccggcacgagttccgggatgatctggatgagcagatccgtcacatgctcttctcctgggctgagcgccaggctgggcagccaggggctgtggggctcctggtgcaggccctggagcagagtgaccggcaggacgtggctgaagaggtgcgcgcagtcttggagctcggccgccgcaagtaccaggacagcatccgacgcatgggcttggcccccaaggaccccgctctgcctggctcctcggctccacagcccccagagcctgcccaggcctaggccccacagacttttaggctggcccagatattccccagtggatgggcagagcccccaccttcaagtctctccagtgtgtggggacgggtccctgtgagcaacaaaactgcactgtttctttcacctcaaaaaaaaaaaaaaaaa

SEQ ID NO: 1229 - protein, 893 aa, Homo sapiens
MAATVEGPELEAAAAAGDASEDSDAGSRALPFLGGNRLSLDLYPGGCQQLLHLCVQQPLQLLQVEFLRLSTHEDPQLLEATLAQLPQSLSCLRSLVLKGGQRRDTLGACLRGALTNLPAGLSGLAHLAHLDLSFNSLETLPACVLQMRGLGALLLSHNCLSELPEALGALPALTFLTVTHNRLQTLPPALGALSTLQRLDLSQNLLDTLPPEIGGLGSLLELNLASNRLQSLPASLAGLRSLRLLVLHSNLLASVPADLARLPLLTRLDLRDNQLRDLPPELLDAPFVRLQGNPLGEASPDAPSSPVAALIPEMPRLFLTSDLDSFPVTPQGCSVTLACGVRLQFPAGATATPITIRYRLLLPEPGLVPLGPHDALLSHVLELQPHGVAFQQDVGLWLLFTPPQARRCREVVVRTRNDNSWGDLETYLEEEAPQRLWAHCQVPHFSWFLVVSRPVSNACLVPPEGTLLCSSGHPGVKVIFPPGATEEPRRVSMQVVRMAGRELQALLGEPEAAVSPLLCLSQSGPPSFLQPVTVQLPLPSGITGLSLDRSRLHLLYWAPPAATWDDITAQVVLELTHLYARFQVTHFSWYWLWYTTKNCVGGLARKAWERLRLHRVNLIALQRRRDPEQVLLQCLPRNKVDATLRRLLERYRGPEPSDTVEMFEGEEFFAAFERGIDVDADRPDCVEGRICFVFYSHLKNVKEVSFYRGAVPVRVPEEAEAARQRKGADALWMATLPIKLPRLRGSEGPRRGAGLSLAPLNLGDAETGFLTQSNLLSVAGRLGLDWPAVALHLGVSYREVQRIRHEFRDDLDEQIRHMLFSWAERQAGQPGAVGLLVQALEQSDRQDVAEEVRAVLELGRRKYQDSIRRMGLAPKDPALPGSSAPQPPEPAQA

SEQ ID NO: 1230 - DNA, 511 bp, Homo sapiens
ggtttaaccccgcctcttgcgtcggcgccttccttttcctccctgtcgccaccgaggtcgcacgcgtgagacttctccgccgcctccgccgcagacgccgccgcgatgcgctacgtcgcctcctacctgctggctgccctagggggcaactcctcccccagcgccaaggacatcaagaagatcttggacagcgtgggtatcgaggcggacgacgaccggctcaacaaggttatcagtgagctgaatggaaaaaacattgaagacgtcattgcccagggtattggcaagcttgccagtgtacctgctggtggggctgtagccgtctctgctgccccaggctctgcagcccctgctgctggttctgcccctgctgcagcagaggagaagaaagatgagaagaaggaggagtctgaagagtcagatgatgacatgggatttggcctttttgattaaattcctgctcccctgcaaataaagcctttttacacatctcaaaaaaaaaaaaaaaaaa

SEQ ID NO: 1231 - protein, 115 aa, Homo sapiens
MRYVASYLLAALGGNSSPSAKDIKKILDSVGIEADDDRLNKVISELNGKNIEDVIAQGIGKLASVPAGGAVAVSAAPGSAAPAAGSAPAAAEEKKDEKKEESEESDDDMGFGLFD

SEQ ID NO: 1232 - DNA, 134 bp, Homo sapiens
tggtccatcctaatccctgccggtccatctgtggcctgccaggtttcgcttgtggaccagagcaccctagaagcctcacccgaggagtgagcagggctccagtgggctcacgtcatgggcacttctagacactc

SEQ ID NO: 1233 - DNA, 2113 bp, Homo sapiens
gcggccccagtcagacgcaggcagccccaaagcctgaacaggcagggccagacccagcttcttcgcctccgccagcggggaccccgagctagagccgcagcgggacctgcccggcccccggctccagcgagcgagcggcgagcaggcggctcacagaggcctggccgcccacggaacccggggcccggcggccgccgccgcgatgtttccccgcgagaagacgtggaacatctcgttcgcgggctgcggcttcctcggcgtctactacgtcggcgtggcctcctgcctccgcgagcacgcgcccttcctggtggccaacgccacgcacatctacggcgcctcggccggggcgctcacggccacggcgctggtcaccggggtctgcctgggtgaggctggtgccaagttcattgaggtatctaaagaggcccggaagcggttcctgggccccctgcacccctccttcaacctggtaaagatcatccgcagtttcctgctgaaggtcctgcctgctgatagccatgagcatgccagtgggcgcctgggcatctccctgacccgcgtgtcagacggcgagaatgtcattatatcccacttcaactccaaggacgagctcatccaggccaatgtctgcagcggtttcatccccgtgtactgtgggctcatccctccctccctccagggggtgcgctacgtggatggtggcatttcagacaacctgccactctatgagcttaagaacaccatcacagtgtcccccttctcgggcgagagtgacatctgtccgcaggacagctccaccaacatccacgagctgcgggtcaccaacaccagcatccagttcaacctgcgcaacctctaccgcctctccaaggccctcttcccgccggagcccctggtgctgcgagagatgtgcaagcagggataccgggatggcctgcgctttctgcagcggaacggcctcctgaaccggcccaaccccttgctggcgttgccccccgcccgcccccacggcccagaggacaaggaccaggcagtggagagcgcccaagcggaggattactcgcagctgccgggagaagatcacatcctggagcacctgcccgcccggctcaatgaggccctgctggaggcctgcgtggagcccacggacctgctgaccaccctctccaacatgctgcctgtgcgtctggccacggccatgatggtgccctacacgctgccgctggagagcgctctgtccttcaccatccgcttgctggagtggctgcccgacgttcccgaggacatccggtggatgaaggagcagacgggcagcatctgccagtacctggtgatgcgcgccaagaggaagctgggcaggcacctgccctccaggctgccggagcaggtggagctgcgccgcgtccagtcgctgccgtccgtgccgctgtcctgcgccgcctacagagaggcactgcccggctggatgcgcaacaacctctcgctgggggacgcgctggccaagtgggaggagtgccagcgccagctgctgctcggcctcttctgcaccaacgtggccttcccgcccgaagctctgcgcatgcgcgcacccgccgacccggctcccgcccccgcggacccagcatccccgcagcaccagctggccgggcctgcccccttgctgagcacccctgctcccgaggcccggcccgtgatcggggccctggggctgtgagaccccgaccctctcgaggaaccctgcctgagacgcctccattaccactgcgcagtgagatgaggggactcacagttgccaagaggggtctttgccgtgggccccctcgccagccactcaccagctgcatgcactgagaggggaggtttccacacccctcccctgggccgctgaggccccgcgcacctgtgccttaatcttccctcccctgtgctgcccgagcacctcccccgcccctttactcctgagaactttgcagctgcccttccctccccgtttttcatggcctgctgaaatatgtgtgtgaagaattatttattttcgccaaagcacatgtaataaatgctgcagcccaaaaaaaaaaaaaaaaaaaaaaaaaaaaaaaaaaaaaaaaaa

SEQ ID NO: 1234 - protein, 504 aa, Homo sapiens
MFPREKTWNISFAGCGFLGVYYVGVASCLREHAPFLVANATHIYGASAGALTATALVTGVCLGEAGAKFIEVSKEARKRFLGPLHPSFNLVKIIRSFLLKVLPADSHEHASGRLGISLTRVSDGENVIISHFNSKDELIQANVCSGFIPVYCGLIPPSLQGVRYVDGGISDNLPLYELKNTITVSPFSGESDICPQDSSTNIHELRVTNTSIQFNLRNLYRLSKALFPPEPLVLREMCKQGYRDGLRFLQRNGLLNRPNPLLALPPARPHGPEDKDQAVESAQAEDYSQLPGEDHILEHLPARLNEALLEACVEPTDLLTTLSNMLPVRLATAMMVPYTLPLESALSFTIRLLEWLPDVPEDIRWMKEQTGSICQYLVMRAKRKLGRHLPSRLPEQVELRRVQSLPSVPLSCAAYREALPGWMRNNLSLGDALAKWEECQRQLLLGLFCTNVAFPPEALRMRAPADPAPAPADPASPQHQLAGPAPLLSTPAPEARPVIGALGL

SEQ ID NO: 1235 - DNA, 1838 bp, Homo sapiens
aggtctagccggcaagccggagggcgggcgagacaacaacgtggcctggaggcaatggccctggcctctcgtgtccccttctctcacccgcccagacttgccctctttggaggtcgcccgggctaagctttcaggaccccaccttccttatcaccaggtcttctccactggcccctgagattgccatcacctccagctcctcctctcctgaagttggcagcccctcctgggttccagcctcctgagatgccagacccactggggcagtacccacaggccctgagcctacatcaaccaccccagtgacaccccaagcctgcagcattttccacccccagccccctggtcccaccttgccttccgcccaccttcccacctgctgcagggagggccctcggctgagccttcagacacacttgcaccccatccgctcccctcctgaatttcttctgaccctcccttggcttcacagcacctgaaggccaggctgaggccccctgctctcatggccagccctggaaagcctggggctgatgaggcccaggaggaggagggggaactcgaggggggctctgcagggccgcgggctgcaatactggagcaggctgaggagctgtttctgctgtgtgacaaggaggctaagggcttcatcaccaagcacgacctgcagggtctccagagcgacctgcccctcacgccagagcagctggaggctgtgtttgaaagtctggaccgggctcacactggcttcctcaccgccagggagttctgcctgggcctggggatgtttgtgggggtggcgtcagcccagggagcgaacccctgcaggactcccgaggagacctttgagtcgggcgggctcgacgtgcagggcacggcgggctctctggatgaggaggaggaagaggaggagcgattccacactgtgctggagcagctgggggtggccccggtcctgggcaagcagcgggctgtgaggacgctctgggccaggctgcagcgcgagcgccccgagctgctgggctctttcgaggatgttctgatacgcgcgtcggcctgcctggaggaggcggcccgggagcgcgacggcctggagcaggcgctgcggaggcgcgagagcgagcacgagagggaggtgcgcgctctgtacgaggagacggagcagcttcgggagcagagccggcgcccgccgagtcagaacttcgcccgcggggagcggagaagccgtctggagctggagctgcagagccgcgagcaggacctggaacgcgcgggcctgcggcagcgggagagacgtggtcgccgtctccaggaacatgcagaaagagaaagtcagcctgctacggcaactggagctgctcagggagctgaatacacggctgcgggatgacagggacgcctgcgaggccaggcgggcgggcagcagctgcaggaaggctctgacaacagcccgcctgcctgggcccacctgctgctgctgctgttgctgggctcggccccccagacgcggctctggccaccttcccagtgcccggtgaccagccccgagtgactcacggaccatgagctagaagctgcccttgcaggaggcttgtcatgggtcgggggtgcccactcaggatgcaggctctccccagtgggccccaggctcgcctgactgaagacatgaaggacctagcctaggagtggtcagggtcccgggagtggccagggtcccgtgtgtgccctctgccagtcttcgctctgtccccgttcaatcaaccccatctcagttcagcagaaaaccccctcgtcaaataaaacccactgactgcactgcgaaaaaaaaaaaaaaaaaa

SEQ ID NO: 1236 - protein, 294 aa, Homo sapiens
MASPGKPGADEAQEEEGELEGGSAGPRAAILEQAEELFLLCDKEAKGFITKHDLQGLQSDLPLTPEQLEAVFESLDRAHTGFLTAREFCLGLGMFVGVASAQGANPCRTPEETFESGGLDVQGTAGSLDEEEEEEERFHTVLEQLGVAPVLGKQRAVRTLWARLQRERPELLGSFEDVLIRASACLEEAARERDGLEQALRRRESEHEREVRALYEETEQLREQSRRPPSQNFARGERRSRLELELQSREQDLERAGLRQRERRGRRLQEHAERESQPATATGAAQGAEYTAAG

SEQ ID NO: 1237 - DNA, 1508 bp, Homo sapiens
attctcagcgctgggagccgccgcccccgcagctgctgccgccgccgccagggcccggactcggacgcgtgccccaggatgggtgagttcaacgagaagaagacaacatgtggcaccgtttgcctcaagtacctgctgtttacctacaattgctgcttctggctggctggcctggctgtcatggcagtgggcatctggacgctggccctcaagagtgactacatcagcctgctggcctcaggcacctacctggccacagcctacatcctggtggtggcgggcactgtcgtcatggtgactggggtcttgggctgctgcgccaccttcaaggagcgtcggaacctgctgcgcctgtacttcatcctgctcctcatcatctttctgctggagatcatcgctggtatcctcgcctacgcctactaccagcagctgaacacggagctcaaggagaacctgaaggacaccatgaccaagcgctaccaccagccgggccatgaggctgtgaccagcgctgtggaccagctgcagcaggagttccactgctgtggcagcaacaactcacaggactggcgagacagtgagtggatccgctcacaggaggccggtggccgtgtggtcccagacagctgctgcaagacggtggtggctctttgtgggcagcgagaccatgcctccaacatctacaaggtggagggcggctgcatcaccaagttggagaccttcatccaggagcacctgagggtcattggggctgtggggatcggcattgcctgtgtgcaggtctttggcatgatcttcacgtgctgcctgtacaggagtctcaagctggagcactactgaccctgccttgggccttgctgctgctgcacccaactactgagctgagaccactgagtaccaggggctgggctccctgatgacacccaccctgtgccatcaccataacctctggggaccccaacctcagaggcagcttcaagtgccttttgctgcgcaccaatgcccagcaggggaggtgaggggggctggcggggcgaagtttggggggtgttttgtggggctccccagacacactctctgcctggtggtcagatgcaggttggaaggggccttgctgagtggcgcaaggccgagcgttcccagcagggggagaaacccttcacaccccaggcccttcaggaactggggccttgccttgcagccacatggccccatcccagttggggaagccaggtgagctctgacccttgggcctgggcctctgcccctcccaacccagccctcgtctccctcgacagcgcccctgctgtcttccccaccgcagtcaccaccacccgaaatgccacgtggtcactgtgcactgccctgttcatgtgcctctgcggggcagggccttcctggttttgttcactgctgtacccagatgcctacaaccatccctgccacatacaggtgctcaataaacacttgtagagcagatggaaaaaaaaaaaaaaaaaaaaaaaaaa

SEQ ID NO: 1238 - protein, 253 aa, Homo sapiens
MGEFNEKKTTCGTVCLKYLLFTYNCCFWLAGLAVMAVGIWTLALKSDYISLLASGTYLATAYILVVAGTVVMVTGVLGCCATFKERRNLLRLYFILLLIIFLLEIIAGILAYAYYQQLNTELKENLKDTMTKRYHQPGHEAVTSAVDQLQQEFHCCGSNNSQDWRDSEWIRSQEAGGRVVPDSCCKTVVALCGQRDHASNIYKVEGGCITKLETFIQEHLRVIGAVGIGIACVQVFGMIFTCCLYRSLKLEHY

SEQ ID NO: 1239 - DNA, 1574 bp, Homo sapiens
attctcagcgctgggagccgccgcccccgcagctgctgccgccgccgccagggcccggactcggacgcgtggtagcctagagtcctggggagcttctgtccacctgtcctgcagaggagtcgtttccagcccggctgccccaggatgggtgagttcaacgagaagaagacaacatgtggcaccgtttgcctcaagtacctgctgtttacctacaattgctgcttctggctggctggcctggctgtcatggcagtgggcatctggacgctggccctcaagagtgactacatcagcctgctggcctcaggcacctacctggccacagcctacatcctggtggtggcgggcactgtcgtcatggtgactggggtcttgggctgctgcgccaccttcaaggagcgtcggaacctgctgcgcctgtacttcatcctgctcctcatcatctttctgctggagatcatcgctggtatcctcgcctacgcctactaccagcagctgaacacggagctcaaggagaacctgaaggacaccatgaccaagcgctaccaccagccgggccatgaggctgtgaccagcgctgtggaccagctgcagcaggagttccactgctgtggcagcaacaactcacaggactggcgagacagtgagtggatccgctcacaggaggccggtggccgtgtggtcccagacagctgctgcaagacggtggtggctctttgtgggcagcgagaccatgcctccaacatctacaaggtggagggcggctgcatcaccaagttggagaccttcatccaggagcacctgagggtcattggggctgtggggatcggcattgcctgtgtgcaggtctttggcatgatcttcacgtgctgcctgtacaggagtctcaagctggagcactactgaccctgccttgggccttgctgctgctgcacccaactactgagctgagaccactgagtaccaggggctgggctccctgatgacacccaccctgtgccatcaccataacctctggggaccccaacctcagaggcagcttcaagtgccttttgctgcgcaccaatgcccagcaggggaggtgaggggggctggcggggcgaagtttggggggtgttttgtggggctccccagacacactctctgcctggtggtcagatgcaggttggaaggggccttgctgagtggcgcaaggccgagcgttcccagcagggggagaaacccttcacaccccaggcccttcaggaactggggccttgccttgcagccacatggccccatcccagttggggaagccaggtgagctctgacccttgggcctgggcctctgcccctcccaacccagccctcgtctccctcgacagcgcccctgctgtcttccccaccgcagtcaccaccacccgaaatgccacgtggtcactgtgcactgccctgttcatgtgcctctgcggggcagggccttcctggttttgttcactgctgtacccagatgcctacaaccatccctgccacatacaggtgctcaataaacacttgtagagcagatggaaaaaaaaaaaaaaaaaaaaaaaaaa

SEQ ID NO: 1240 - protein, 253 aa, Homo sapiens; identical to SEQ ID NO: 1238

SEQ ID NO: 1241 - DNA, 1570 bp, Homo sapiens
attctcagcgctgggagccgccgcccccgcagctgctgccgccgccgccagggcccggactcggacgcgtgcctagagtcctggggagcttctgtccacctgtcctgcagaggagtcgtttccagcccggctgccccaggatgggtgagttcaacgagaagaagacaacatgtggcaccgtttgcctcaagtacctgctgtttacctacaattgctgcttctggctggctggcctggctgtcatggcagtgggcatctggacgctggccctcaagagtgactacatcagcctgctggcctcaggcacctacctggccacagcctacatcctggtggtggcgggcactgtcgtcatggtgactggggtcttgggctgctgcgccaccttcaaggagcgtcggaacctgctgcgcctgtacttcatcctgctcctcatcatctttctgctggagatcatcgctggtatcctcgcctacgcctactaccagcagctgaacacggagctcaaggagaacctgaaggacaccatgaccaagcgctaccaccagccgggccatgaggctgtgaccagcgctgtggaccagctgcagcaggagttccactgctgtggcagcaacaactcacaggactggcgagacagtgagtggatccgctcacaggaggccggtggccgtgtggtcccagacagctgctgcaagacggtggtggctctttgtgggcagcgagaccatgcctccaacatctacaaggtggagggcggctgcatcaccaagttggagaccttcatccaggagcacctgagggtcattggggctgtggggatcggcattgcctgtgtgcaggtctttggcatgatcttcacgtgctgcctgtacaggagtctcaagctggagcactactgaccctgccttgggccttgctgctgctgcacccaactactgagctgagaccactgagtaccaggggctgggctccctgatgacacccaccctgtgccatcaccataacctctggggaccccaacctcagaggcagcttcaagtgccttttgctgcgcaccaatgcccagcaggggaggtgaggggggctggcggggcgaagtttggggggtgttttgtggggctccccagacacactctctgcctggtggtcagatgcaggttggaaggggccttgctgagtggcgcaaggccgagcgttcccagcagggggagaaacccttcacaccccaggcccttcaggaactggggccttgccttgcagccacatggccccatcccagttggggaagccaggtgagctctgacccttgggcctgggcctctgcccctcccaacccagccctcgtctccctcgacagcgcccctgctgtcttccccaccgcagtcaccaccacccgaaatgccacgtggtcactgtgcactgccctgttcatgtgcctctgcggggcagggccttcctggttttgttcactgctgtacccagatgcctacaaccatccctgccacatacaggtgctcaataaacacttgtagagcagatggaaaaaaaaaaaaaaaaaaaaaaaaaa

SEQ ID NO: 1242 - protein, 253 aa, Homo sapiens; identical to SEQ ID NO: 1238

SEQ ID NO: 1243 - DNA, 1512 bp, Homo sapiens
attctcagcgctgggagccgccgcccccgcagctgctgccgccgccgccagggcccggactcggacgcgtggtagccccaggatgggtgagttcaacgagaagaagacaacatgtggcaccgtttgcctcaagtacctgctgtttacctacaattgctgcttctggctggctggcctggctgtcatggcagtgggcatctggacgctggccctcaagagtgactacatcagcctgctggcctcaggcacctacctggccacagcctacatcctggtggtggcgggcactgtcgtcatggtgactggggtcttgggctgctgcgccaccttcaaggagcgtcggaacctgctgcgcctgtacttcatcctgctcctcatcatctttctgctggagatcatcgctggtatcctcgcctacgcctactaccagcagctgaacacggagctcaaggagaacctgaaggacaccatgaccaagcgctaccaccagccgggccatgaggctgtgaccagcgctgtggaccagctgcagcaggagttccactgctgtggcagcaacaactcacaggactggcgagacagtgagtggatccgctcacaggaggccggtggccgtgtggtcccagacagctgctgcaagacggtggtggctctttgtgggcagcgagaccatgcctccaacatctacaaggtggagggcggctgcatcaccaagttggagaccttcatccaggagcacctgagggtcattggggctgtggggatcggcattgcctgtgtgcaggtctttggcatgatcttcacgtgctgcctgtacaggagtctcaagctggagcactactgaccctgccttgggccttgctgctgctgcacccaactactgagctgagaccactgagtaccaggggctgggctccctgatgacacccaccctgtgccatcaccataacctctggggaccccaacctcagaggcagcttcaagtgccttttgctgcgcaccaatgcccagcaggggaggtgaggggggctggcggggcgaagtttggggggtgttttgtggggctccccagacacactctctgcctggtggtcagatgcaggttggaaggggccttgctgagtggcgcaaggccgagcgttcccagcagggggagaaacccttcacaccccaggcccttcaggaactggggccttgccttgcagccacatggccccatcccagttggggaagccaggtgagctctgacccttgggcctgggcctctgcccctcccaacccagccctcgtctccctcgacagcgcccctgctgtcttccccaccgcagtcaccaccacccgaaatgccacgtggtcactgtgcactgccctgttcatgtgcctctgcggggcagggccttcctggttttgttcactgctgtacccagatgcctacaaccatccctgccacatacaggtgctcaataaacacttgtagagcagatggaaaaaaaaaaaaaaaaaaaaaaaaaa

SEQ ID NO: 1244 - protein, 253 aa, Homo sapiens; identical to SEQ ID NO: 1238

SEQ ID NO: 1245 - DNA, 927 bp, Homo sapiens
agtctgggacgcgccgccgccatgatcatccctgtacgctgcttcacttgtggcaagatcgtcggcaacaagtgggaggcttacctggggctgctgcaggccgagtacaccgagggggacgcgctggatgccctgggcctgaagcgctactgctgccgccggatgctgctggcccacgtggacctgatcgagaagctgctcaattatgcacccctggagaagtgaccacgctgaaacccacccacccgctgtgctgaccatgggccctgagcgtcctaccccgaattcacgaggctgaggcatccgggagctggcgtaatgcctggccgcagtgtgtgtgtatcccataccccactctggaaggaaccatccagtaaaggtctttcagaaccactaaggtcccagccctcactaggatgtcaggagccaggtctaggcccagctttcacactgtggcagcccagtgaagcagactgggccatgaactctcctagccctggggccagcctgttccacaggcacccctgcaggaggcgctgccaggagagccttccatctcggggctctttgaggttccctccttctgggtgttcttcaggctgagcagagaggctcctgtaccctctctctcggaatctgaagagccagatttaggccgggcaaaggggctcacccctataatcccaggactttgggaggccaaggcaggaggatcacttgagtccagaaattcaagacccgcctgggcatcataatgagaccccatctctacaacaaaatttaataaattagctgggcacagtgttcacacctgtagtcccggccactcagggggctgaggcaggaggatcactggaacctgggaggttgccactgcaaaaaaaaaaaaaaaaaaaaaaaaaaaaaaaaaaaaaaaaaaaaaaaaaa

SEQ ID NO: 1246 - protein, 67 aa, Homo sapiens
MIIPVRCFTCGKIVGNKWEAYLGLLQAEYTEGDALDALGLKRYCCRRMLLAHVDLIEKLLNYAPLEK

SEQ ID NO: 1247 - DNA, 1443 bp, Homo sapiens
tggacgcacatcctgctctgggcagaagggcaggacaggggccctgagtaacggtggcctggggtcagagccaggttcagctgcgaggctgctggtggctgtggagagcttggggcttccttggtcgcacccaccacctgcctgcccactggtcagccttcagggaccctgagcaccgcctggtctctttcctgtggccagcccagaactgaagcgctgcggcatggcgcgcgcctgcctccaggccgtcaagtacctcatgttcgccttcaacctgctcttctggctgggaggctgtggcgtgctgggtgtcggcatctggctggccgccacacaggggagcttcgccacgctgtcctcttccttcccgtccctgtcggctgccaacttgctcatcatcaccggcgcctttgtcatggccatcggcttcgtgggctgcctgggtgccatcaaggagaacaagtgcctcctgctcactttcttcctgctgctgctgctggtgttcctgctggaggccaccatcgccatcctcttcttcgcctacacggacaagattgacaggtatgcccagcaagacctgaagaaaggcttgcacctgtacggcacgcagggcaacgtgggcctcaccaacgcctggagcatcatccagaccgacttccgctgctgtggcgtctccaactacactgactggttcgaggtgtacaacgccacgcgggtacctgactcctgctgcttggagttcagtgagagctgtgggctgcacgcccccggcacctggtggaaggcgccgtgctacgagacggtgaaggtgtggcttcaggagaacctgctggctgtgggcatctttgggctgtgcacggcgctggtgcagatcctgggcctgaccttcgccatgaccatgtactgccaagtggtcaaggcagacacctactgcgcgtaggccgcccaccgcccgcttctctgccaaaaggacgcccacggggagatggccgcacccacagctgcctttcccaccaccagcctcggtgctctgccccatgctgggaggagggagggagggacaggtgcctggagcccccggaaccctgtttctggaaggccctagctcaggtggcttcagggcctccggaccccccctgggaggggtggccacgtgctggctgcggaacccagggcaggggtgggaggggcctccagcactttttatatttacgtattctccaaagcagtgttcacacgggagccagcctgtggcccccagcctcctggaaaacaggttggcgctggaggagccgggtcttggcatcctggaggtggccccactggtcctggtgctccaggcggggccgtggacccctcacctacattccatagtgggcccgtggggctcctggtgcatcttaataaagtgtgagcagcaaccttgaaaaaaaaaaaaaaaaa

SEQ ID NO: 1248 - protein, 238 aa, Homo sapiens
MARACLQAVKYLMFAFNLLFWLGGCGVLGVGIWLAATQGSFATLSSSFPSLSAANLLIITGAFVMAIGFVGCLGAIKENKCLLLTFFLLLLLVFLLEATIAILFFAYTDKIDRYAQQDLKKGLHLYGTQGNVGLTNAWSIIQTDFRCCGVSNYTDWFEVYNATRVPDSCCLEFSESCGLHAPGTWWKAPCYETVKVWLQENLLAVGIFGLCTALVQILGLTFAMTMYCQVVKADTYCA

SEQ ID NO: 1249 - DNA, 1442 bp, Homo sapiens
cgtgcggccagggtcccgtggccggaggtgtccgaccgggagcggctggagccggacgcgagcggggcgcgcgagttcgagcccagagccgacacgcagcaacaaagcttggggcttccttggtcgcacccaccacctgcctgcccactggtcagccttcagggaccctgagcaccgcctggtctctttcctgtggccagcccagaactgaagcgctgcggcatggcgcgcgcctgcctccaggccgtcaagtacctcatgttcgccttcaacctgctcttctggctgggaggctgtggcgtgctgggtgtcggcatctggctggccgccacacaggggagcttcgccacgctgtcctcttccttcccgtccctgtcggctgccaacttgctcatcatcaccggcgcctttgtcatggccatcggcttcgtgggctgcctgggtgccatcaaggagaacaagtgcctcctgctcactttcttcctgctgctgctgctggtgttcctgctggaggccaccatcgccatcctcttcttcgcctacacggacaagattgacaggtatgcccagcaagacctgaagaaaggcttgcacctgtacggcacgcagggcaacgtgggcctcaccaacgcctggagcatcatccagaccgacttccgctgctgtggcgtctccaactacactgactggttcgaggtgtacaacgccacgcgggtacctgactcctgctgcttggagttcagtgagagctgtgggctgcacgcccccggcacctggtggaaggcgccgtgctacgagacggtgaaggtgtggcttcaggagaacctgctggctgtgggcatctttgggctgtgcacggcgctggtgcagatcctgggcctgaccttcgccatgaccatgtactgccaagtggtcaaggcagacacctactgcgcgtaggccgcccaccgcccgcttctctgccaaaaggacgcccacggggagatggccgcacccacagctgcctttcccaccaccagcctcggtgctctgccccatgctgggaggagggagggagggacaggtgcctggagcccccggaaccctgtttctggaaggccctagctcaggtggcttcagggcctccggaccccccctgggaggggtggccacgtgctggctgcggaacccagggcaggggtgggaggggcctccagcactttttatatttacgtattctccaaagcagtgttcacacgggagccagcctgtggcccccagcctcctggaaaacaggttggcgctggaggagccgggtcttggcatcctggaggtggccccactggtcctggtgctccaggcggggccgtggacccctcacctacattccatagtgggcccgtggggctcctggtgcatcttaataaagtgtgagcagcaaccttgaaaaaaaaaaaaaaaaa

SEQ ID NO: 1250 - protein, 238 aa, Homo sapiens; identical to SEQ ID NO: 1248

SEQ ID NO: 1251 - DNA, 1447 bp, Homo sapiens
cgtgcggccagggtcccgtggccggaggtgtccgaccgggagcggctggagccggacgcgagcggggcgcgcgagttcgagcccagagccgacacgcagcaacaagtgggagcttggggcttccttggtcgcacccaccacctgcctgcccactggtcagccttcagggaccctgagcaccgcctggtctctttcctgtggccagcccagaactgaagcgctgcggcatggcgcgcgcctgcctccaggccgtcaagtacctcatgttcgccttcaacctgctcttctggctgggaggctgtggcgtgctgggtgtcggcatctggctggccgccacacaggggagcttcgccacgctgtcctcttccttcccgtccctgtcggctgccaacttgctcatcatcaccggcgcctttgtcatggccatcggcttcgtgggctgcctgggtgccatcaaggagaacaagtgcctcctgctcactttcttcctgctgctgctgctggtgttcctgctggaggccaccatcgccatcctcttcttcgcctacacggacaagattgacaggtatgcccagcaagacctgaagaaaggcttgcacctgtacggcacgcagggcaacgtgggcctcaccaacgcctggagcatcatccagaccgacttccgctgctgtggcgtctccaactacactgactggttcgaggtgtacaacgccacgcgggtacctgactcctgctgcttggagttcagtgagagctgtgggctgcacgcccccggcacctggtggaaggcgccgtgctacgagacggtgaaggtgtggcttcaggagaacctgctggctgtgggcatctttgggctgtgcacggcgctggtgcagatcctgggcctgaccttcgccatgaccatgtactgccaagtggtcaaggcagacacctactgcgcgtaggccgcccaccgcccgcttctctgccaaaaggacgcccacggggagatggccgcacccacagctgcctttcccaccaccagcctcggtgctctgccccatgctgggaggagggagggagggacaggtgcctggagcccccggaaccctgtttctggaaggccctagctcaggtggcttcagggcctccggaccccccctgggaggggtggccacgtgctggctgcggaacccagggcaggggtgggaggggcctccagcactttttatatttacgtattctccaaagcagtgttcacacgggagccagcctgtggcccccagcctcctggaaaacaggttggcgctggaggagccgggtcttggcatcctggaggtggccccactggtcctggtgctccaggcggggccgtggacccctcacctacattccatagtgggcccgtggggctcctggtgcatcttaataaagtgtgagcagcaaccttgaaaaaaaaaaaaaaaaa

SEQ ID NO: 1252 - protein, 238 aa, Homo sapiens; identical to SEQ ID NO: 1248

SEQ ID NO: 1253 - DNA, 1479 bp, Homo sapiens
actgccccagcctcaggctctgtgcatctcccccgagcccccaccacatatgtgcggaggcccctgggggcccaggcctgtcctcagtcccgactgggctctacctgaggaccctggggagcctgggcctggccctcctcagagcttggggcttccttggtcgcacccaccacctgcctgcccactggtcagccttcagggaccctgagcaccgcctggtctctttcctgtggccagcccagaactgaagcgctgcggcatggcgcgcgcctgcctccaggccgtcaagtacctcatgttcgccttcaacctgctcttctggctgggaggctgtggcgtgctgggtgtcggcatctggctggccgccacacaggggagcttcgccacgctgtcctcttccttcccgtccctgtcggctgccaacttgctcatcatcaccggcgcctttgtcatggccatcggcttcgtgggctgcctgggtgccatcaaggagaacaagtgcctcctgctcactttcttcctgctgctgctgctggtgttcctgctggaggccaccatcgccatcctcttcttcgcctacacggacaagattgacaggtatgcccagcaagacctgaagaaaggcttgcacctgtacggcacgcagggcaacgtgggcctcaccaacgcctggagcatcatccagaccgacttccgctgctgtggcgtctccaactacactgactggttcgaggtgtacaacgccacgcgggtacctgactcctgctgcttggagttcagtgagagctgtgggctgcacgcccccggcacctggtggaaggcgccgtgctacgagacggtgaaggtgtggcttcaggagaacctgctggctgtgggcatctttgggctgtgcacggcgctggtgcagatcctgggcctgaccttcgccatgaccatgtactgccaagtggtcaaggcagacacctactgcgcgtaggccgcccaccgcccgcttctctgccaaaaggacgcccacggggagatggccgcacccacagctgcctttcccaccaccagcctcggtgctctgccccatgctgggaggagggagggagggacaggtgcctggagcccccggaaccctgtttctggaaggccctagctcaggtggcttcagggcctccggaccccccctgggaggggtggccacgtgctggctgcggaacccagggcaggggtgggaggggcctccagcactttttatatttacgtattctccaaagcagtgttcacacgggagccagcctgtggcccccagcctcctggaaaacaggttggcgctggaggagccgggtcttggcatcctggaggtggccccactggtcctggtgctccaggcggggccgtggacccctcacctacattccatagtgggcccgtggggctcctggtgcatcttaataaagtgtgagcagcaaccttgaaaaaaaaaaaaaaaaa

SEQ ID NO: 1254 - protein, 238 aa, Homo sapiens; identical to SEQ ID NO: 1248

SEQ ID NO: 1255 - DNA, 1329 bp, Homo sapiens
aaagctgcggcggcggttcgcgtttctcgtgtccgcttgactgacagctgcgcggcgggagcgggcggcgcgagcgggaggcggcggcgcagaactgaagcgctgcggcatggcgcgcgcctgcctccaggccgtcaagtacctcatgttcgccttcaacctgctcttctggctgggaggctgtggcgtgctgggtgtcggcatctggctggccgccacacaggggagcttcgccacgctgtcctcttccttcccgtccctgtcggctgccaacttgctcatcatcaccggcgcctttgtcatggccatcggcttcgtgggctgcctgggtgccatcaaggagaacaagtgcctcctgctcactttcttcctgctgctgctgctggtgttcctgctggaggccaccatcgccatcctcttcttcgcctacacggacaagattgacaggtatgcccagcaagacctgaagaaaggcttgcacctgtacggcacgcagggcaacgtgggcctcaccaacgcctggagcatcatccagaccgacttccgctgctgtggcgtctccaactacactgactggttcgaggtgtacaacgccacgcgggtacctgactcctgctgcttggagttcagtgagagctgtgggctgcacgcccccggcacctggtggaaggcgccgtgctacgagacggtgaaggtgtggcttcaggagaacctgctggctgtgggcatctttgggctgtgcacggcgctggtgcagatcctgggcctgaccttcgccatgaccatgtactgccaagtggtcaaggcagacacctactgcgcgtaggccgcccaccgcccgcttctctgccaaaaggacgcccacggggagatggccgcacccacagctgcctttcccaccaccagcctcggtgctctgccccatgctgggaggagggagggagggacaggtgcctggagcccccggaaccctgtttctggaaggccctagctcaggtggcttcagggcctccggaccccccctgggaggggtggccacgtgctggctgcggaacccagggcaggggtgggaggggcctccagcactttttatatttacgtattctccaaagcagtgttcacacgggagccagcctgtggcccccagcctcctggaaaacaggttggcgctggaggagccgggtcttggcatcctggaggtggccccactggtcctggtgctccaggcggggccgtggacccctcacctacattccatagtgggcccgtggggctcctggtgcatcttaataaagtgtgagcagcaaccttgaaaaaaaaaaaaaaaaa

SEQ ID NO: 1256 - protein, 238 aa, Homo sapiens; identical to SEQ ID NO: 1248

SEQ ID NO: 1257 - DNA, 1349 bp, Homo sapiens
aaagctgcggcggcggttcgcgtttctcgtgtccgcttgactgacagctgcgcggcgggagcgggcggcgcgagcgggaggcggcggcgcagagcttggggcttccttggtcgcacccaccacctgcctgcccactggtcagccttcagggaccctgagcaccgcctggtctctttcctgtggccagcccagctgggaggctgtggcgtgctgggtgtcggcatctggctggccgccacacaggggagcttcgccacgctgtcctcttccttcccgtccctgtcggctgccaacttgctcatcatcaccggcgcctttgtcatggccatcggcttcgtgggctgcctgggtgccatcaaggagaacaagtgcctcctgctcactttcttcctgctgctgctgctggtgttcctgctggaggccaccatcgccatcctcttcttcgcctacacggacaagattgacaggtatgcccagcaagacctgaagaaaggcttgcacctgtacggcacgcagggcaacgtgggcctcaccaacgcctggagcatcatccagaccgacttccgctgctgtggcgtctccaactacactgactggttcgaggtgtacaacgccacgcgggtacctgactcctgctgcttggagttcagtgagagctgtgggctgcacgcccccggcacctggtggaaggcgccgtgctacgagacggtgaaggtgtggcttcaggagaacctgctggctgtgggcatctttgggctgtgcacggcgctggtgcagatcctgggcctgaccttcgccatgaccatgtactgccaagtggtcaaggcagacacctactgcgcgtaggccgcccaccgcccgcttctctgccaaaaggacgcccacggggagatggccgcacccacagctgcctttcccaccaccagcctcggtgctctgccccatgctgggaggagggagggagggacaggtgcctggagcccccggaaccctgtttctggaaggccctagctcaggtggcttcagggcctccggaccccccctgggaggggtggccacgtgctggctgcggaacccagggcaggggtgggaggggcctccagcactttttatatttacgtattctccaaagcagtgttcacacgggagccagcctgtggcccccagcctcctggaaaacaggttggcgctggaggagccgggtcttggcatcctggaggtggccccactggtcctggtgctccaggcggggccgtggacccctcacctacattccatagtgggcccgtggggctcctggtgcatcttaataaagtgtgagcagcaaccttgaaaaaaaaaaaaaaaaa

SEQ ID NO: 1258 - protein, 174 aa, Homo sapiens
MAIGFVGCLGAIKENKCLLLTFFLLLLLVFLLEATIAILFFAYTDKIDRYAQQDLKKGLHLYGTQGNVGLTNAWSIIQTDFRCCGVSNYTDWFEVYNATRVPDSCCLEFSESCGLHAPGTWWKAPCYETVKVWLQENLLAVGIFGLCTALVQILGLTFAMTMYCQVVKADTYCA

SEQ ID NO: 1259 - DNA, 1429 bp, Homo sapiens
aaagctgcggcggcggttcgcgtttctcgtgtccgcttgactgacagctgcgcggcgggagcgggcggcgcgagcgggaggcggcggcgcagagcttggggcttccttggtcgcacccaccacctgcctgcccactggtcagccttcagggaccctgagcaccgcctggtctctttcctgtggccagcccagaactgaagcgctgcggcatggcgcgcgcctgcctccaggccgtcaagtacctcatgttcgccttcaacctgctcttctggctgggaggctgtggcgtgctgggtgtcggcatctggctggccgccacacaggggagcttcgccacgctgtcctcttccttcccgtccctgtcggctgccaacttgctcatcatcaccggcgcctttgtcatggccatcggcttcgtgggctgcctgggtgccatcaaggagaacaagtgcctcctgctcactttcttcctgctgctgctgctggtgttcctgctggaggccaccatcgccatcctcttcttcgcctacacggacaagattgacaggtatgcccagcaagacctgaagaaaggcttgcacctgtacggcacgcagggcaacgtgggcctcaccaacgcctggagcatcatccagaccgacttccgctgctgtggcgtctccaactacactgactggttcgaggtgtacaacgccacgcgggtacctgactcctgctgcttggagttcagtgagagctgtgggctgcacgcccccggcacctggtggaaggcgccgtgctacgagacggtgaaggtgtggcttcaggagaacctgctggctgtgggcatctttgggctgtgcacggcgctggtgcagatcctgggcctgaccttcgccatgaccatgtactgccaagtggtcaaggcagacacctactgcgcgtaggccgcccaccgcccgcttctctgccaaaaggacgcccacggggagatggccgcacccacagctgcctttcccaccaccagcctcggtgctctgccccatgctgggaggagggagggagggacaggtgcctggagcccccggaaccctgtttctggaaggccctagctcaggtggcttcagggcctccggaccccccctgggaggggtggccacgtgctggctgcggaacccagggcaggggtgggaggggcctccagcactttttatatttacgtattctccaaagcagtgttcacacgggagccagcctgtggcccccagcctcctggaaaacaggttggcgctggaggagccgggtcttggcatcctggaggtggccccactggtcctggtgctccaggcggggccgtggacccctcacctacattccatagtgggcccgtggggctcctggtgcatcttaataaagtgtgagcagcaaccttgaaaaaaaaaaaaaaaaa

SEQ ID NO: 1260 - protein, 238 aa, Homo sapiens; identical to SEQ ID NO: 1248

SEQ ID NO: 1261 - DNA, 2736 bp, Homo sapiens
gcgttttccggccgtgcgtttgtggccgtccggcctccctgacatgcagccctctggaccccgaggttggaccctactgtgacacacctaccatgcggacactcttcaacctcctctggcttgccctggcctgcagccctgttcacactaccctgtcaaagtcagatgccaaaaaagccgcctcaaagacgctgctggagaagagtcagttttcagataagccggtgcaagaccggggtttggtggtgacggacctcaaagctgagagtgtggttcttgagcatcgcagctactgctcggcaaaggcccgggacagacactttgctggggatgtactgggctatgtcactccatggaacagccatggctacgatgtcaccaaggtctttgggagcaagttcacacagatctcacccgtctggctgcagctgaagagacgtggccgtgagatgtttgaggtcacgggcctccacgacgtggaccaagggtggatgcgagctgtcaggaagcatgccaagggcctgcacatagtgcctcggctcctgtttgaggactggacttacgatgatttccggaacgtcttagacagtgaggatgagatagaggagctgagcaagaccgtggtccaggtggcaaagaaccagcatttcgatggcttcgtggtggaggtctggaaccagctgctaagccagaagcgcgtgggcctcatccacatgctcacccacttggccgaggctctgcaccaggcccggctgctggccctcctggtcatcccgcctgccatcacccccgggaccgaccagctgggcatgttcacgcacaaggagtttgagcagctggcccccgtgctggatggtttcagcctcatgacctacgactactctacagcgcatcagcctggccctaatgcacccctgtcctgggttcgagcctgcgtccaggtcctggacccgaagtccaagtggcgaagcaaaatcctcctggggctcaacttctatggtatggactacgcgacctccaaggatgcccgtgagcctgttgtcggggccaggtacatccagacactgaaggaccacaggccccggatggtgtggggcagccaggcctcagagcacttcttcgagtacaagaagagccgcagtgggaggcacgtcgtcttctacccaaccctgaagtccctgcaggtgcggctggagctggcccgggagctgggcgttggggtctctatctgggagctgggccagggcctggactacttctacgacctgctctaggtgggcattgcggcctccgcggtggacgtgttcttttctaagccatggagtgagtgagcaggtgtgaaatacaggcctccactccgtttgctgtgacgggtctgctgcagtcctcagtcgggggtcctgggcaccatgtgactccccatcctcccatgaggggtccctgccctggatgagtcctagctgggggacaccctgagagctcgagcccctcccacccgggcatccgctggctgcctcctgtcagctgggcaggcggggcccacagtacctgccccaccaggacagcctggctcaggcctttctgggctgcttctcacatcctgggctggatgtgggtttggaagctctggaaccatcccggactcgcccactcctggattcgagggccctcgcagggacagctctgcccagcatcaccccagggcctggcagtgatagagctgagagctccacccccacatacctgccacccacctggccagccacagcacgtgtgtcacctgcagagagccacccagacgtccccaccgagcccagcacggcaagggtgcaggggctgccctagaaatggactcagaggagcctggcccaccctcttgaaactggtcctggaccttggctcagctctgccgcctcaggtagcacgacccccaggccagcctggacacatcagggagcatggtgaggggcaacggcaggacccgtgggccatatcgggacaggcatttccagcgaggggtggggcagaggacatgtggctggcaggctacacccaccctgccatgcagcggtgtccaggctctggggaggccctggggaatttggaggcatcatgagccaaggcctggtggccctcgttcccctgcccctcgtcaccatcctgtccttggctggccgtgaggactcccctcctcaccactgggtcccacagggctgaggtgggcagtagagggcataggtgggtacatgtcccgggcaaggtctctcggggggacagaagtgagtccagggagtgggtgggcctgggcgtccctcactcagaatgccgtggggtgaggacggtgaggacagggtgggcactgggttctggtttagagtcagtaatgttagggcgcagtgggcagggggtcaggacatctccagccggtggtgaggaagcatggtggggtctcctccacaggacgggagctggggagggggtcctgggtcggacccaaggcacccacacttgagaaagcctccgcctggacgtcagggaggcctgcgagctgccacagtgcaggtgcagccgttcccaccgccctgctgctgcttgacacgggcataggagatacaagtggtgtgtgcggcggttcatgcctgtaatcccagtactttggaaagccgtggcgggaggaacgctgggcaacatggtgaaaccccgtctctaccccctaaaaatagaaagattagcaag

SEQ ID NO: 1262 - protein, 393 aa, Homo sapiens
MRTLFNLLWLALACSPVHTTLSKSDAKKAASKTLLEKSQFSDKPVQDRGLVVTDLKAESVVLEHRSYCSAKARDRHFAGDVLGYVTPWNSHGYDVTKVFGSKFTQISPVWLQLKRRGREMFEVTGLHDVDQGWMRAVRKHAKGLHIVPRLLFEDWTYDDFRNVLDSEDEIEELSKTVVQVAKNQHFDGFVVEVWNQLLSQKRVGLIHMLTHLAEALHQARLLALLVIPPAITPGTDQLGMFTHKEFEQLAPVLDGFSLMTYDYSTAHQPGPNAPLSWVRACVQVLDPKSKWRSKILLGLNFYGMDYATSKDAREPVVGARYIQTLKDHRPRMVWGSQASEHFFEYKKSRSGRHVVFYPTLKSLQVRLELARELGVGVSIWELGQGLDYFYDLL

SEQ ID NO: 1263 - DNA, 4616 bp, Homo sapiens
gcgccgtacgtgcgcgcgcgcggcggcccagaaagcggcgctgggaccctgaggcggccgtggttaggcggctccccggcggctcctccgcggcggtgacggcgaccgcactccccgcttcccgctccccgcgctcctccgcccgggtccgccagccgaggccgctcccgagcgtcggaagatgccggccgtgtccaagggggacgggatgcggggcctggcggtcttcatctcggatatccgcaactgtaaaagtaaagaagcagaaataaaaaggataaacaaggaactggcaaatatcagatcaaaatttaaaggtgacaaggctcttgatggctatagtaaaaaaaagtacgtctgcaagttgctcttcatctttctccttggtcatgacattgactttggacacatggaggctgtgaacctgctgagttcaaacagatacacggaaaagcagatcggctaccttttcatctctgtgttggtgaactcaaacagtgagctgatccgcctgatcaacaacgccatcaagaatgacctggccagccgcaaccccaccttcatgggcctggccctgcactgcatcgccagcgtgggcagccgggagatggccgaggccttcgccggggagatccctaaggtcctcgtagccggagacactatggacagcgtgaagcagagcgcggccctgtgcttgctgcgcctgtacaggacgtcccccgatcttgtccccatgggcgactggacatcccgagtggtgcacctgctcaatgaccagcacttgggtgtggtaactgcagccacaagtctgatcaccactttagcacagaagaacccagaagagtttaaaacctccgtgtctctggctgtctctaggctaagcagaatcgtgacgtctgcatccacagatctccaggattacacttactattttgtcccggctccctggctgtctgtcaaactgctgagactgctgcagtgctacccacccccagaccctgcagtgcgaggccgcctgactgagtgcctggagaccatcctgaacaaagcccaagaaccgcccaagtcgaagaaggtccagcactccaacgcgaagaatgccgtgctcttcgaggccatcagcttaatcattcaccatgacagtgagccgaacctgctcgtccgtgcctgcaaccagttgggccagtttctgcagcaccgcgagaccaacctgcgctacctggccctggagagcatgtgcacgctggccagctctgagttctcccatgaggctgtcaagacgcacatcgagacggtcatcaacgccctgaagactgagcgggacgtgagcgtgcggcagcgggccgtggacctcctctacgccatgtgcgaccgcagcaacgccccacagatcgtggccgagatgctgagctatctggagacagctgactactccatccgagaagagattgtgctgaaggtcgccatcctggctgagaagtacgcggtggactacacctggtatgtggataccatcttgaacttgatccgaattgctggtgattacgtgagtgaagaggtgtggtaccgagtcattcagatcgtcatcaaccgggacgacgtgcagggctacgcggccaagactgtgttcgaggctcttcaggctcccgcgtgccacgagaacctggtcaaagtgggcggctacatcctgggggagtttggaaacttgatagctggagacccgagatccagcccgctgatccagttccacctgctgcactccaagttccacctgtgcagcgtccccacccgcgcgctgctcctgtccacctacatcaagttcgtgaacctcttcccggaggtgaagcccaccatccaggacgtgctgcgcagcgacagccagctcaggaacgcagacgtggagctgcagcagcgtgctgtggagtacctgcggctcagcaccgtggccagcaccgacattctggcgaccgtgctggaggagatgcccccattcccggagcgggagtcctccatcttggcaaagctcaagaagaagaagggccccagcacggtgacagacctggaggacaccaagcgggacaggagtgtggacgtgaacgggggtcctgagcctgccccagccagtaccagcgccgtgtctacgccttctccgtcggcagacctgctgggtctcggggctgccccccctgcccccgcgggccccccaccctcctccggcggcagcgggctgctcgtggacgtgttctcagactcggcctctgtggtcgcgcctctcgctcctggctccgaagacaactttgccaggtttgtttgtaaaaacaatggtgtgttgtttgaaaaccagctgcttcaaattggacttaagtctgaatttcggcagaatttaggtcggatgtttatcttttatggtaataagacctccacgcagttcctaaactttaccccaacactaatctgttcagacgaccttcagcctaacctgaacctgcagaccaagcccgtggacccgaccgtggaggggggcgcgcaggtgcagcaggtggtcaacatagagtgcgtgtccgacttcacggaggcgccagtcctcaacattcagttcaggtatgggggcaccttccagaacgtgtctgtgcagctgcccatcactctcaacaaattcttccagccgacagaaatggcttctcaggatttctttcaacgttggaagcagttgagcaatccacagcaggaagtgcagaacatcttcaaagcaaagcacccaatggacacagaagtcaccaaagccaagatcattggatttggttctgcacttcttgaagaagttgatcctaatcctgcgaatttcgtgggagctggaatcatccacacgaaaaccacccagattggatgcctgctgcgcttggagccgaacctgcaagcccagatgtaccggctcacgctgcgcacaagtaaggaagccgtttctcagagattatgtgaattgctctcagcgcagttttagtcctgaggatggaagaccaggctcgtgtgtcttgtgttgtcttcgtctgtgccgtttgtcttcgtggccatcctgcagatgagcaccgtgtccagtgccacagcacaaggcgcctccccgccccgccgccccacacctctcccctttgggctggacgggaacacacgtgtgtggctcaggaggaaaagctcagcctggactgtggcagccacggcagaaggtggatcttgggatcaatttttataaaaatcgagacagttctgtggttaaatctacaaattaaagggaaattagaagttggcgtgaacgtggcgtttgtgggagtgtcactgagatggcccgtgctgccgcccaccccgcctcggagcctctgggagcagcagtgccactgtgcatggcgtgggctgagccttggtgtgtggccgtcctggtggctgcacacctggcgtcgtcctgggcccttgggaggagcacagctgaccctggttttgctgcagtcccagctggactgttttcccaggcaggattttaatctagaatttagaaacatttgtatttgtaatgacttctggcaaaagcacgtgtcctggccggatgtaactgttctcctttcccagctcctgtttgtgaagggcgtctgttatgctcctgcagtcgccgaggccttggatgtgcagccaggggaggagcgtcctgccggccccgcagggcccccaggactccagggtaaagtgtgggccggtggcgcaagactcagaggtgtgctcgtctctttcctgtcagagtgggcgtccccaggccacggtgcaggcctgagtccttccaccggccccgtccagtcgtccctggaggggctgtggaggagggacgcctctgtgtggtcaggaagtgaaggggccattggccgcatgccatgtgccacctgcggcttgtgtctcacctgtcatctggactcagcacccaggctgcacgtctgacacctgagaggcgagagagtggggccggcctaggagccaaggctggggccttgcgctctgtccccaggatggtggccttgtttgtcctaaacacacccagcacaggttctggcttcctgacatgctgtggaggcagggagggtgggtggccacatgtgcttgagggttttcaccctggccctcagttgcctgctgtgcgggtccctggggcagctgcaggggctcatggacccatcagggtctccacagctcccctgcagtgtgtgcaccccacaatgtctgcggctcttcttccggcgtgtcgggctttgatcacagcatagccacgtcagtggcgtgcgcctctcgcacaggccattctgggtctggtggtgccaggtgccgtgacacgccgtgctgggcttgtgctgcagctgggtggtgtggccctcattctcatgttccagctgctgggcagtgctctgcctgtgtgctgcgcctgcaggctgcgtgtgctgccgtggatctcctgcatcccttgacccctcccgccatcagaggaaaggctgctccccgaggcaccgcttccctgtgcggcgctgcagaggggccctcagtgtggcactcctcgtcaaagaaaaataaaggctagaactgca

SEQ ID NO: 1264 - protein, 939 aa, Homo sapiens
MPAVSKGDGMRGLAVFISDIRNCKSKEAEIKRINKELANIRSKFKGDKALDGYSKKKYVCKLLFIFLLGHDIDFGHMEAVNLLSSNRYTEKQIGYLFISVLVNSNSELIRLINNAIKNDLASRNPTFMGLALHCIASVGSREMAEAFAGEIPKVLVAGDTMDSVKQSAALCLLRLYRTSPDLVPMGDWTSRVVHLLNDQHLGVVTAATSLITTLAQKNPEEFKTSVSLAVSRLSRIVTSASTDLQDYTYYFVPAPWLSVKLLRLLQCYPPPDPAVRGRLTECLETILNKAQEPPKSKKVQHSNAKNAVLFEAISLIIHHDSEPNLLVRACNQLGQFLQHRETNLRYLALESMCTLASSEFSHEAVKTHIETVINALKTERDVSVRQRAVDLLYAMCDRSNAPQIVAEMLSYLETADYSIREEIVLKVAILAEKYAVDYTWYVDTILNLIRIAGDYVSEEVWYRVIQIVINRDDVQGYAAKTVFEALQAPACHENLVKVGGYILGEFGNLIAGDPRSSPLIQFHLLHSKFHLCSVPTRALLLSTYIKFVNLFPEVKPTIQDVLRSDSQLRNADVELQQRAVEYLRLSTVASTDILATVLEEMPPFPERESSILAKLKKKKGPSTVTDLEDTKRDRSVDVNGGPEPAPASTSAVSTPSPSADLLGLGAAPPAPAGPPPSSGGSGLLVDVFSDSASVVAPLAPGSEDNFARFVCKNNGVLFENQLLQIGLKSEFRQNLGRMFIFYGNKTSTQFLNFTPTLICSDDLQPNLNLQTKPVDPTVEGGAQVQQVVNIECVSDFTEAPVLNIQFRYGGTFQNVSVQLPITLNKFFQPTEMASQDFFQRWKQLSNPQQEVQNIFKAKHPMDTEVTKAKIIGFGSALLEEVDPNPANFVGAGIIHTKTTQIGCLLRLEPNLQAQMYRLTLRTSKEAVSQRLCELLSAQF

SEQ ID NO: 1265 - DNA, 11011 bp, Homo sapiens
gttaatatgggcgtccaagcctctgtttcccaggaggaaatttgcaagaggcggcagcccctgagcgcccagagctcttgaaaggccacccaggagaggtgtgagacccggcggcagcatccgtccaggtgggacccgctgagcgccgtggccagtcccccattcccatcccggcaccccaaaggcgcgctcgcccgattgcttcgagttccccgacctggggattttttttttagccgctggtggtgggcgcctcgtgggctaaggcccggcgcctgctctgctacccgcgctgcctttagcggtcgcccccgccgccgctgccagggacgtgctgggaaagcccaagccccgggagaagatgccggccatcctggtcgcctccaaaatgaagtcgggactgcccaaacccgtgcacagcgccgcgcccatcctgcacgtgcccccggcccgggcgggcccccagccctgctacctgaagttgggaagcaaggtggaggtgagcaagaccacctatcctagccagatccccctgaaatcgcaggtgctgcaggggctgcaggagccagcgggggaggggctcccgctgcggaagagcggctcggtggaaaacgggttcgatacccagatctacacagactgggccaatcattacctagccaaatccggccacaagcgtctcatcagggatctccagcaagatgtgacagatggcgtcctcctggcccagattatccaggttgtggcaaatgaaaagattgaagacatcaatggctgtccgaagaacagatcccaaatgattgaaaacatagatgcctgcttgaatttcctggcagctaagggaataaacatccaggggctgtctgcagaagagatcaggaatggaaacctcaaggccattctaggcctcttcttcagcctctcccgatacaagcagcagcagcagcagccccagaagcagcacctctcctcacctctgccgcccgccgtatcccaggtggccggggccccctcccagtgccaggctggcacccctcagcagcaggtgccagtcactccccaagccccgtgccagcctcaccagccagcgccacatcagcagtcaaaagcacaagctgaaatgcagtccagacttccaggtcctaccgcgagggtatccgctgcaggcagcgaggccaaaacacgcggagggtcaactactgctaacaaccgacgcagccagagctttaacaactatgataaatccaaaccagtcacctccccacccccaccgccaagcagccacgagaaagagcctttggcaagttcagcctcctcccaccccggaatgagtgacaatgcacctgcttccttggagagcggcagcagctccacccctactaattgcagtacctcctcggccatcccgcagcccggtgcagccaccaagccttggcgcagcaaatccctcagcgtgaagcacagtgccacggtatccatgctctcggtcaagcctcctgggcctgaggcccccaggcccacacctgaagccatgaagccggcccccaacaatcagaagtccatgctggaaaagctgaaacttttcaacagtaaagggggctcaaaggcaggtgaggggccggggtcccgggacacaagctgtgagcggctggagactctgcccagcttcgaagagagcgaggagctggaggccgccagtcgcatgctcaccaccgtgggccctgcttccagcagccccaagattgcactcaagggcattgcccagaggacttttagccgggcactgaccaacaagaagagttctctgaaaggcaatgagaaagagaaggagaaacaacagcgggagaaggataaggagaaaagcaaggaccttgccaagagagcctctgtgacggagaggctggacctcaaggaggagccaaaagaagaccccagtggagcagctgtgcccgagatgccaaaaaagtcctccaagattgccagcttcatccccaaaggggggaagctcaacagtgccaagaaggagcccatggccccttcccacagtggaataccaaaaccaggaatgaaaagcatgcccgggaaatccccaagtgccccagcgccttccaaggaaggggagcggagccggagtgggaagctgagctcaggactcccccagcagaagccccagctggacggcagacactccagttcctcttccagcctggcgtcctcagaaggaaaaggcccaggagggaccaccctgaaccacagcatcagcagccagactgtcagtgggtctgtcgggaccacccagaccacaggaagcaataccgtcagtgttcagctacctcagccccagcagcaatacaaccatcccaacactgccacggttgcacctttcctgtacaggtctcagacggacactgaagggaatgttactgccgagtcaagctcaacaggtgtgagcgtggagcccagccacttcaccaagactggacagcctgctctggaagaactcactggggaagatcctgaggctcggcggctgcggacagtgaagaacatcgctgatctgcggcagaatttggaggaaaccatgtccagtttaaggggaactcaggttacacacagcacattggaaaccacgtttgacaccaatgtcaccacggagatgagtggccgtagcatactcagcttgacagggaggcccacacctctgtcctggagactgggccagtccagccctcggctccaagcaggagacgccccctcaatgggcaatgggtatccccctcgagccaacgccagcaggttcatcaacactgagtcaggtcgctatgtgtactccgcccctctgagaaggcagctggcctcccggggcagtagtgtctgccatgtggacgtctcagacaaggcaggagatgagatggacctggaaggcatcagcatggatgcccccggctacatgagcgacggggatgttctgagcaagaacatccggaccgatgacattacaagcggatacatgactgatggtggacttggcctctatacccgtcgcctgaaccggctccctgatgggatggctgtggtacgggagaccctgcaacgaaatacctccctgggcctcggagacgctgacagctgggacgacagcagctccgtcagcagcggcatcagcgacaccatagacaacctcagcactgatgacatcaacaccagctcctccatcagctcttatgccaacacacctgcctcctctcgaaaaaacctggatgtgcagactgatgctgagaagcactcacaggtggagaggaattccctgtggtctggtgatgatgtcaagaaatcagacggaggctcagacagcggcataaaaatggagccaggttccaagtggaggcggaatccttctgatgtgtctgacgagtccgacaaaagcacgtcgggcaagaagaatcctgtcatctcccagacaggctcatggcggcgaggcatgacagctcaggtgggcatcaccatgccaaggacgaagccttcagccccggcaggcgcactgaagaccccaggaactggaaaaacagacgacgcaaaggtgtctgagaaaggaaggctttctcctaaagcctcccaggtgaagcgctccccatcagatgcaggccggagcagtggtgacgaatccaaaaagcccctccccagcagctctaggacacctactgccaatgccaacagctttgggttcaagaagcagagtggttccgccgccggcctggccatgatcacagccagcggggtgactgtcaccagcaggtcagccacactgggcaaaatcccaaagtcatctgcactcgtcagtcggtctgctggtcggaagtcaagtatggatggggctcagaatcaggatgacgggtatctagccctaagctcccggacaaaccttcagtaccggagtttgccgaggcccagtaagtccaacagccggaacggggctgggaacaggtctagcaccagcagcatagattccaacattagcagcaagtccgcaggcctgccagtgcccaaactgagggagccttccaaaacagccctaggcagctctctaccaggtctggtcaaccaaacagacaaggagaaaggcatctcatcagacaacgagagtgtggcttcctgtaactcggtgaaagtgaatccggcagcccagcctgtgtccagtccggctcagaccagtctccagcctggagccaagtacccagatgtggcctctcccacactccgcagactctttggtgggaagcctaccaagcaagtgcccatcgccacagctgaaaacatgaaaaattcggtggtcatctccaatcctcatgccaccatgactcagcaaggtaacctagactccccgtcaggcagtggcgtcctgagcagtgggagcagcagtcctctctacagcaagaatgtggacctcaaccagtctccgctagcctccagccccagctcagcccactcggccccttccaacagcctcacctggggcaccaacgccagcagctcctccgcagttagcaaggatggcctgggctttcagtctgtcagcagcctccacaccagctgtgagtccatcgacatctccctcagcagtggaggggtccccagccacaattcttccactggcctcatcgcctcctccaaggacgactccttgactccctttgtcagaactaacagtgtgaagaccacactgtcagaaagccctctctcttcccctgctgctagccctaagttctgcagaagtactctgcccaggaaacaggacagtgacccgcaccttgataggaacactttgcctaagaaaggactcaggtatactcccacctcccagcttcgcacgcaagaagatgcaaaagaatggttacggtcccattctgcaggaggccttcaggacaccgctgccaattcccccttttcctctggctccagcgtgacttctccctccggaacaagattcaacttttcccagcttgcgagtcccaccactgtcacccagatgagcttgtccaacccgaccatgctgaggactcacagcctctccaatgctgatgggcagtatgatccatacactgacagccgcttccggaatagctccatgtccctggatgagaagagcagaaccatgagccgttcaggctcattccgggatgggtttgaagaagttcatggatcctcactctccttggtttccagcacatcgtcagtttattctacaccagaagaaaaatgccagtcagagattcgcaagctgcggcgggaactggatgcctcccaggagaaagtttcagctttgaccacccagctgacagcaaatgctcaccttgtggcagcctttgaacagagtcttggtaacatgacaatcaggctccagagtctgaccatgacagctgagcagaaggactcagaactgaatgagttaagaaaaaccattgagctgctaaagaaacagaacgcagctgcccaggctgccattaatggagtaattaacacacctgagctcaactgcaaaggaaacggcactgcccagtctgcagacctccgcatccgcaggcagcactcctcagacagcgtctccagcatcaacagtgccaccagccactccagcgtgggcagcaacatagagagtgactcaaagaagaagaagcggaagaactggttacgcagctccttcaagcaagctttcgggaagaagaagtccccaaaatctgcgtcctctcattcagatattgaggagatgacggattcttctttgccttcctcaccaaagttaccgcacaatgggtccacaggttccaccccactgctgaggaattctcactccaactctctaatttcagaatgcatggatagtgaagctgagaccgtcatgcagctccgaaatgagttaagagacaaggagatgaagctgacggatatccgcttagaagctctcagttctgcccaccagctggaccagctccgggaggccatgaacaggatgcagagtgaaatagagaagctgaaagctgagaatgatcggctgaagtcagagtctcaaggcagtggctgcagccgggctccttcccaagtgtccatctctgcctccccgaggcagtccatgggcctctcccagcacagcttgaacctcactgagtcaaccagcctggacatgttgctggatgacactggtgaatgctcggctcggaaggaaggaggcaggcatgttaagatagttgtcagctttcaggaggaaatgaagtggaaggaggattccagaccacatctctttcttattggctgcattggagttagtggcaagacgaagtgggatgtgctcgatggggtggttagacggctgttcaaagaatacatcattcatgtcgacccagtgagtcagctagggctgaattcagacagcgttcttggctacagcattggagaaatcaagcgcagcaacacttccgaaacaccggagctgcttccttgtggctatctggttggagagaacacgaccatctcagtgactgtgaaagggctcgcagaaaacagcctggactcactggtgtttgagtccttgattcccaagcccatcctgcagcgctacgtctccctcctgatagagcaccgtcggatcattctctctggccccagcggcactgggaaaacctacctggccaaccggctgtctgagtatatagtgcttcgagagggacgggagttgacagacggggttatcgccacctttaacgtggaccataagtccagcaaggaattgcgccagtacctgtccaaccttgctgaccagtgcaacagtgagaacaatgctgtggacatgcccctcgtcatcatcctggacaacctacaccacgtgagctctctgggcgagatcttcaatgggctgctcaactgcaagtaccacaaatgcccttacataattggcacaatgaaccaggctacctcttcgactcccaacctgcagcttcaccataacttcagatgggtgctttgtgccaaccacacggagcctgtgaagggtttccttggccgattcctgaggaggaagctcatggaaacagagatcagtgggcgggtgcgcaatatggagctggtaaaaatcattgactggattcccaaggtctggcatcacctcaaccgcttcctggaggctcacagttcctcggacgtcaccatcggcccccggctcttcctgtcatgccccatcgatgtggacggctcgagagtgtggttcaccgacttgtggaactattccattatcccctatctcctggaagccgtcagagaaggactccagctctatggaaggcgcgccccctgggaggatcctgccaagtgggtgatggacacatatccatgggcagccagcccacaacagcacgagtggcctcccctgctgcagttacggcctgaggatgtcggcttcgacggctactccatgcctcgggagggatcgacaagcaagcagatgccccccagtgatgctgaaggtgacccgctgatgaacatgctgatgaggctgcaggaggcagccaactactccagcccccagagctatgacagcgactccaacagcaacagccatcacgatgacatcttggactcctctttggagtccactctgtgacaggggcccggagcccagcgccctcctcttctcctcaccgcattccacctgcatcccccacatcaccctgaagatgacttcctgagccagcccccagccacagccttagagctgcgggaacaccgagaccccccgtccttcagcctcgacctgggtgcaggcatcccgggccagctgcctgcggaccgcttccttccacagcgagaactgcactaccttctgttgtactttaattattgttttgccttgttgctgtgacctccctaagacactgaagatacttctcgggaaaggatcatcgccgttgaaatgaaaagagagacagagagaaaaaaaaaaagagaacccacatgaagctctgaaaccaaacagcatcctgccatgagcttcccagagacagaagagactggagcaaagtcggaaacacagagaagcacggcttcccctcagcacagaccctccagactgggtctcagagccgtgccacccaccctcccacacagccggccacagggagaactggtgctaaccagggtgcttgctttggtcacgttcaacgcactacagagctacgacacagggaaaccttaggagcaaataaaccgtgctttcatgttttttaaatggtgctttccttacccgagaggtattttgcctgttccaatcaaaccaccccattcaggtccatcagcctctgattaatatccgtgagagtgagtgacggagtgagagtgtgagcgagtggatgtggctgtcagtgcagaacagcatgtgtctctttccttctgatatatgaatgaatcaggtttttttttttttttttctgcaaacactgtgtatagtgagacttgttctactttggagaacaggttaccttttgaaaatgaggttgagtttcttcctttctgatgcattgatttttgaagatttttttttcccccttcccctcttggtcagaatcaatcctttggtgaaagtaagaaccgcaggagttgagttttggtttggtcctgctcagttttggtttttagttgtccatcctcacagtcctacacactcgcctcctcctgctagggctgggggtatctgtgtcctttaaaatggatgaggacctggtcctcgacatgtgggtgagccatggaccttgccttcccttctcgtccttgagggtttagaacacacaccaacacctccagcgtccccgccccagcttccggtggggtgatgcggtcaccctgcaaaagacttgcactttcctcagaaccaacatgacgcagctcaataagggtgagggtcactccctcccagaagccccgtctggacgagccttgcctgacctcttcggtgctgaccttcccaaagtgatgccttactggttttgtactaactgtgttcattttacataagtgtcgtgcctgcctggggtttgttttttttgtcattgttttccccattgaaacaaacagggctaaaaagtcatctgttcattaggagaactcaagttgctgtgacttttctcatccaaaagactcatttgtgtggatgcgtgaccatgggaaaaagaaaaaaaaaaagatccattttttaggttcttttcggtctccagctgacaacccaactggacaatgatctgtctggtgcaggagaaggcaaaagtttctacaagtctacatgaccttgctgatacttgttctaatagaaacccagtctgctgtgtcttcaacatactggtattttcattacaaagtatggtaaatttttgagttgtttgtttctgttttgtaaagagaatccttattggacaccagtgaaggtgtctctgttttaatgatcagggtttttattccatcttttgcatttcttctatttctgaaggtttgtctcttggcatctttttttagtttcttaccataagagtttgacccgaaactgctcacttcacattggatgacaccatgttcttcctctttgaaaagaaaaggggaatgtgtcccactagtgaaaggaaaacttttcaacactatccctgctttagtctcagcaaactcagactattctgcttagccttcattagtcatctgggtgtgagtgtgtcttgttctgtttttctttttaataaaacttttaaaccatatatttagcctgtgaccaggggggccaaaccctaagatttctggtaaacctgaagggtggccctcctcagacaatttatctcccagcaatgaccctactacactcgcgtactgtgaatttgggaggaggtaaagttgacttctcctcgtgggcagttttccaatcaccttgtgagtagacacctgccaatattgtttgaaacctttttttaatatgacatcctctcttgtcattctcttctcccctttcccacagacttccctcctgggtccaggttcagaaccaagacttctgtacctagtgctgcctgattggtgaacattgacttcaagtagcatagcccttgtgtgactcacaactccgtgtccttcctaaagtttcgggaagcagggttgtctaatatgcacatttcttattttggtcatatttttactttagtgtcactcaccttttacaaagtgactttgtactcatttagggctctatcggaaatgcttccattttgccttttctacagttaggccaattttgaaatatataaattctatgcaacatttatgttgagttaccaatggaagccaaaagttctcttcccaaactgccaagaatgatacaggccataattgaaatgggaataccttttaagtttcattaggggtggggtgggagtgggacaggaacaagacttgcctagatctttgttgtatcttggggacttttactttgttgtttgatgcttaaacttcaaaattctctgtattcaaatttgattgtggcgaatctacttcaaaaaggaaaaataatccaactttgtggatattaaatggaaggtttgctgttttgatctagttgtttccagtggagcagttttatgaaatatgttctataagatgtacattttttcattgtaacatagaaattgtaaataattgattaaagtgctgcattttgatgaattttttctagccatttttaaagagaaaactaggaattgagtattttgtgtacggtatgtttccatcctccctccccttcctcctcccctcctctctctctcttcctacctatttaattttcatttgtcatgaggtttttggatttgccaatgatctgctggacatcatgccccatgtcatagagaataaagctgatgattgtaccagtcttaaattattcatgattcaataaaattgatgcttatttattcagaaaaaaaaaaaaaaaaaa

SEQ ID NO: 1266 - protein, 2429 aa, Homo sapiens
MPAILVASKMKSGLPKPVHSAAPILHVPPARAGPQPCYLKLGSKVEVSKTTYPSQIPLKSQVLQGLQEPAGEGLPLRKSGSVENGFDTQIYTDWANHYLAKSGHKRLIRDLQQDVTDGVLLAQIIQVVANEKIEDINGCPKNRSQMIENIDACLNFLAAKGINIQGLSAEEIRNGNLKAILGLFFSLSRYKQQQQQPQKQHLSSPLPPAVSQVAGAPSQCQAGTPQQQVPVTPQAPCQPHQPAPHQQSKAQAEMQSRLPGPTARVSAAGSEAKTRGGSTTANNRRSQSFNNYDKSKPVTSPPPPPSSHEKEPLASSASSHPGMSDNAPASLESGSSSTPTNCSTSSAIPQPGAATKPWRSKSLSVKHSATVSMLSVKPPGPEAPRPTPEAMKPAPNNQKSMLEKLKLFNSKGGSKAGEGPGSRDTSCERLETLPSFEESEELEAASRMLTTVGPASSSPKIALKGIAQRTFSRALTNKKSSLKGNEKEKEKQQREKDKEKSKDLAKRASVTERLDLKEEPKEDPSGAAVPEMPKKSSKIASFIPKGGKLNSAKKEPMAPSHSGIPKPGMKSMPGKSPSAPAPSKEGERSRSGKLSSGLPQQKPQLDGRHSSSSSSLASSEGKGPGGTTLNHSISSQTVSGSVGTTQTTGSNTVSVQLPQPQQQYNHPNTATVAPFLYRSQTDTEGNVTAESSSTGVSVEPSHFTKTGQPALEELTGEDPEARRLRTVKNIADLRQNLEETMSSLRGTQVTHSTLETTFDTNVTTEMSGRSILSLTGRPTPLSWRLGQSSPRLQAGDAPSMGNGYPPRANASRFINTESGRYVYSAPLRRQLASRGSSVCHVDVSDKAGDEMDLEGISMDAPGYMSDGDVLSKNIRTDDITSGYMTDGGLGLYTRRLNRLPDGMAVVRETLQRNTSLGLGDADSWDDSSSVSSGISDTIDNLSTDDINTSSSISSYANTPASSRKNLDVQTDAEKHSQVERNSLWSGDDVKKSDGGSDSGIKMEPGSKWRRNPSDVSDESDKSTSGKKNPVISQTGSWRRGMTAQVGITMPRTKPSAPAGALKTPGTGKTDDAKVSEKGRLSPKASQVKRSPSDAGRSSGDESKKPLPSSSRTPTANANSFGFKKQSGSAAGLAMITASGVTVTSRSATLGKIPKSSALVSRSAGRKSSMDGAQNQDDGYLALSSRTNLQYRSLPRPSKSNSRNGAGNRSSTSSIDSNISSKSAGLPVPKLREPSKTALGSSLPGLVNQTDKEKGISSDNESVASCNSVKVNPAAQPVSSPAQTSLQPGAKYPDVASPTLRRLFGGKPTKQVPIATAENMKNSVVISNPHATMTQQGNLDSPSGSGVLSSGSSSPLYSKNVDLNQSPLASSPSSAHSAPSNSLTWGTNASSSSAVSKDGLGFQSVSSLHTSCESIDISLSSGGVPSHNSSTGLIASSKDDSLTPFVRTNSVKTTLSESPLSSPAASPKFCRSTLPRKQDSDPHLDRNTLPKKGLRYTPTSQLRTQEDAKEWLRSHSAGGLQDTAANSPFSSGSSVTSPSGTRFNFSQLASPTTVTQMSLSNPTMLRTHSLSNADGQYDPYTDSRFRNSSMSLDEKSRTMSRSGSFRDGFEEVHGSSLSLVSSTSSVYSTPEEKCQSEIRKLRRELDASQEKVSALTTQLTANAHLVAAFEQSLGNMTIRLQSLTMTAEQKDSELNELRKTIELLKKQNAAAQAAINGVINTPELNCKGNGTAQSADLRIRRQHSSDSVSSINSATSHSSVGSNIESDSKKKKRKNWLRSSFKQAFGKKKSPKSASSHSDIEEMTDSSLPSSPKLPHNGSTGSTPLLRNSHSNSLISECMDSEAETVMQLRNELRDKEMKLTDIRLEALSSAHQLDQLREAMNRMQSEIEKLKAENDRLKSESQGSGCSRAPSQVSISASPRQSMGLSQHSLNLTESTSLDMLLDDTGECSARKEGGRHVKIVVSFQEEMKWKEDSRPHLFLIGCIGVSGKTKWDVLDGVVRRLFKEYIIHVDPVSQLGLNSDSVLGYSIGEIKRSNTSETPELLPCGYLVGENTTISVTVKGLAENSLDSLVFESLIPKPILQRYVSLLIEHRRIILSGPSGTGKTYLANRLSEYIVLREGRELTDGVIATFNVDHKSSKELRQYLSNLADQCNSENNAVDMPLVIILDNLHHVSSLGEIFNGLLNCKYHKCPYIIGTMNQATSSTPNLQLHHNFRWVLCANHTEPVKGFLGRFLRRKLMETEISGRVRNMELVKIIDWIPKVWHHLNRFLEAHSSSDVTIGPRLFLSCPIDVDGSRVWFTDLWNYSIIPYLLEAVREGLQLYGRRAPWEDPAKWVMDTYPWAASPQQHEWPPLLQLRPEDVGFDGYSMPREGSTSKQMPPSDAEGDPLMNMLMRLQEAANYSSPQSYDSDSNSNSHHDDILDSSLESTL

SEQ ID NO: 1267 - DNA, 11020 bp, Homo sapiens
gttaatatgggcgtccaagcctctgtttcccaggaggaaatttgcaagaggcggcagcccctgagcgcccagagctcttgaaaggccacccaggagaggtgtgagacccggcggcagcatccgtccaggtgggacccgctgagcgccgtggccagtcccccattcccatcccggcaccccaaaggcgcgctcgcccgattgcttcgagttccccgacctggggattttttttttagccgctggtggtgggcgcctcgtgggctaaggcccggcgcctgctctgctacccgcgctgcctttagcggtcgcccccgccgccgctgccagggacgtgctgggaaagcccaagccccgggagaagatgccggccatcctggtcgcctccaaaatgaagtcgggactgcccaaacccgtgcacagcgccgcgcccatcctgcacgtgcccccggcccgggcgggcccccagccctgctacctgaagttgggaagcaaggtggaggtgagcaagaccacctatcctagccagatccccctgaaatcgcaggtgctgcaggggctgcaggagccagcgggggaggggctcccgctgcggaagagcggctcggtggaaaacgggttcgatacccagatctacacagactgggccaatcattacctagccaaatccggccacaagcgtctcatcagggatctccagcaagatgtgacagatggcgtcctcctggcccagattatccaggttgtggcaaatgaaaagattgaagacatcaatggctgtccgaagaacagatcccaaatgattgaaaacatagatgcctgcttgaatttcctggcagctaagggaataaacatccaggggctgtctgcagaagagatcaggaatggaaacctcaaggccattctaggcctcttcttcagcctctcccgatacaagcagcagcagcagcagccccagaagcagcacctctcctcacctctgccgcccgccgtatcccaggtggccggggccccctcccagtgccaggctggcacccctcagcagcaggtgccagtcactccccaagccccgtgccagcctcaccagccagcgccacatcagcagtcaaaagcacaagctgaaatgcagtccagacttccaggtcctaccgcgagggtatccgctgcaggcagcgaggccaaaacacgcggagggtcaactactgctaacaaccgacgcagccagagctttaacaactatgataaatccaaaccagtcacctccccacccccaccgccaagcagccacgagaaagagcctttggcaagttcagcctcctcccaccccggaatgagtgacaatgcacctgcttccttggagagcggcagcagctccacccctactaattgcagtacctcctcggccatcccgcagcccggtgcagccaccaagccttggcgcagcaaatccctcagcgtgaagcacagtgccacggtatccatgctctcggtcaagcctcctgggcctgaggcccccaggcccacacctgaagccatgaagccggcccccaacaatcagaagtccatgctggaaaagctgaaacttttcaacagtaaagggggctcaaaggcaggtgaggggccggggtcccgggacacaagctgtgagcggctggagactctgcccagcttcgaagagagcgaggagctggaggccgccagtcgcatgctcaccaccgtgggccctgcttccagcagccccaagattgcactcaagggcattgcccagaggacttttagccgggcactgaccaacaagaagagttctctgaaaggcaatgagaaagagaaggagaaacaacagcgggagaaggataaggagaaaagcaaggaccttgccaagagagcctctgtgacggagaggctggacctcaaggaggagccaaaagaagaccccagtggagcagctgtgcccgagatgccaaaaaagtcctccaagattgccagcttcatccccaaaggggggaagctcaacagtgccaagaaggagcccatggccccttcccacagtggaataccaaaaccaggaatgaaaagcatgcccgggaaatccccaagtgccccagcgccttccaaggaaggggagcggagccggagtgggaagctgagctcaggactcccccagcagaagccccagctggacggcagacactccagttcctcttccagcctggcgtcctcagaaggaaaaggcccaggagggaccaccctgaaccacagcatcagcagccagactgtcagtgggtctgtcgggaccacccagaccacaggaagcaataccgtcagtgttcagctacctcagccccagcagcaatacaaccatcccaacactgccacggttgcacctttcctgtacaggtctcagacggacactgaagggaatgttactgccgagtcaagctcaacaggtgtgagcgtggagcccagccacttcaccaagactggacagcctgctctggaagaactcactggggaagatcctgaggctcggcggctgcggacagtgaagaacatcgctgatctgcggcagaatttggaggaaaccatgtccagtttaaggggaactcaggttacacacagcacattggaaaccacgtttgacaccaatgtcaccacggagatgagtggccgtagcatactcagcttgacagggaggcccacacctctgtcctggagactgggccagtccagccctcggctccaagcaggagacgccccctcaatgggcaatgggtatccccctcgagccaacgccagcaggttcatcaacactgagtcaggtcgctatgtgtactccgcccctctgagaaggcagctggcctcccggggcagtagtgtctgccatgtggacgtctcagacaaggcaggagatgagatggacctggaaggcatcagcatggatgcccccggctacatgagcgacggggatgttctgagcaagaacatccggaccgatgacattacaagcggatacatgactgatggtggacttggcctctatacccgtcgcctgaaccggctccctgatgggatggctgtggtacgggagaccctgcaacgaaatacctccctgggcctcggagacgctgacagctgggacgacagcagctccgtcagcagcggcatcagcgacaccatagacaacctcagcactgatgacatcaacaccagctcctccatcagctcttatgccaacacacctgcctcctctcgaaaaaacctggatgtgcagactgatgctgagaagcactcacaggtggagaggaattccctgtggtctggtgatgatgtcaagaaatcagacggaggctcagacagcggcataaaaatggagccaggttccaagtggaggcggaatccttctgatgtgtctgacgagtccgacaaaagcacgtcgggcaagaagaatcctgtcatctcccagacaggctcatggcggcgaggcatgacagctcaggtgggcatcaccatgccaaggacgaagccttcagccccggcaggcgcactgaagaccccaggaactggaaaaacagacgacgcaaaggtgtctgagaaaggaaggctttctcctaaagcctcccaggtgaagcgctccccatcagatgcaggccggagcagtggtgacgaatccaaaaagcccctccccagcagctctaggacacctactgccaatgccaacagctttgggttcaagaagcagagtggttccgccgccggcctggccatgatcacagccagcggggtgactgtcaccagcaggtcagccacactgggcaaaatcccaaagtcatctgcactcgtcagtcggtctgctggtcggaagtcaagtatggatggggctcagaatcaggatgacgggtatctagccctaagctcccggacaaaccttcagtaccggagtttgccgaggcccagtaagtccaacagccggaacggggctgggaacaggtctagcaccagcagcatagattccaacattagcagcaagtccgcaggcctgccagtgcccaaactgagggagccttccaaaacagccctaggcagctctctaccaggtctggtcaaccaaacagacaaggagaaaggcatctcatcagacaacgagagtgtggcttcctgtaactcggtgaaagtgaatccggcagcccagcctgtgtccagtccggctcagaccagtctccagcctggagccaagtacccagatgtggcctctcccacactccgcagactctttggtgggaagcctaccaagcaagtgcccatcgccacagctgaaaacatgaaaaattcggtggtcatctccaatcctcatgccaccatgactcagcaaggtaacctagactccccgtcaggcagtggcgtcctgagcagtgggagcagcagtcctctctacagcaagaatgtggacctcaaccagtctccgctagcctccagccccagctcagcccactcggccccttccaacagcctcacctggggcaccaacgccagcagctcctccgcagttagcaaggatggcctgggctttcagtctgtcagcagcctccacaccagctgtgagtccatcgacatctccctcagcagtggaggggtccccagccacaattcttccactggcctcatcgcctcctccaaggacgactccttgactccctttgtcagaactaacagtgtgaagaccacactgtcagaaagccctctctcttcccctgctgctagccctaagttctgcagaagtactctgcccaggaaacaggacagtgacccgcaccttgataggaacactttgcctaagaaaggactcaggtatactcccacctcccagcttcgcacgcaagaagatgcaaaagaatggttacggtcccattctgcaggaggccttcaggacaccgctgccaattcccccttttcctctggctccagcgtgacttctccctccggaacaagattcaacttttcccagcttgcgagtcccaccactgtcacccagatgagcttgtccaacccgaccatgctgaggactcacagcctctccaatgctgatgggcagtatgatccatacactgacagccgcttccggaatagctccatgtccctggatgagaagagcagaaccatgagccgttcaggctcattccgggatgggtttgaagaagttcatggatcctcactctccttggtttccagcacatcgtcagtttattctacaccagaagaaaaatgccagtcagagattcgcaagctgcggcgggaactggatgcctcccaggagaaagtttcagctttgaccacccagctgacagcaaatgctcaccttgtggcagcctttgaacagagtcttggtaacatgacaatcaggctccagagtctgaccatgacagctgagcagaaggactcagaactgaatgagttaagaaaaaccattgagctgctaaagaaacagaacgcagctgcccaggctgccattaatggagtaattaacacacctgagctcaactgcaaaggaaacggcactgcccagtctgcagacctccgcatccgcaggcagcactcctcagacagcgtctccagcatcaacagtgccaccagccactccagcgtgggcagcaacatagagagtgactcaaagaagaagaagcggaagaactgggtcaatgagttacgcagctccttcaagcaagctttcgggaagaagaagtccccaaaatctgcgtcctctcattcagatattgaggagatgacggattcttctttgccttcctcaccaaagttaccgcacaatgggtccacaggttccaccccactgctgaggaattctcactccaactctctaatttcagaatgcatggatagtgaagctgagaccgtcatgcagctccgaaatgagttaagagacaaggagatgaagctgacggatatccgcttagaagctctcagttctgcccaccagctggaccagctccgggaggccatgaacaggatgcagagtgaaatagagaagctgaaagctgagaatgatcggctgaagtcagagtctcaaggcagtggctgcagccgggctccttcccaagtgtccatctctgcctccccgaggcagtccatgggcctctcccagcacagcttgaacctcactgagtcaaccagcctggacatgttgctggatgacactggtgaatgctcggctcggaaggaaggaggcaggcatgttaagatagttgtcagctttcaggaggaaatgaagtggaaggaggattccagaccacatctctttcttattggctgcattggagttagtggcaagacgaagtgggatgtgctcgatggggtggttagacggctgttcaaagaatacatcattcatgtcgacccagtgagtcagctagggctgaattcagacagcgttcttggctacagcattggagaaatcaagcgcagcaacacttccgaaacaccggagctgcttccttgtggctatctggttggagagaacacgaccatctcagtgactgtgaaagggctcgcagaaaacagcctggactcactggtgtttgagtccttgattcccaagcccatcctgcagcgctacgtctccctcctgatagagcaccgtcggatcattctctctggccccagcggcactgggaaaacctacctggccaaccggctgtctgagtatatagtgcttcgagagggacgggagttgacagacggggttatcgccacctttaacgtggaccataagtccagcaaggaattgcgccagtacctgtccaaccttgctgaccagtgcaacagtgagaacaatgctgtggacatgcccctcgtcatcatcctggacaacctacaccacgtgagctctctgggcgagatcttcaatgggctgctcaactgcaagtaccacaaatgcccttacataattggcacaatgaaccaggctacctcttcgactcccaacctgcagcttcaccataacttcagatgggtgctttgtgccaaccacacggagcctgtgaagggtttccttggccgattcctgaggaggaagctcatggaaacagagatcagtgggcgggtgcgcaatatggagctggtaaaaatcattgactggattcccaaggtctggcatcacctcaaccgcttcctggaggctcacagttcctcggacgtcaccatcggcccccggctcttcctgtcatgccccatcgatgtggacggctcgagagtgtggttcaccgacttgtggaactattccattatcccctatctcctggaagccgtcagagaaggactccagctctatggaaggcgcgccccctgggaggatcctgccaagtgggtgatggacacatatccatgggcagccagcccacaacagcacgagtggcctcccctgctgcagttacggcctgaggatgtcggcttcgacggctactccatgcctcgggagggatcgacaagcaagcagatgccccccagtgatgctgaaggtgacccgctgatgaacatgctgatgaggctgcaggaggcagccaactactccagcccccagagctatgacagcgactccaacagcaacagccatcacgatgacatcttggactcctctttggagtccactctgtgacaggggcccggagcccagcgccctcctcttctcctcaccgcattccacctgcatcccccacatcaccctgaagatgacttcctgagccagcccccagccacagccttagagctgcgggaacaccgagaccccccgtccttcagcctcgacctgggtgcaggcatcccgggccagctgcctgcggaccgcttccttccacagcgagaactgcactaccttctgttgtactttaattattgttttgccttgttgctgtgacctccctaagacactgaagatacttctcgggaaaggatcatcgccgttgaaatgaaaagagagacagagagaaaaaaaaaaagagaacccacatgaagctctgaaaccaaacagcatcctgccatgagcttcccagagacagaagagactggagcaaagtcggaaacacagagaagcacggcttcccctcagcacagaccctccagactgggtctcagagccgtgccacccaccctcccacacagccggccacagggagaactggtgctaaccagggtgcttgctttggtcacgttcaacgcactacagagctacgacacagggaaaccttaggagcaaataaaccgtgctttcatgttttttaaatggtgctttccttacccgagaggtattttgcctgttccaatcaaaccaccccattcaggtccatcagcctctgattaatatccgtgagagtgagtgacggagtgagagtgtgagcgagtggatgtggctgtcagtgcagaacagcatgtgtctctttccttctgatatatgaatgaatcaggtttttttttttttttttctgcaaacactgtgtatagtgagacttgttctactttggagaacaggttaccttttgaaaatgaggttgagtttcttcctttctgatgcattgatttttgaagatttttttttcccccttcccctcttggtcagaatcaatcctttggtgaaagtaagaaccgcaggagttgagttttggtttggtcctgctcagttttggtttttagttgtccatcctcacagtcctacacactcgcctcctcctgctagggctgggggtatctgtgtcctttaaaatggatgaggacctggtcctcgacatgtgggtgagccatggaccttgccttcccttctcgtccttgagggtttagaacacacaccaacacctccagcgtccccgccccagcttccggtggggtgatgcggtcaccctgcaaaagacttgcactttcctcagaaccaacatgacgcagctcaataagggtgagggtcactccctcccagaagccccgtctggacgagccttgcctgacctcttcggtgctgaccttcccaaagtgatgccttactggttttgtactaactgtgttcattttacataagtgtcgtgcctgcctggggtttgttttttttgtcattgttttccccattgaaacaaacagggctaaaaagtcatctgttcattaggagaactcaagttgctgtgacttttctcatccaaaagactcatttgtgtggatgcgtgaccatgggaaaaagaaaaaaaaaaagatccattttttaggttcttttcggtctccagctgacaacccaactggacaatgatctgtctggtgcaggagaaggcaaaagtttctacaagtctacatgaccttgctgatacttgttctaatagaaacccagtctgctgtgtcttcaacatactggtattttcattacaaagtatggtaaatttttgagttgtttgtttctgttttgtaaagagaatccttattggacaccagtgaaggtgtctctgttttaatgatcagggtttttattccatcttttgcatttcttctatttctgaaggtttgtctcttggcatctttttttagtttcttaccataagagtttgacccgaaactgctcacttcacattggatgacaccatgttcttcctctttgaaaagaaaaggggaatgtgtcccactagtgaaaggaaaacttttcaacactatccctgctttagtctcagcaaactcagactattctgcttagccttcattagtcatctgggtgtgagtgtgtcttgttctgtttttctttttaataaaacttttaaaccatatatttagcctgtgaccaggggggccaaaccctaagatttctggtaaacctgaagggtggccctcctcagacaatttatctcccagcaatgaccctactacactcgcgtactgtgaatttgggaggaggtaaagttgacttctcctcgtgggcagttttccaatcaccttgtgagtagacacctgccaatattgtttgaaacctttttttaatatgacatcctctcttgtcattctcttctcccctttcccacagacttccctcctgggtccaggttcagaaccaagacttctgtacctagtgctgcctgattggtgaacattgacttcaagtagcatagcccttgtgtgactcacaactccgtgtccttcctaaagtttcgggaagcagggttgtctaatatgcacatttcttattttggtcatatttttactttagtgtcactcaccttttacaaagtgactttgtactcatttagggctctatcggaaatgcttccattttgccttttctacagttaggccaattttgaaatatataaattctatgcaacatttatgttgagttaccaatggaagccaaaagttctcttcccaaactgccaagaatgatacaggccataattgaaatgggaataccttttaagtttcattaggggtggggtgggagtgggacaggaacaagacttgcctagatctttgttgtatcttggggacttttactttgttgtttgatgcttaaacttcaaaattctctgtattcaaatttgattgtggcgaatctacttcaaaaaggaaaaataatccaactttgtggatattaaatggaaggtttgctgttttgatctagttgtttccagtggagcagttttatgaaatatgttctataagatgtacattttttcattgtaacatagaaattgtaaataattgattaaagtgctgcattttgatgaattttttctagccatttttaaagagaaaactaggaattgagtattttgtgtacggtatgtttccatcctccctccccttcctcctcccctcctctctctctcttcctacctatttaattttcatttgtcatgaggtttttggatttgccaatgatctgctggacatcatgccccatgtcatagagaataaagctgatgattgtaccagtcttaaattattcatgattcaataaaattgatgcttatttattcagaaaaaaaaaaaaaaaaaa

SEQ ID NO: 1268 - protein, 2432 aa, Homo sapiens
MPAILVASKMKSGLPKPVHSAAPILHVPPARAGPQPCYLKLGSKVEVSKTTYPSQIPLKSQVLQGLQEPAGEGLPLRKSGSVENGFDTQIYTDWANHYLAKSGHKRLIRDLQQDVTDGVLLAQIIQVVANEKIEDINGCPKNRSQMIENIDACLNFLAAKGINIQGLSAEEIRNGNLKAILGLFFSLSRYKQQQQQPQKQHLSSPLPPAVSQVAGAPSQCQAGTPQQQVPVTPQAPCQPHQPAPHQQSKAQAEMQSRLPGPTARVSAAGSEAKTRGGSTTANNRRSQSFNNYDKSKPVTSPPPPPSSHEKEPLASSASSHPGMSDNAPASLESGSSSTPTNCSTSSAIPQPGAATKPWRSKSLSVKHSATVSMLSVKPPGPEAPRPTPEAMKPAPNNQKSMLEKLKLFNSKGGSKAGEGPGSRDTSCERLETLPSFEESEELEAASRMLTTVGPASSSPKIALKGIAQRTFSRALTNKKSSLKGNEKEKEKQQREKDKEKSKDLAKRASVTERLDLKEEPKEDPSGAAVPEMPKKSSKIASFIPKGGKLNSAKKEPMAPSHSGIPKPGMKSMPGKSPSAPAPSKEGERSRSGKLSSGLPQQKPQLDGRHSSSSSSLASSEGKGPGGTTLNHSISSQTVSGSVGTTQTTGSNTVSVQLPQPQQQYNHPNTATVAPFLYRSQTDTEGNVTAESSSTGVSVEPSHFTKTGQPALEELTGEDPEARRLRTVKNIADLRQNLEETMSSLRGTQVTHSTLETTFDTNVTTEMSGRSILSLTGRPTPLSWRLGQSSPRLQAGDAPSMGNGYPPRANASRFINTESGRYVYSAPLRRQLASRGSSVCHVDVSDKAGDEMDLEGISMDAPGYMSDGDVLSKNIRTDDITSGYMTDGGLGLYTRRLNRLPDGMAVVRETLQRNTSLGLGDADSWDDSSSVSSGISDTIDNLSTDDINTSSSISSYANTPASSRKNLDVQTDAEKHSQVERNSLWSGDDVKKSDGGSDSGIKMEPGSKWRRNPSDVSDESDKSTSGKKNPVISQTGSWRRGMTAQVGITMPRTKPSAPAGALKTPGTGKTDDAKVSEKGRLSPKASQVKRSPSDAGRSSGDESKKPLPSSSRTPTANANSFGFKKQSGSAAGLAMITASGVTVTSRSATLGKIPKSSALVSRSAGRKSSMDGAQNQDDGYLALSSRTNLQYRSLPRPSKSNSRNGAGNRSSTSSIDSNISSKSAGLPVPKLREPSKTALGSSLPGLVNQTDKEKGISSDNESVASCNSVKVNPAAQPVSSPAQTSLQPGAKYPDVASPTLRRLFGGKPTKQVPIATAENMKNSVVISNPHATMTQQGNLDSPSGSGVLSSGSSSPLYSKNVDLNQSPLASSPSSAHSAPSNSLTWGTNASSSSAVSKDGLGFQSVSSLHTSCESIDISLSSGGVPSHNSSTGLIASSKDDSLTPFVRTNSVKTTLSESPLSSPAASPKFCRSTLPRKQDSDPHLDRNTLPKKGLRYTPTSQLRTQEDAKEWLRSHSAGGLQDTAANSPFSSGSSVTSPSGTRFNFSQLASPTTVTQMSLSNPTMLRTHSLSNADGQYDPYTDSRFRNSSMSLDEKSRTMSRSGSFRDGFEEVHGSSLSLVSSTSSVYSTPEEKCQSEIRKLRRELDASQEKVSALTTQLTANAHLVAAFEQSLGNMTIRLQSLTMTAEQKDSELNELRKTIELLKKQNAAAQAAINGVINTPELNCKGNGTAQSADLRIRRQHSSDSVSSINSATSHSSVGSNIESDSKKKKRKNWVNELRSSFKQAFGKKKSPKSASSHSDIEEMTDSSLPSSPKLPHNGSTGSTPLLRNSHSNSLISECMDSEAETVMQLRNELRDKEMKLTDIRLEALSSAHQLDQLREAMNRMQSEIEKLKAENDRLKSESQGSGCSRAPSQVSISASPRQSMGLSQHSLNLTESTSLDMLLDDTGECSARKEGGRHVKIVVSFQEEMKWKEDSRPHLFLIGCIGVSGKTKWDVLDGVVRRLFKEYIIHVDPVSQLGLNSDSVLGYSIGEIKRSNTSETPELLPCGYLVGENTTISVTVKGLAENSLDSLVFESLIPKPILQRYVSLLIEHRRIILSGPSGTGKTYLANRLSEYIVLREGRELTDGVIATFNVDHKSSKELRQYLSNLADQCNSENNAVDMPLVIILDNLHHVSSLGEIFNGLLNCKYHKCPYIIGTMNQATSSTPNLQLHHNFRWVLCANHTEPVKGFLGRFLRRKLMETEISGRVRNMELVKIIDWIPKVWHHLNRFLEAHSSSDVTIGPRLFLSCPIDVDGSRVWFTDLWNYSIIPYLLEAVREGLQLYGRRAPWEDPAKWVMDTYPWAASPQQHEWPPLLQLRPEDVGFDGYSMPREGSTSKQMPPSDAEGDPLMNMLMRLQEAANYSSPQSYDSDSNSNSHHDDILDSSLESTL

SEQ ID NO: 1269 - DNA, 3026 bp, Homo sapiens
ggcgctgccgagccacctcccccgccgcccgctagcaagtttggcggctccaagccaggcgcgcctcaggatccaggctcatttgcttccacctagcttcggtgccccctgctaggcggggaccctcgagagcgatgccgatggatttgattttagttgtgtggttctgtgtgtgcactgccaggacagtggtgggctttgggatggaccctgaccttcagatggatatcgtcaccgagcttgaccttgtgaacaccacccttggagttgctcaggtgtctggaatgcacaatgccagcaaagcatttttatttcaagacatagaaagagagatccatgcagctcctcatgtgagtgagaaattaattcagctgttccagaacaagagtgaattcaccattttggccactgtacagcagaagccatccacttcaggagtgatactgtccattcgagaactggagcacagctattttgaactggagagcagtggcctgagggatgagattcggtatcactacatacacaatgggaagccaaggacagaggcacttccttaccgcatggcagatggacaatggcacaaggttgcactgtcagttagcgcctctcatctcctgctccatgtcgactgtaacaggatttatgagcgtgtgatagaccctccagataccaaccttcccccaggaatcaatttatggcttggccagcgcaaccaaaagcatggcttattcaaagggatcatccaagatgggaagatcatctttatgccgaatggatatataacacagtgtccaaatctaaatcacacttgcccaacctgcagtgatttcttaagcctggtgcaaggaataatggatttacaagagcttttggccaagatgactgcaaaactaaattatgcagagacaagacttagtcaattggaaaactgtcattgtgagaagacttgtcaagtgagtggactgctctatcgagatcaagactcttgggtagatggtgaccattgcaggaactgcacttgcaaaagtggtgccgtggaatgccgaaggatgtcctgtccccctctcaattgctccccagactccctcccagtgcacattgctggccagtgctgtaaggtctgccgaccaaaatgtatctatggaggaaaagttcttgcagaaggccagcggattttaaccaagagctgtcgggaatgccgaggtggagttttagtaaaaattacagaaatgtgtcctcctttgaactgctcagaaaaggatcacattcttcctgagaatcagtgctgccgtgtctgtagaggtcataacttttgtgcagaaggacctaaatgtggtgaaaactcagagtgcaaaaactggaatacaaaagctacttgtgagtgcaagagtggttacatctctgtccagggagactctgcctactgtgaagatattgatgagtgtgcagctaagatgcattactgtcatgccaatactgtgtgtgtcaaccttcctgggttatatcgctgtgactgtgtcccaggatacattcgtgtggatgacttctcttgtacagaacacgatgaatgtggcagcggccagcacaactgtgatgagaatgccatctgcaccaacactgtccagggacacagctgcacctgcaaaccgggctacgtggggaacgggaccatctgcagagctttctgtgaagagggctgcagatacggtggaacgtgtgtggctcccaacaaatgtgtctgtccatctggattcacaggaagccactgcgagaaagatattgatgaatgttcagagggaatcattgagtgccacaaccattcccgctgcgttaacctgccagggtggtaccactgtgagtgcagaagcggtttccatgacgatgggacctattcactgtccggggagtcctgtattgacattgatgaatgtgccttaagaactcacacctgttggaacgattctgcctgcatcaacctggcagggggttttgactgtctctgcccctctgggccctcctgctctggtgactgtcctcatgaaggggggctgaagcacaatggccaggtgtggaccttgaaagaagacaggtgttctgtctgctcctgcaaggatggcaagatattctgccgacggacagcttgtgattgccagaatccaagtgctgacctattctgttgcccagaatgtgacaccagagtcacaagtcaatgtttagaccaaaatggtcacaagctgtatcgaagtggagacaattggacccatagctgtcagcagtgtcggtgtctggaaggagaggtagattgctggccactcacttgccccaacttgagctgtgagtatacagctatcttagaaggggaatgttgtccccgctgtgtcagtgacccctgcctagctgataacatcacctatgacatcagaaaaacttgcctggacagctatggtgtttcacggcttagtggctcagtgtggacgatggctggatctccctgcacaacctgtaaatgcaagaatggaagagtctgttgttctgtggattttgagtgtcttcaaaataattgaagtatttacagtggactcaacgcagaagaatggacgaaatgaccatccaacgtgattaaggataggaatcggtagtttggtttttttgtttgttttgtttttttaaccacagataattgccaaagtttccacctgaggacggtgtttggaggttgccttttggacctaccactttgctcattcttgctaacctagtctaggtgacctacagtgccgtgcatttaagtcaatggttgttaaaagaagtttcccgtgttgtaaatcatgtttcccttatcagatcatttgcaaatacatttaaatgatctcatggtaaatgttgatgtattttttggtttattttgtgtactaacataatagagagagactcagctccttttatttattttgttgatttatggatcaaattctaaaataaagttgcctgttgtgaaaaaaaaaaaaaaaaaaaaaaaaaaa

SEQ ID NO: 1270 - protein, 810 aa, Homo sapiens
MPMDLILVVWFCVCTARTVVGFGMDPDLQMDIVTELDLVNTTLGVAQVSGMHNASKAFLFQDIEREIHAAPHVSEKLIQLFQNKSEFTILATVQQKPSTSGVILSIRELEHSYFELESSGLRDEIRYHYIHNGKPRTEALPYRMADGQWHKVALSVSASHLLLHVDCNRIYERVIDPPDTNLPPGINLWLGQRNQKHGLFKGIIQDGKIIFMPNGYITQCPNLNHTCPTCSDFLSLVQGIMDLQELLAKMTAKLNYAETRLSQLENCHCEKTCQVSGLLYRDQDSWVDGDHCRNCTCKSGAVECRRMSCPPLNCSPDSLPVHIAGQCCKVCRPKCIYGGKVLAEGQRILTKSCRECRGGVLVKITEMCPPLNCSEKDHILPENQCCRVCRGHNFCAEGPKCGENSECKNWNTKATCECKSGYISVQGDSAYCEDIDECAAKMHYCHANTVCVNLPGLYRCDCVPGYIRVDDFSCTEHDECGSGQHNCDENAICTNTVQGHSCTCKPGYVGNGTICRAFCEEGCRYGGTCVAPNKCVCPSGFTGSHCEKDIDECSEGIIECHNHSRCVNLPGWYHCECRSGFHDDGTYSLSGESCIDIDECALRTHTCWNDSACINLAGGFDCLCPSGPSCSGDCPHEGGLKHNGQVWTLKEDRCSVCSCKDGKIFCRRTACDCQNPSADLFCCPECDTRVTSQCLDQNGHKLYRSGDNWTHSCQQCRCLEGEVDCWPLTCPNLSCEYTAILEGECCPRCVSDPCLADNITYDIRKTCLDSYGVSRLSGSVWTMAGSPCTTCKCKNGRVCCSVDFECLQNN

SEQ ID NO: 1271 - DNA, 1488 bp, Homo sapiens
gctgggaaagcgcgtccccgccgcggctccgccagtttgaacttggcgggccagatgtgggcggcggggcgctgggggcctacttttccctcttcctacgccggtttctctgctgactgcagacccaggtctcggccctcctcggactcctgctcagtccctatgacgggcgcacgtgggcaggggctggaggtggtgcgctcgccgtcgccgccgctgccgctgagctgcagcaattccaccaggtcgctgttgtctccccttggccaccagagcttccagtttgacgaggacgacggtgacggggaggatgaggaagacgtggatgatgaggaagacgtggatgaagatgcccatgattcagaggccaaagtggcgagcctgagaggaatggagttacaggggtgcgccagcactcaggttgaatcagaaaataaccaagaagaacagaaacaggtgcgcttaccagaaagccgcctgacaccatgggaggtgtggtttattggcaaagaaaaagaagaacgtgaccggctgcaactgaaagctctagaggaattaaatcaacaactagaaaaaagaaaagaaatggaagaacgtgaaaaaagaaagataattgctgaagaaaagcacaaggaatgggttcagaaaaagaatgagcaaaaaagaaaagaaagagaacaaaaaattaataaagaaatggaggaaaaagcagcaaaggaactggagaaagaatacttgcaagaaaaagcaaaagaaaaatatcaagaatggttaaagaaaaaaaatgctgaagaatgtgagaggaagaagaaagaaaaggaaaaagaaaaacaacagcaagctgaaatacaggagaaaaaggaaatagcagaaaaaaagtttcaagaatggttggaaaatgcgaaacataaacctcgtccagctgcaaagagctatggttatgccaatggaaaacttacaggtttttacagtggaaattcctatccagaaccagccttttataatccaattccgtggaaaccaattcatatgccacctcccaaagaagctaaggatctatcaggaaggaagagtaaaagacctgtgataagtcagccacacaagtcatcatctctggtaattcataaagccaggagcaatctttgccttggaactctgtgcagaatacaaagatagcgtatgtggaaaataacatgcttttatctggagctatttaatttaaaaatcagaaattgttttttactgctcagtcaataactcaacacttaatgtgattattgacaaatagcaatttttgcatttgtatatggagtccttagagttgaggaagatattttctggattttggtttttataaacttttcaaggttgatcttggcatgttgttttgcagaataagtggctgaatatgtaagaattgtgtttgtatttagcttgtattaaaagtacactgtaataccaataaaactaacaatttttcttgaaaaa

SEQ ID NO: 1272 - protein, 373 aa, Homo sapiens
MWAAGRWGPTFPSSYAGFSADCRPRSRPSSDSCSVPMTGARGQGLEVVRSPSPPLPLSCSNSTRSLLSPLGHQSFQFDEDDGDGEDEEDVDDEEDVDEDAHDSEAKVASLRGMELQGCASTQVESENNQEEQKQVRLPESRLTPWEVWFIGKEKEERDRLQLKALEELNQQLEKRKEMEEREKRKIIAEEKHKEWVQKKNEQKRKEREQKINKEMEEKAAKELEKEYLQEKAKEKYQEWLKKKNAEECERKKKEKEKEKQQQAEIQEKKEIAEKKFQEWLENAKHKPRPAAKSYGYANGKLTGFYSGNSYPEPAFYNPIPWKPIHMPPPKEAKDLSGRKSKRPVISQPHKSSSLVIHKARSNLCLGTLCRIQR

SEQ ID NO: 1273 - DNA, 2120 bp, Homo sapiens
gctgggaaagcgcgtccccgccgcggctccgccagtttgaacttggcgggccagatgtgggcggcggggcgctgggggcctacttttccctcttcctacgccggtttctctgctgactgcagacccaggtctcggccctcctcggactcctgctcagtccctatgacgggcgcacgtgggcaggggctggaggtggtgcgctcgccgtcgccgccgctgccgctgagctgcagcaattccaccaggtcgctgttgtctccccttggccaccagagcttccagtttgacgaggacgacggtgacggggaggatgaggaagacgtggatgatgaggaagacgtggatgaagatgcccatgattcagaggccaaagtggcgagcctgagaggaatggagttacaggggtgcgccagcactcaggttgaatcagaaaataaccaagaagaacagaaacaggtgcgcttaccagaaagccgcctgacaccatgggaggtgtggtttattggcaaagaaaaagaagaacgtgaccggctgcaactgaaagctctagaggaattaaatcaacaactagaaaaaagaaaagaaatggaagaacgtgaaaaaagaaagataattgctgaagaaaagcacaaggaatgggttcagaaaaagaatgagcaagtaaggaggggaaaatggatacacacattgacatctcttttgcaaaatatttcttcctattatacttcattacctaggttttaaaaaatacttctcttagagtctttcttctttggcttgttttgtttttctatcctggtggacatttatcaagtctctatcttctgccctttgccctctacttttctcctttttccctcctgtggcttgcactaatatttgcctgcaggcagtcaccaagtctgtatttctaggcctgaccttttggatccttatggcaagtgcctccaagtctgcaaatctaaaacaacccattttgcccatttctccttcgtaaatccatcctcccatttctctgtttcattcagctgtcttctcggtcatcaaggcttaattagaattcttctgttgttcctaatcatctcctccttttctttacaattactactcccctgtttgtgatctctttccattatatctttcaacttgttgtttacttcttatactggattgtaagctacataagggcagggatttttgcctcttttgttcagttttccaggagctagatgaatacctgcgcatgatatatgtccaaaaatagtttaattgagtgaagatgttcattgaatggctgcattttttccttttaattttaatatattcttctatggatcacacacattcgaaattttaaaaatacttattctgtggtcaatttgtcttctgttgtgatttttacatatttagagtggtactgcttttattattataatccagttttacaaatgtggaaaaatgtttaaattgtaggacaatattttaaattttaattctaactttttatctttattgttgaatctaatgcctaatggtattaataagagtactaagtaaataatttcagtaaattgaagatgatataaccttcttcatccaagtattataagaaggaaattggttagatgtatgtgtgttataaccatatttgtttagaagtcaattactttgtttttttaaaaaagtttacttcatcccatgatataacatgaaagagatctttgtgaataaattcaaaaatcaaaataaatctctgtgactgttataaaactttgggtaatatctttttgaaatttgtaactataaaacaaaattattttacacatgcagaatagtttgctctttcctctaaaagtccttcttatcttctaactccattaagctaattttaccatgccaatcaaacctagttgttgtttgtctaggaatgtaagatacttctgggagacaatatattcactgttttaattagtggcagtagacctaatccaattatttgaagaaaaaaaaaattatttcttttggagggaagtggcttgccctgacataaatcactagttattgaaggcaaaattccgtaatgttgagaattatttaaaaataaaactgagacgttatat

SEQ ID NO: 1274 - protein, 229 aa, Homo sapiens
MWAAGRWGPTFPSSYAGFSADCRPRSRPSSDSCSVPMTGARGQGLEVVRSPSPPLPLSCSNSTRSLLSPLGHQSFQFDEDDGDGEDEEDVDDEEDVDEDAHDSEAKVASLRGMELQGCASTQVESENNQEEQKQVRLPESRLTPWEVWFIGKEKEERDRLQLKALEELNQQLEKRKEMEEREKRKIIAEEKHKEWVQKKNEQVRRGKWIHTLTSLLQNISSYYTSLPRF

SEQ ID NO: 1275 - DNA, 5248 bp, Homo sapiens
gcgtgcaaccctagaagggaaaaggacgggaagagattgagccgcggctgggagacagcgagccagagtctgggtgtttgtgcgagagccacggcgggggctggggcgagtggccggcatggctgaaggctgcgctctgcaaccttgaagagccgctgcattgagaggccagggacagggagaccggtgcgatggcagagcgcggcccccgccgctgcgccgggccggcccggctggcctgagccgccggaggagcggggctgcctctgcgcgtccatggagcagcgggaagggcgaaactccggagcgccgcgtccctgcgccgctgcggcggactgctgaaggggccgagcccgcgcggaccgccgaggaagagacccccgctccagcccgcaggccggctgcccgggggcggcgggggacatcggagggcagcggagcgagcagcgccgcgggagaggccggcgcgggaggcggccgcagcaatgccgggcccgctagggctgctctgcttcctcgccctggggctgctcggctcggccgggcccagcggcgcggcgccgcctctctgcgcggcgccctgcagctgcgacggcgaccgtcgggtggactgctccgggaaggggctgacggccgtgcccgaggggctcagcgccttcacccaagcgctggatatcagtatgaacaacattactcagttgccagaagatgcatttaagaactttccttttctagaagagctacaattggcgggcaacgacctttcttttatccacccaaaggccttgtctgggttgaaagaactcaaagttctaacgctccagaataatcagttgaaaacagtacccagtgaagccattcgagggctgagtgctttgcagtctttgcgtttagatgccaaccatattacctcagtccccgaggacagttttgaaggacttgttcagttacggcatctgtggctggatgacaacagcttgacggaggtgcctgtgcaccccctcagcaatctgcccaccctacaggcgctgaccctggctctcaacaagatctcaagcatccctgactttgcatttaccaacctttcaagcctggtagttctgcatcttcataacaataaaattagaagcctgagtcaacactgttttgatggactagataacctggagaccttagacttgaattataataacttgggggaatttcctcaggctattaaagcccttcctagccttaaagagctaggatttcatagtaattctatttctgttatccctgatggagcatttgatggtaatccactcttaagaactatacatttgtatgataatcctctgtcttttgtggggaactcagcatttcacaatttatctgatcttcattccctagtcattcgtggtgcaagcatggtgcagcagttccccaatcttacaggaactgtccacctggaaagtctgactttgacaggtacaaagataagcagcatacctaataatttgtgtcaagaacaaaagatgcttaggactttggacttgtcttacaataatataagagaccttccaagttttaatggttgccatgctctggaagaaatttctttacagcgtaatcaaatctaccaaataaaggaaggcacctttcaaggcctgatatctctaaggattctagatctgagtagaaacctgatacatgaaattcacagtagagcttttgccacacttgggccaataactaacctagatgtaagtttcaatgaattaacttcctttcctacggaaggcctgaatgggctaaatcaactgaaacttgtgggcaacttcaagctgaaagaagccttagcagcaaaagactttgttaacctcaggtctttatcagtaccatatgcttatcagtgctgtgcattttggggttgtgactcttatgcaaatttaaacacagaagataacagcctccaggaccacagtgtggcacaggagaaaggtactgctgatgcagcaaatgtcacaagcactcttgaaaatgaagaacatagtcaaataattatccattgtacaccttcaacaggtgcttttaagccctgtgaatatttactgggaagctggatgattcgtcttactgtgtggttcattttcttggttgcattatttttcaacctgcttgttattttaacaacatttgcatcttgtacatcactgccttcgtccaaattgtttataggcttgatttctgtgtctaacttattcatgggaatctatactggcatcctaacttttcttgatgctgtgtcctggggcagattcgctgaatttggcatttggtgggaaactggcagtggctgcaaagtagctgggtttcttgcagttttctcctcagaaagtgccatatttttattaatgctagcaactgtcgaaagaagcttatctgcaaaagatataatgaaaaatgggaagagcaatcatctcaaacagttccgggttgctgcccttttggctttcctaggtgctacagtagcaggctgttttccccttttccatagaggggaatattctgcatcacccctttgtttgccatttcctacaggtgaaacgccatcattaggattcactgtaacgttagtgctattaaactcactagcatttttattaatggccgttatctacactaagctatactgcaacttggaaaaagaggacctctcagaaaactcacaatctagcatgattaagcatgtcgcttggctaatcttcaccaattgcatctttttctgccctgtggcgtttttttcatttgcaccattgatcactgcaatctctatcagccccgaaataatgaagtctgttactctgatattttttccattgcctgcttgcctgaatccagtcctgtatgttttcttcaacccaaagtttaaagaagactggaagttactgaagcgacgtgttaccaagaaaagtggatcagtttcagtttccatcagtagccaaggtggttgtctggaacaggatttctactacgactgtggcatgtactcacatttgcagggcaacctgactgtttgcgactgctgcgaatcgtttcttttaacaaagccagtatcatgcaaacacttgataaaatcacacagctgtcctgcattggcagtggcttcttgccaaagacctgagggctactggtccgactgtggcacacagtcggcccactctgattatgcagatgaagaagattcctttgtctcagacagttctgaccaggtgcaggcctgtggacgagcctgcttctaccagagtagaggattccctttggtgcgctatgcttacaatctaccaagagttaaagactgaactactgtgtgtgtaaccgtttcccccgtcaaccaaaatcagtgtttatagagtgaaccctattctcatctttcatctgggaagcacttctgtaatcactgcctggtgtcacttagaagaaggagaggtggcagtttatttctcaaaccagtcattttcaaagaacaggtgcctaaattataaattggtgaaaaatgcaatgtccaagcaatgtatgatctgtttgaaacaaatatatgacttgaaaaggatcttaggtgtagtagagcaatataatgttagttttttctgatccataagaagcaaatttatacctatttgtgtattaagcacaagataaagaacagctgttaatattttttaaaaatctattttaaaatgtgattttctataactgaagaaaatatcttgctaattttacctaatgtttcatccttaatctcaggacaacttactgcagggccaaaaaagggactgtcccagctagaactgtgagagtatacataggcattactttattatgttttcacttgccatccttgacataagagaactataaattttgtttaagcaatttataaatctaaaacctgaagatgtttttaaaacaatattaacagctgttaggttaaaaaaatagctggacatttgttttcagtcattatacattgctttggtccaatcagtaattttttcttaagtgttttgtgattacactactagaaaaaaagtaaaaggctaattgctgtgtgggtttagtcgatttggctaaactactaactaatgtgggggtttaatagtatctgagggatttggtggcttcatgtaatgttctcattaatgaatacttcctaatatcgttggctctactaatattttccaatttgctgggatgtcacctagcaatagcttggattatatagaaagtaaactgtggtcaatacttgcatttaattagacgaaacggggagtaattatgacacgaagtacttatgtttatttcttagtgagctggattatcttgaacctgtgctattaaatggaaatttccatacatcttccccatactattttttataaaagagcctattcaatagctcagaggttgaactctggttaaacaagataatatgttattaataaaaatagaagaagaaagaataaagcttagtcctgtgtctttaaaaattaaaaattttacttgattcccatctatgggctttagacctattactgggtggagtcttaaagttataattgttcaatatgttttttgaacagtgtgctaaatcaatagcaaacccactgccatattagttattctgaatatactaaaaaaatccagctagattgcagtttaataattaaactgtacatactgtgcatataatgaatttttatcttatgtaaattatttttagaacacaagttgggaaatgtggcttctgttcatttcgtttaattaaagctacctcctaaactatagtggctgccagtagcagactgttaaattgtggtttatatactttttgcattgtaaatagtctttgttgtacattgtcagtgtaataaaaacagaatctttgtatatcaaaatcatgtagtttgtataaaatgtgggaaggatttatttacagtgtgttgtaattttgtaaggccaactatttacaagttttaaaaattgctatcatgtatatttacacatctgataaatattaaatcataacttggtaagaaactcctaattaaaaggttttttccaaaattcaggttattgaaaacttttcattttattcatttaaaaactagaataacagatatataaaagtgttaatctttgtgctatatggtatgaaatacaatattgtactcagtgttttgaattattaaagtttctagaaagcaaa

SEQ ID NO: 1276 - protein, 951 aa, Homo sapiens
MPGPLGLLCFLALGLLGSAGPSGAAPPLCAAPCSCDGDRRVDCSGKGLTAVPEGLSAFTQALDISMNNITQLPEDAFKNFPFLEELQLAGNDLSFIHPKALSGLKELKVLTLQNNQLKTVPSEAIRGLSALQSLRLDANHITSVPEDSFEGLVQLRHLWLDDNSLTEVPVHPLSNLPTLQALTLALNKISSIPDFAFTNLSSLVVLHLHNNKIRSLSQHCFDGLDNLETLDLNYNNLGEFPQAIKALPSLKELGFHSNSISVIPDGAFDGNPLLRTIHLYDNPLSFVGNSAFHNLSDLHSLVIRGASMVQQFPNLTGTVHLESLTLTGTKISSIPNNLCQEQKMLRTLDLSYNNIRDLPSFNGCHALEEISLQRNQIYQIKEGTFQGLISLRILDLSRNLIHEIHSRAFATLGPITNLDVSFNELTSFPTEGLNGLNQLKLVGNFKLKEALAAKDFVNLRSLSVPYAYQCCAFWGCDSYANLNTEDNSLQDHSVAQEKGTADAANVTSTLENEEHSQIIIHCTPSTGAFKPCEYLLGSWMIRLTVWFIFLVALFFNLLVILTTFASCTSLPSSKLFIGLISVSNLFMGIYTGILTFLDAVSWGRFAEFGIWWETGSGCKVAGFLAVFSSESAIFLLMLATVERSLSAKDIMKNGKSNHLKQFRVAALLAFLGATVAGCFPLFHRGEYSASPLCLPFPTGETPSLGFTVTLVLLNSLAFLLMAVIYTKLYCNLEKEDLSENSQSSMIKHVAWLIFTNCIFFCPVAFFSFAPLITAISISPEIMKSVTLIFFPLPACLNPVLYVFFNPKFKEDWKLLKRRVTKKSGSVSVSISSQGGCLEQDFYYDCGMYSHLQGNLTVCDCCESFLLTKPVSCKHLIKSHSCPALAVASCQRPEGYWSDCGTQSAHSDYADEEDSFVSDSSDQVQACGRACFYQSRGFPLVRYAYNLPRVKD

SEQ ID NO: 1277 - DNA, 4729 bp, Homo sapiens
gaagatggcggcgctaggggaacccgtgcggctggagagagatatttgtagagcaattgaattattggaaaaactacaaaggagtggagaagtaccaccacagaaacttcaggctttgcaaagagtccttcaaagtgaattctgcaatgctgtgagagaggtatatgaacatgtctatgagactgtggacatcagtagcagtcctgaagtgagagcgaacgctactgcaaaggctactgttgctgcatttgctgccagtgaaggacattctcatcctcgagttgttgagctaccaaaaacagaagagggccttggattcaatattatgggaggcaaagaacaaaactctccaatctatatatcccgaataattccaggtggaattgctgatagacatgggggcctcaaacgtggagatcaactcctctctgttaatggagtgagtgttgaaggagaacatcatgaaaaagctgtagaactgctgaaagccgcacaaggaaaggttaaattagtggtacgatacacacccaaagtcttagaagaaatggagtcgcgctttgaaaaaatgagatcagcaaaacgcaggcaacagacctaatacatttcaaaacttgatatttcattttgcgttttagctagagaagttttccttgtgacttactaatggctgcaatgccaatgattgtaagaaaacaaacaaatttatcatgaaattctccttgtcattttataaatgcctattttaacatcatttatggttccagagatgcatacacttttttctgacaagaaaaagtaaaaggtgatgagggcaattctgtcctactgtttttacaggcctttttcaaatgcagattttgtcataaagttgttatagattttttaaaatgcttttttaatattaaaatgtacttttacattcttaatctttttttagaaaggaaaagttttcttcatttagctgctgatttaaaagtaaagttctccaattctttttttttgcttactctattttttttaacctgtgaaatttctttacagttttccaagaaattaagcataacagtctcatctacggcagttcattacactgtcaatgttaacatcattgctgcattttgtactttgaacacacacataatatatataaccagtggtaaatcatgactcagtacagtgcaagttttttcacttttacttaaacataatatataatggatattcatttatactgatttatgaaagtaagtttttaaacactgaaacaatcattgctaaaatacatattcttaatatttgagcattgaggcaagaggatgtaattgatagcattacttattacatccctatttatgttcaaccgtacatcaaattataaatgcaaaacaggttcagatttcatcttttgtgatttcttttaaatactattcatttttatttaaatgcacagtatttcccctatattttagtccttccattcctagagacaaaccagttatttggtggtgggaagtagctgaagcaaagaaggaaaagtaatacctttaacctcactagcttcaagagtagacattcttactagctcaatttaaataattgattttaaataggaagaaaagaggatatatttaagatacatagaaattatgatgtgaagtattcatgagaatctgtagattccatcaaaataagtaggaactcatactaaaattgttggatttaaagaggcaacttttgtttatgattcaaatatgggaatttgagaaatatttcatttgtccactggatgtcactattttactaaaaggcagctattagtgtgggactgtgactgaggtcttaaagactgaaagagttggggttcattttctgttacaacttacaggaacatttgtactttaagaaaaatttaagtgacaaatgttagaagatgatggattgaaaaatataagtaatttggcatattgaccctatataaaaaagtgggcattttgtaacattccttcaggaagaatagaattgtatgcttttttctgcatgtttgtgatcactgtgagtctcagatgattattccagttttcaatgatttttcaaaataaaagtcaatcagcattgttatttatcattaaggtattgaacactggattgcatggttgaatgtgtctttaatccactacaaaatgtgcttgttattgataggatcatgttgttaaattgtaaattttcaaaattaattgatgttttaaaaatgttgagaccaaagtagtatagaagtatggacttaatttaattgtaaaattattagaggtatttgttgtagagctttatatattaaagagaggtattggtgcatataaaaacagtaatattattgttatgcttgtattcttgcatttcagggtaagtaaaccctgaagaaatcttattttagtatagctacagctgcagtagcttttaagtatgtatcaacatttcattataaattatagcttcctggttctgtgtctcagctgtttcagaactttcagccaagttaaatcttttttggtgttgaaacttttagtaagttgagtaagctatttttttccctacggtaatccacaatctgttctttgtgtgggttgacacctatttataattcttaaaataagggtagctcaaaggagccaagtacagtagtttagcttgctactgttgagcatgaatagcagtaggttgttttcattaatgcagttttcataatgtatcccagaattttaaatcttgaccatagaaaaatacagtcattcattggcaaagatgtacagtggtggtttagtgcagtgaggaaatgatgggaatttttatcttagaaatggatgattcgtgaataaaactaggtacatagtaagtgtatgatagatgtttgatttgtaaattacaaatataaattatcacccccatttccatttattttcttgatatatcaaaatgtgttgacttagtgattctcaatcttagctacatattagcctggcagagctttaaaaaattgatacctgggtcctattccataacaactaaatcaaaatcaccctttttttttttgtaaagctttccaggtggttctaaaggacacctggggtcaataacccattataaaatgatctgattacactggacactcttaggaagtatcaaaatagaacagttcaatttgcagctacttaatgattaattacatttcttaggtttttttttgttttttttttggtttgtttgttttttgttttaaaagagacaggatcttgctttgtctcccaggctggaacacagtggtgtgatcatagctcactgcagcctgaaactccttggcttccacctcagcctcccaaagcattaggattataggcgtgagccactgcacctggccaagtaatttcttttaggaataaaaggtacttggcattccttatttgggaagtaattacagtcttatctttttttttcttttttcttttttttaataaaatctaccagtaatttaaatgtgagctttttatgtctgtcatcattctgccccctttgcctttaaaacttacaaaaatacgtgtttgttatttgagaaagcatgtttaaaaattgcagatgagaaatattgtcgttaataattatgtactgtcttaatgtgggcacttcatttgttagtataatactagataatagcagcctagttctttaggatttgacgattcaaattttttttttgttttttgtttttgtttttttttgagacagagtcttgctctgttgcccaggctggcgtgcagtggtgtgatctcggctcacttcagcctccgccacctcaaggcagttcaagcaattctcctgcctcagcctcccgagtagctaggactacaggcgtgtgccacctctcccggctaattttttggtatttttagtagagacggggtttcaccgtgttagccaggatgatctcgatctcctgacctcgtgattcacccccctcggcctcccaaagtgctggaattactggcgtgagccaccatgcccagcctcaaatatgtttttaaaaaatatcattgtcctcctcctcttaagatttttttaagttattttgctcaagtacttaagtagtctggctcaagtactttgtttacaattaaaatggatattatagcatttaatagaagaaatggttatggcttatccaaaaagaatgtcagcatgacctggtgtagacttaaaaaactacatgtttgtgaatattttataatgtggaatgatcattgaaatatcaaggattctagtaattgtatttcctgaataaatgtatgtttatgaattttctaacttacattttgttgtgtcctctgccaacaatctggttttataattgttgtctaaagtttgctagtagtgtttcttcaaaggttattccaggtatggttaagtagtgagaaaaatcacttattaattttcaagaactttgagactaatttgtattgactcggttttttaaaataactggcaaatgctatgcttctacttttaaaatttgtggtaatacccagaatggatgtaaaataacatttttcaatagattacttcatttatcaatttaattctgattttaaggcttatttaaaataaatttgtatgagttaaaaaaaaaaaaaaaaaaaaaaaaaaaaaaaaaaaaaaaaaaaaaaaaaaaaaaaaaaaaaaa

SEQ ID NO: 1278 - protein, 197 aa, Homo sapiens
MAALGEPVRLERDICRAIELLEKLQRSGEVPPQKLQALQRVLQSEFCNAVREVYEHVYETVDISSSPEVRANATAKATVAAFAASEGHSHPRVVELPKTEEGLGFNIMGGKEQNSPIYISRIIPGGIADRHGGLKRGDQLLSVNGVSVEGEHHEKAVELLKAAQGKVKLVVRYTPKVLEEMESRFEKMRSAKRRQQT

SEQ ID NO: 1279 - DNA, 2364 bp, Homo sapiens
gtcatcgctgtctggaacagcgatgactcgatcgcgagatcaggaaggtggccgagtgtgtcgccgcggccatcaggcacttctccttcctgcccttgtatgaagaaggatgtgtttgcttccccttgtgccatgattgtaaatttcctgaggcctcctcagccctgcagaactggggttatagccatgtgactgatcttcgtccaagaatatgtaaagaaaaagtgttgagttggcttttagggctagagcaatgtatcttaggctcacttaaggaagctgtagagatgagcccaaggagggaaaccagaagagccccccaggctcaccagttgtttgttggctccctacaaacatgtcattcaagtggctaatcttacaacagcacaaattcatctaaccagaaagagaagaggaggctccaaaggcacttgactactgagcatcaccctggacgtgtacaagtctgcgtccttattgttttcttcattgggccgaactttctggtcctcatccaacagctcttctatcacgtgttcgaaagtgtcagccaatgatgtcaagcatcttgaacctgccttgggcccattcacgctctccagagtcccatgggtccgcacacctggagatactctattatagcaaagaagaaagataatttcattgagccatcctgttttacagtattgaattattaccacaaggtaccaaccatatatgcatacttaatagggtattttgtcaaaactatgcatgaaggtcatttgtttgagatgtcagaacattttcccgtgagaagatctcattgggcattgaaacagaaccacatgctcttcagaccagcaaccgcgactaccaaatactcctctgtcaactctacttgagtaagaacgctttcaattaaggcctaagtgtcaacatgcctttaaaaaaaatcgtggtgacacaaaatctttctttttagcacccaacagaatcccttcaaagcctcgtggtctgacaccctatgctacgtgacttgtgacccatccatttgtcatgttcttcgggaatgtggctaaggggctaagatgtgacttgaaaagaaaggtagaacaagatcatctcaaatttattatcaaggaatagttcagaaaacgacttcagaccacagagacagcagaacagatggtccggcatggatagagcatcagacactcacagactgtgccaacaagagccatcgagtcaaaacagccaaaggaaggagggtcatggaatgggttctctcacaccaaactgatgcccagaggccctcagcatgaataacaaaggcaaccagacccacaagccatactgagtggatacaaaacctatacctaggctgacatcccaaatgtgtgtggcaagttagatgatgatggcacaaaagacagaacaccttgcttctggccattgtcagctcttggaagagagcacacttttagaggagcagctgcaaggagcctgagaacaaaactggaaatgtctgttatgaaagccttcacaggaaattctgcaagtggcaacgtgggtccattccgtgtgtgtcactagagctggcgcaagcccatggccatggtgaggcagcgtttccactggaactaatctgatacctgcaccaactcttgcaactgtgcagtgttcccactgcaaactacggatggggtaaaagactgctcacctcctatttctcatctaatctcacacactctgtttgatgaggctatggagaaacaggtcttctcatacactaaaggtgggagtacaaacaattcaagccctgtgcaggacaattaggcaatacctatcaaaattatacatgatttttcctgctgacccagcaattccacttttgggaataattgacagatataggtgcatatgtacaaaatgatggaaagctctctggtatatattagtaagtgataaaacaaggtgtaaaatagtgtatatatggctactaccttttgttttaaaaatgggggaaaatggtggagcttgcggtgagccgagatcgtgccactgcactccagcctgggcgacagagcgagactccgtctcaaaaaaaaaacagggtggggtgggggggaaataatagtacatactcatatttacctgtatctatataaaacacactatcaaggattcacaagaaactaatacaaatgatccccttatagatggtatgtattgggggatactgaggtgagcagggtataagtggggcaagacttttcagtgtaaacttcttttaaattttattttgatttttgaataatgtaaattaactgtcaaataattaaattaaaaataaccaatttattaacaaaaaaaaaaaaaaaa

SEQ ID NO: 1280 - DNA, 3972 bp, Homo sapiens
gctgccgccgccgcgcccgggcgcacccgcccgctcgctgtcccgcgcaccccgtagcgcctcgggctcccgggccggacagaggagccagcccggtgcgcccctccacctcctgctcggggggctttaatgagacacccaccgctgctgtggggccggcggggagcagcaccgcgacggggaccggggctgggcgctggagccagaatcggaaccacgatgtgactccgccgccggggacccgtgaggtttgtgtggaccccgagttccaccaggtgagaagagtgatgaccatccttttccttactatggttatttcatactttggttgcatgaaggctgcccccatgaaagaagcaaacatccgaggacaaggtggcttggcctacccaggtgtgcggacccatgggactctggagagcgtgaatgggcccaaggcaggttcaagaggcttgacatcattggctgacactttcgaacacgtgatagaagagctgttggatgaggaccagaaagttcggcccaatgaagaaaacaataaggacgcagacttgtacacgtccagggtgatgctcagtagtcaagtgcctttggagcctcctcttctctttctgctggaggaatacaaaaattacctagatgctgcaaacatgtccatgagggtccggcgccactctgaccctgcccgccgaggggagctgagcgtgtgtgacagtattagtgagtgggtaacggcggcagacaaaaagactgcagtggacatgtcgggcgggacggtcacagtccttgaaaaggtccctgtatcaaaaggccaactgaagcaatacttctacgagaccaagtgcaatcccatgggttacacaaaagaaggctgcaggggcatagacaaaaggcattggaactcccagtgccgaactacccagtcgtacgtgcgggcccttaccatggatagcaaaaagagaattggctggcgattcataaggatagacacttcttgtgtatgtacattgaccattaaaaggggaagatagtggatttatgttgtatagattagattatattgagacaaaaattatctatttgtatatatacataacagggtaaattattcagttaagaaaaaaataattttatgaactgcatgtataaatgaagtttatacagtacagtggttctacaatctatttattggacatgtccatgaccagaagggaaacagtcatttgcgcacaacttaaaaagtctgcattacattccttgataatgttgtggtttgttgccgttgccaagaactgaaaacataaaaagttaaaaaaaataataaattgcatgctgctttaattgtgaattgataataaactgtcctctttcagaaaacagaaaaaaaacacacacacacacaacaaaaatttgaaccaaaacattccgtttacattttagacagtaagtatcttcgttcttgttagtactatatctgttttactgcttttaacttctgatagcgttggaattaaaacaatgtcaaggtgctgttgtcattgctttactggcttaggggatgggggatggggggtatatttttgtttgttttgtgtttttttttcgtttgtttgttttgttttttagttcccacagggagtagagatggggaaagaattcctacaatatatattctggctgataaaagatacatttgtatgttgtgaagatgtttgcaatatcgatcagatgactagaaagtgaataaaaattaaggcaactgaacaaaaaaatgctcacactccacatcccgtgatgcacctcccaggccccgctcattctttgggcgttggtcagagtaagctgcttttgacggaaggacctatgtttgctcagaacacattctttccccccctccccctctggtctcctctttgttttgttttaaggaagaaaaatcagttgcgcgttctgaaatattttaccactgctgtgaacaagtgaacacattgtgtcacatcatgacactcgtataagcatggagaacagtgatttttttttagaacagaaaacaacaaaaaataaccccaaaatgaagattattttttatgaggagtgaacatttgggtaaatcatggctaagcttaaaaaaaactcatggtgaggcttaacaatgtcttgtaagcaaaaggtagagccctgtatcaacccagaaacacctagatcagaacaggaatccacattgccagtgacatgagactgaacagccaaatggaggctatgtggagttggcattgcatttaccggcagtgcgggaggaatttctgagtggccatcccaaggtctaggtggaggtggggcatggtatttgagacattccaaaacgaaggcctctgaaggacccttcagaggtggctctggaatgacatgtgtcaagctgcttggacctcgtgctttaagtgcctacattatctaactgtgctcaagaggttctcgactggaggaccacactcaagccgacttatgcccaccatcccacctctggataattttgcataaaattggattagcctggagcaggttgggagccaaatgtggcatttgtgatcatgagattgatgcaatgagatagaagatgtttgctacctgaacacttattgctttgaaactagacttgaggaaaccagggtttatcttttgagaacttttggtaagggaaaagggaacaggaaaagaaaccccaaactcaggccgaatgatcaaggggacccataggaaatcttgtccagagacaagacttcgggaaggtgtctggacattcagaacaccaagacttgaaggtgccttgctcaatggaagaggccaggacagagctgacaaaattttgctccccagtgaaggccacagcaaccttctgcccatcctgtctgttcatggagagggtccctgcctcacctctgccattttgggttaggagaagtcaagttgggagcctgaaatagtggttcttggaaaaatggatccccagtgaaaactagagctctaagcccattcagcccatttcacacctgaaaatgttagtgatcaccacttggaccagcatccttaagtatcagaaagccccaagcaattgctgcatcttagtagggtgagggataagcaaaagaggatgttcaccataacccaggaatgaagataccatcagcaaagaatttcaatttgttcagtctttcatttagagctagtctttcacagtaccatctgaatacctctttgaaagaaggaagactttacgtagtgtagatttgttttgtgttgtttgaaaatattatctttgtaattatttttaatatgtaaggaatgcttggaatatctgctatatgtcaactttatgcagcttccttttgagggacaaatttaaaacaaacaaccccccatcacaaacttaaaggattgcaagggccagatctgttaagtggtttcataggagacacatccagcaattgtgtggtcagtggctcttttacccaataagatacatcacagtcacatgcttgatggtttatgttgacctaagatttattttgttaaaatctctctctgttgtgttcgttcttgttctgttttgttttgttttttaaagtcttgctgtggtctctttgtggcagaagtgtttcatgcatggcagcaggcctgttgcttttttatggcgattcccattgaaaatgtaagtaaatgtctgtggccttgttctctctatggtaaagatattattcaccatgtaaaacaaaaaacaatatttattgtattttagtatatttatataattatgttattgaaaaaaattggcattaaaacttaaccgcatcagaacctattgtaaatacaagttctatttaagtgtactaattaacatataatatatgttttaaatatagaatttttaatgtttttaaatatattttcaaagtacataaaaaaaaaaaaaaaaaa

SEQ ID NO: 1281 - protein, 247 aa, Homo sapiens
MTILFLTMVISYFGCMKAAPMKEANIRGQGGLAYPGVRTHGTLESVNGPKAGSRGLTSLADTFEHVIEELLDEDQKVRPNEENNKDADLYTSRVMLSSQVPLEPPLLFLLEEYKNYLDAANMSMRVRRHSDPARRGELSVCDSISEWVTAADKKTAVDMSGGTVTVLEKVPVSKGQLKQYFYETKCNPMGYTKEGCRGIDKRHWNSQCRTTQSYVRALTMDSKKRIGWRFIRIDTSCVCTLTIKRGR

SEQ ID NO: 1282 - DNA, 4044 bp, Homo sapiens
ggcaatcattggtaacctcgctcattcattagaatcacgtaagaactcaaaaggaaacgtgtctctcggagtgagggcgtttgcgtaaatctataggtttttcgacatcgatgccagttgctttgtcttctgtagtcgccaaggtggttgagagtttaagcttgcggatattgcaaagggttattagattcataagtcacaccaagtggtgggcgatccactgagcaaagccgaacttctcacatgatgacttcaaacaagacacattaccttccagcatctgttggggagacgagattttaagacacttgagtctccaggacagcaaaggcacaatgttccaccaggtgagaagagtgatgaccatccttttccttactatggttatttcatactttggttgcatgaaggctgcccccatgaaagaagcaaacatccgaggacaaggtggcttggcctacccaggtgtgcggacccatgggactctggagagcgtgaatgggcccaaggcaggttcaagaggcttgacatcattggctgacactttcgaacacgtgatagaagagctgttggatgaggaccagaaagttcggcccaatgaagaaaacaataaggacgcagacttgtacacgtccagggtgatgctcagtagtcaagtgcctttggagcctcctcttctctttctgctggaggaatacaaaaattacctagatgctgcaaacatgtccatgagggtccggcgccactctgaccctgcccgccgaggggagctgagcgtgtgtgacagtattagtgagtgggtaacggcggcagacaaaaagactgcagtggacatgtcgggcgggacggtcacagtccttgaaaaggtccctgtatcaaaaggccaactgaagcaatacttctacgagaccaagtgcaatcccatgggttacacaaaagaaggctgcaggggcatagacaaaaggcattggaactcccagtgccgaactacccagtcgtacgtgcgggcccttaccatggatagcaaaaagagaattggctggcgattcataaggatagacacttcttgtgtatgtacattgaccattaaaaggggaagatagtggatttatgttgtatagattagattatattgagacaaaaattatctatttgtatatatacataacagggtaaattattcagttaagaaaaaaataattttatgaactgcatgtataaatgaagtttatacagtacagtggttctacaatctatttattggacatgtccatgaccagaagggaaacagtcatttgcgcacaacttaaaaagtctgcattacattccttgataatgttgtggtttgttgccgttgccaagaactgaaaacataaaaagttaaaaaaaataataaattgcatgctgctttaattgtgaattgataataaactgtcctctttcagaaaacagaaaaaaaacacacacacacacaacaaaaatttgaaccaaaacattccgtttacattttagacagtaagtatcttcgttcttgttagtactatatctgttttactgcttttaacttctgatagcgttggaattaaaacaatgtcaaggtgctgttgtcattgctttactggcttaggggatgggggatggggggtatatttttgtttgttttgtgtttttttttcgtttgtttgttttgttttttagttcccacagggagtagagatggggaaagaattcctacaatatatattctggctgataaaagatacatttgtatgttgtgaagatgtttgcaatatcgatcagatgactagaaagtgaataaaaattaaggcaactgaacaaaaaaatgctcacactccacatcccgtgatgcacctcccaggccccgctcattctttgggcgttggtcagagtaagctgcttttgacggaaggacctatgtttgctcagaacacattctttccccccctccccctctggtctcctctttgttttgttttaaggaagaaaaatcagttgcgcgttctgaaatattttaccactgctgtgaacaagtgaacacattgtgtcacatcatgacactcgtataagcatggagaacagtgatttttttttagaacagaaaacaacaaaaaataaccccaaaatgaagattattttttatgaggagtgaacatttgggtaaatcatggctaagcttaaaaaaaactcatggtgaggcttaacaatgtcttgtaagcaaaaggtagagccctgtatcaacccagaaacacctagatcagaacaggaatccacattgccagtgacatgagactgaacagccaaatggaggctatgtggagttggcattgcatttaccggcagtgcgggaggaatttctgagtggccatcccaaggtctaggtggaggtggggcatggtatttgagacattccaaaacgaaggcctctgaaggacccttcagaggtggctctggaatgacatgtgtcaagctgcttggacctcgtgctttaagtgcctacattatctaactgtgctcaagaggttctcgactggaggaccacactcaagccgacttatgcccaccatcccacctctggataattttgcataaaattggattagcctggagcaggttgggagccaaatgtggcatttgtgatcatgagattgatgcaatgagatagaagatgtttgctacctgaacacttattgctttgaaactagacttgaggaaaccagggtttatcttttgagaacttttggtaagggaaaagggaacaggaaaagaaaccccaaactcaggccgaatgatcaaggggacccataggaaatcttgtccagagacaagacttcgggaaggtgtctggacattcagaacaccaagacttgaaggtgccttgctcaatggaagaggccaggacagagctgacaaaattttgctccccagtgaaggccacagcaaccttctgcccatcctgtctgttcatggagagggtccctgcctcacctctgccattttgggttaggagaagtcaagttgggagcctgaaatagtggttcttggaaaaatggatccccagtgaaaactagagctctaagcccattcagcccatttcacacctgaaaatgttagtgatcaccacttggaccagcatccttaagtatcagaaagccccaagcaattgctgcatcttagtagggtgagggataagcaaaagaggatgttcaccataacccaggaatgaagataccatcagcaaagaatttcaatttgttcagtctttcatttagagctagtctttcacagtaccatctgaatacctctttgaaagaaggaagactttacgtagtgtagatttgttttgtgttgtttgaaaatattatctttgtaattatttttaatatgtaaggaatgcttggaatatctgctatatgtcaactttatgcagcttccttttgagggacaaatttaaaacaaacaaccccccatcacaaacttaaaggattgcaagggccagatctgttaagtggtttcataggagacacatccagcaattgtgtggtcagtggctcttttacccaataagatacatcacagtcacatgcttgatggtttatgttgacctaagatttattttgttaaaatctctctctgttgtgttcgttcttgttctgttttgttttgttttttaaagtcttgctgtggtctctttgtggcagaagtgtttcatgcatggcagcaggcctgttgcttttttatggcgattcccattgaaaatgtaagtaaatgtctgtggccttgttctctctatggtaaagatattattcaccatgtaaaacaaaaaacaatatttattgtattttagtatatttatataattatgttattgaaaaaaattggcattaaaacttaaccgcatcagaacctattgtaaatacaagttctatttaagtgtactaattaacatataatatatgttttaaatatagaatttttaatgtttttaaatatattttcaaagtacataaaaaaaaaaaaaaaaaa

SEQ ID NO: 1283 - protein, 255 aa, Homo sapiens
MFHQVRRVMTILFLTMVISYFGCMKAAPMKEANIRGQGGLAYPGVRTHGTLESVNGPKAGSRGLTSLADTFEHVIEELLDEDQKVRPNEENNKDADLYTSRVMLSSQVPLEPPLLFLLEEYKNYLDAANMSMRVRRHSDPARRGELSVCDSISEWVTAADKKTAVDMSGGTVTVLEKVPVSKGQLKQYFYETKCNPMGYTKEGCRGIDKRHWNSQCRTTQSYVRALTMDSKKRIGWRFIRIDTSCVCTLTIKRGR

SEQ ID NO: 1284 - DNA, 4084 bp, Homo sapiens
gtgtgtaatccgggcgataggagtccattcagcaccttggacagagccaacggatttgtccgaggtggcggtacccccaggtagtcttcttggccccgctgtaaagccaaccctgtgtcgcccttaaaaagcgtcttttctgaggttcggctcacactgagatcggggctggagagagagtcagattttggagcggagcgtttggaaagcgagccccagtttggtcccctcattgagctcgctgaagttggcttcctagcggtgtaggctggaatagactcttggcaagctccgggttggtatactgggttaactttgggaaatgcaagtgtttatctccaggatctagccaccggggtggtgtaagccgcaaagaagttccaccaggtgagaagagtgatgaccatccttttccttactatggttatttcatactttggttgcatgaaggctgcccccatgaaagaagcaaacatccgaggacaaggtggcttggcctacccaggtgtgcggacccatgggactctggagagcgtgaatgggcccaaggcaggttcaagaggcttgacatcattggctgacactttcgaacacgtgatagaagagctgttggatgaggaccagaaagttcggcccaatgaagaaaacaataaggacgcagacttgtacacgtccagggtgatgctcagtagtcaagtgcctttggagcctcctcttctctttctgctggaggaatacaaaaattacctagatgctgcaaacatgtccatgagggtccggcgccactctgaccctgcccgccgaggggagctgagcgtgtgtgacagtattagtgagtgggtaacggcggcagacaaaaagactgcagtggacatgtcgggcgggacggtcacagtccttgaaaaggtccctgtatcaaaaggccaactgaagcaatacttctacgagaccaagtgcaatcccatgggttacacaaaagaaggctgcaggggcatagacaaaaggcattggaactcccagtgccgaactacccagtcgtacgtgcgggcccttaccatggatagcaaaaagagaattggctggcgattcataaggatagacacttcttgtgtatgtacattgaccattaaaaggggaagatagtggatttatgttgtatagattagattatattgagacaaaaattatctatttgtatatatacataacagggtaaattattcagttaagaaaaaaataattttatgaactgcatgtataaatgaagtttatacagtacagtggttctacaatctatttattggacatgtccatgaccagaagggaaacagtcatttgcgcacaacttaaaaagtctgcattacattccttgataatgttgtggtttgttgccgttgccaagaactgaaaacataaaaagttaaaaaaaataataaattgcatgctgctttaattgtgaattgataataaactgtcctctttcagaaaacagaaaaaaaacacacacacacacaacaaaaatttgaaccaaaacattccgtttacattttagacagtaagtatcttcgttcttgttagtactatatctgttttactgcttttaacttctgatagcgttggaattaaaacaatgtcaaggtgctgttgtcattgctttactggcttaggggatgggggatggggggtatatttttgtttgttttgtgtttttttttcgtttgtttgttttgttttttagttcccacagggagtagagatggggaaagaattcctacaatatatattctggctgataaaagatacatttgtatgttgtgaagatgtttgcaatatcgatcagatgactagaaagtgaataaaaattaaggcaactgaacaaaaaaatgctcacactccacatcccgtgatgcacctcccaggccccgctcattctttgggcgttggtcagagtaagctgcttttgacggaaggacctatgtttgctcagaacacattctttccccccctccccctctggtctcctctttgttttgttttaaggaagaaaaatcagttgcgcgttctgaaatattttaccactgctgtgaacaagtgaacacattgtgtcacatcatgacactcgtataagcatggagaacagtgatttttttttagaacagaaaacaacaaaaaataaccccaaaatgaagattattttttatgaggagtgaacatttgggtaaatcatggctaagcttaaaaaaaactcatggtgaggcttaacaatgtcttgtaagcaaaaggtagagccctgtatcaacccagaaacacctagatcagaacaggaatccacattgccagtgacatgagactgaacagccaaatggaggctatgtggagttggcattgcatttaccggcagtgcgggaggaatttctgagtggccatcccaaggtctaggtggaggtggggcatggtatttgagacattccaaaacgaaggcctctgaaggacccttcagaggtggctctggaatgacatgtgtcaagctgcttggacctcgtgctttaagtgcctacattatctaactgtgctcaagaggttctcgactggaggaccacactcaagccgacttatgcccaccatcccacctctggataattttgcataaaattggattagcctggagcaggttgggagccaaatgtggcatttgtgatcatgagattgatgcaatgagatagaagatgtttgctacctgaacacttattgctttgaaactagacttgaggaaaccagggtttatcttttgagaacttttggtaagggaaaagggaacaggaaaagaaaccccaaactcaggccgaatgatcaaggggacccataggaaatcttgtccagagacaagacttcgggaaggtgtctggacattcagaacaccaagacttgaaggtgccttgctcaatggaagaggccaggacagagctgacaaaattttgctccccagtgaaggccacagcaaccttctgcccatcctgtctgttcatggagagggtccctgcctcacctctgccattttgggttaggagaagtcaagttgggagcctgaaatagtggttcttggaaaaatggatccccagtgaaaactagagctctaagcccattcagcccatttcacacctgaaaatgttagtgatcaccacttggaccagcatccttaagtatcagaaagccccaagcaattgctgcatcttagtagggtgagggataagcaaaagaggatgttcaccataacccaggaatgaagataccatcagcaaagaatttcaatttgttcagtctttcatttagagctagtctttcacagtaccatctgaatacctctttgaaagaaggaagactttacgtagtgtagatttgttttgtgttgtttgaaaatattatctttgtaattatttttaatatgtaaggaatgcttggaatatctgctatatgtcaactttatgcagcttccttttgagggacaaatttaaaacaaacaaccccccatcacaaacttaaaggattgcaagggccagatctgttaagtggtttcataggagacacatccagcaattgtgtggtcagtggctcttttacccaataagatacatcacagtcacatgcttgatggtttatgttgacctaagatttattttgttaaaatctctctctgttgtgttcgttcttgttctgttttgttttgttttttaaagtcttgctgtggtctctttgtggcagaagtgtttcatgcatggcagcaggcctgttgcttttttatggcgattcccattgaaaatgtaagtaaatgtctgtggccttgttctctctatggtaaagatattattcaccatgtaaaacaaaaaacaatatttattgtattttagtatatttatataattatgttattgaaaaaaattggcattaaaacttaaccgcatcagaacctattgtaaatacaagttctatttaagtgtactaattaacatataatatatgttttaaatatagaatttttaatgtttttaaatatattttcaaagtacataaaaaaaaaaaaaaaaaa

SEQ ID NO: 1285 - protein, 247 aa, Homo sapiens; identical to SEQ ID NO: 1281

SEQ ID NO: 1286 - DNA, 4016 bp, Homo sapiens
ggctgctctcgctgccgctccccccggcgaactagcatgaaatctccctgcctctgccgagatcaaatggagcttctcgctgatggggtgcgagtattacctccgccatgcaatttccactatcaataatttaacttctttgctgcagaacagaaggagtacataccgggcaccaaagactcgcgccccctcccccctttaattaagcgaagggaacgtgaaaaaataatagagtgtgggagttttggggccgaagtctttcccggagcagctgccttgatggttactttgacaagtagtgactgaaaagttccaccaggtgagaagagtgatgaccatccttttccttactatggttatttcatactttggttgcatgaaggctgcccccatgaaagaagcaaacatccgaggacaaggtggcttggcctacccaggtgtgcggacccatgggactctggagagcgtgaatgggcccaaggcaggttcaagaggcttgacatcattggctgacactttcgaacacgtgatagaagagctgttggatgaggaccagaaagttcggcccaatgaagaaaacaataaggacgcagacttgtacacgtccagggtgatgctcagtagtcaagtgcctttggagcctcctcttctctttctgctggaggaatacaaaaattacctagatgctgcaaacatgtccatgagggtccggcgccactctgaccctgcccgccgaggggagctgagcgtgtgtgacagtattagtgagtgggtaacggcggcagacaaaaagactgcagtggacatgtcgggcgggacggtcacagtccttgaaaaggtccctgtatcaaaaggccaactgaagcaatacttctacgagaccaagtgcaatcccatgggttacacaaaagaaggctgcaggggcatagacaaaaggcattggaactcccagtgccgaactacccagtcgtacgtgcgggcccttaccatggatagcaaaaagagaattggctggcgattcataaggatagacacttcttgtgtatgtacattgaccattaaaaggggaagatagtggatttatgttgtatagattagattatattgagacaaaaattatctatttgtatatatacataacagggtaaattattcagttaagaaaaaaataattttatgaactgcatgtataaatgaagtttatacagtacagtggttctacaatctatttattggacatgtccatgaccagaagggaaacagtcatttgcgcacaacttaaaaagtctgcattacattccttgataatgttgtggtttgttgccgttgccaagaactgaaaacataaaaagttaaaaaaaataataaattgcatgctgctttaattgtgaattgataataaactgtcctctttcagaaaacagaaaaaaaacacacacacacacaacaaaaatttgaaccaaaacattccgtttacattttagacagtaagtatcttcgttcttgttagtactatatctgttttactgcttttaacttctgatagcgttggaattaaaacaatgtcaaggtgctgttgtcattgctttactggcttaggggatgggggatggggggtatatttttgtttgttttgtgtttttttttcgtttgtttgttttgttttttagttcccacagggagtagagatggggaaagaattcctacaatatatattctggctgataaaagatacatttgtatgttgtgaagatgtttgcaatatcgatcagatgactagaaagtgaataaaaattaaggcaactgaacaaaaaaatgctcacactccacatcccgtgatgcacctcccaggccccgctcattctttgggcgttggtcagagtaagctgcttttgacggaaggacctatgtttgctcagaacacattctttccccccctccccctctggtctcctctttgttttgttttaaggaagaaaaatcagttgcgcgttctgaaatattttaccactgctgtgaacaagtgaacacattgtgtcacatcatgacactcgtataagcatggagaacagtgatttttttttagaacagaaaacaacaaaaaataaccccaaaatgaagattattttttatgaggagtgaacatttgggtaaatcatggctaagcttaaaaaaaactcatggtgaggcttaacaatgtcttgtaagcaaaaggtagagccctgtatcaacccagaaacacctagatcagaacaggaatccacattgccagtgacatgagactgaacagccaaatggaggctatgtggagttggcattgcatttaccggcagtgcgggaggaatttctgagtggccatcccaaggtctaggtggaggtggggcatggtatttgagacattccaaaacgaaggcctctgaaggacccttcagaggtggctctggaatgacatgtgtcaagctgcttggacctcgtgctttaagtgcctacattatctaactgtgctcaagaggttctcgactggaggaccacactcaagccgacttatgcccaccatcccacctctggataattttgcataaaattggattagcctggagcaggttgggagccaaatgtggcatttgtgatcatgagattgatgcaatgagatagaagatgtttgctacctgaacacttattgctttgaaactagacttgaggaaaccagggtttatcttttgagaacttttggtaagggaaaagggaacaggaaaagaaaccccaaactcaggccgaatgatcaaggggacccataggaaatcttgtccagagacaagacttcgggaaggtgtctggacattcagaacaccaagacttgaaggtgccttgctcaatggaagaggccaggacagagctgacaaaattttgctccccagtgaaggccacagcaaccttctgcccatcctgtctgttcatggagagggtccctgcctcacctctgccattttgggttaggagaagtcaagttgggagcctgaaatagtggttcttggaaaaatggatccccagtgaaaactagagctctaagcccattcagcccatttcacacctgaaaatgttagtgatcaccacttggaccagcatccttaagtatcagaaagccccaagcaattgctgcatcttagtagggtgagggataagcaaaagaggatgttcaccataacccaggaatgaagataccatcagcaaagaatttcaatttgttcagtctttcatttagagctagtctttcacagtaccatctgaatacctctttgaaagaaggaagactttacgtagtgtagatttgttttgtgttgtttgaaaatattatctttgtaattatttttaatatgtaaggaatgcttggaatatctgctatatgtcaactttatgcagcttccttttgagggacaaatttaaaacaaacaaccccccatcacaaacttaaaggattgcaagggccagatctgttaagtggtttcataggagacacatccagcaattgtgtggtcagtggctcttttacccaataagatacatcacagtcacatgcttgatggtttatgttgacctaagatttattttgttaaaatctctctctgttgtgttcgttcttgttctgttttgttttgttttttaaagtcttgctgtggtctctttgtggcagaagtgtttcatgcatggcagcaggcctgttgcttttttatggcgattcccattgaaaatgtaagtaaatgtctgtggccttgttctctctatggtaaagatattattcaccatgtaaaacaaaaaacaatatttattgtattttagtatatttatataattatgttattgaaaaaaattggcattaaaacttaaccgcatcagaacctattgtaaatacaagttctatttaagtgtactaattaacatataatatatgttttaaatatagaatttttaatgtttttaaatatattttcaaagtacataaaaaaaaaaaaaaaaaa

SEQ ID NO: 1287 - protein, 247 aa, Homo sapiens; identical to SEQ ID NO: 1281

SEQ ID NO: 1288 - DNA, 3958 bp, Homo sapiens
agtggacttacaagtccgaagccaatgtagcttggaaaacttgggaggcggaattcctaccgctgggaactgaaagggtctgcgacactctcgggcaggccgaacccacatctctacccatcctgcgcccctcttctgaagcgccctccagggaagttaagagttttgactttcggggagtggttgggatgtacgtgggggattcttgactcgggttagtctctggggatgcagagccgggaagaggaatggttccaccaggtgagaagagtgatgaccatccttttccttactatggttatttcatactttggttgcatgaaggctgcccccatgaaagaagcaaacatccgaggacaaggtggcttggcctacccaggtgtgcggacccatgggactctggagagcgtgaatgggcccaaggcaggttcaagaggcttgacatcattggctgacactttcgaacacgtgatagaagagctgttggatgaggaccagaaagttcggcccaatgaagaaaacaataaggacgcagacttgtacacgtccagggtgatgctcagtagtcaagtgcctttggagcctcctcttctctttctgctggaggaatacaaaaattacctagatgctgcaaacatgtccatgagggtccggcgccactctgaccctgcccgccgaggggagctgagcgtgtgtgacagtattagtgagtgggtaacggcggcagacaaaaagactgcagtggacatgtcgggcgggacggtcacagtccttgaaaaggtccctgtatcaaaaggccaactgaagcaatacttctacgagaccaagtgcaatcccatgggttacacaaaagaaggctgcaggggcatagacaaaaggcattggaactcccagtgccgaactacccagtcgtacgtgcgggcccttaccatggatagcaaaaagagaattggctggcgattcataaggatagacacttcttgtgtatgtacattgaccattaaaaggggaagatagtggatttatgttgtatagattagattatattgagacaaaaattatctatttgtatatatacataacagggtaaattattcagttaagaaaaaaataattttatgaactgcatgtataaatgaagtttatacagtacagtggttctacaatctatttattggacatgtccatgaccagaagggaaacagtcatttgcgcacaacttaaaaagtctgcattacattccttgataatgttgtggtttgttgccgttgccaagaactgaaaacataaaaagttaaaaaaaataataaattgcatgctgctttaattgtgaattgataataaactgtcctctttcagaaaacagaaaaaaaacacacacacacacaacaaaaatttgaaccaaaacattccgtttacattttagacagtaagtatcttcgttcttgttagtactatatctgttttactgcttttaacttctgatagcgttggaattaaaacaatgtcaaggtgctgttgtcattgctttactggcttaggggatgggggatggggggtatatttttgtttgttttgtgtttttttttcgtttgtttgttttgttttttagttcccacagggagtagagatggggaaagaattcctacaatatatattctggctgataaaagatacatttgtatgttgtgaagatgtttgcaatatcgatcagatgactagaaagtgaataaaaattaaggcaactgaacaaaaaaatgctcacactccacatcccgtgatgcacctcccaggccccgctcattctttgggcgttggtcagagtaagctgcttttgacggaaggacctatgtttgctcagaacacattctttccccccctccccctctggtctcctctttgttttgttttaaggaagaaaaatcagttgcgcgttctgaaatattttaccactgctgtgaacaagtgaacacattgtgtcacatcatgacactcgtataagcatggagaacagtgatttttttttagaacagaaaacaacaaaaaataaccccaaaatgaagattattttttatgaggagtgaacatttgggtaaatcatggctaagcttaaaaaaaactcatggtgaggcttaacaatgtcttgtaagcaaaaggtagagccctgtatcaacccagaaacacctagatcagaacaggaatccacattgccagtgacatgagactgaacagccaaatggaggctatgtggagttggcattgcatttaccggcagtgcgggaggaatttctgagtggccatcccaaggtctaggtggaggtggggcatggtatttgagacattccaaaacgaaggcctctgaaggacccttcagaggtggctctggaatgacatgtgtcaagctgcttggacctcgtgctttaagtgcctacattatctaactgtgctcaagaggttctcgactggaggaccacactcaagccgacttatgcccaccatcccacctctggataattttgcataaaattggattagcctggagcaggttgggagccaaatgtggcatttgtgatcatgagattgatgcaatgagatagaagatgtttgctacctgaacacttattgctttgaaactagacttgaggaaaccagggtttatcttttgagaacttttggtaagggaaaagggaacaggaaaagaaaccccaaactcaggccgaatgatcaaggggacccataggaaatcttgtccagagacaagacttcgggaaggtgtctggacattcagaacaccaagacttgaaggtgccttgctcaatggaagaggccaggacagagctgacaaaattttgctccccagtgaaggccacagcaaccttctgcccatcctgtctgttcatggagagggtccctgcctcacctctgccattttgggttaggagaagtcaagttgggagcctgaaatagtggttcttggaaaaatggatccccagtgaaaactagagctctaagcccattcagcccatttcacacctgaaaatgttagtgatcaccacttggaccagcatccttaagtatcagaaagccccaagcaattgctgcatcttagtagggtgagggataagcaaaagaggatgttcaccataacccaggaatgaagataccatcagcaaagaatttcaatttgttcagtctttcatttagagctagtctttcacagtaccatctgaatacctctttgaaagaaggaagactttacgtagtgtagatttgttttgtgttgtttgaaaatattatctttgtaattatttttaatatgtaaggaatgcttggaatatctgctatatgtcaactttatgcagcttccttttgagggacaaatttaaaacaaacaaccccccatcacaaacttaaaggattgcaagggccagatctgttaagtggtttcataggagacacatccagcaattgtgtggtcagtggctcttttacccaataagatacatcacagtcacatgcttgatggtttatgttgacctaagatttattttgttaaaatctctctctgttgtgttcgttcttgttctgttttgttttgttttttaaagtcttgctgtggtctctttgtggcagaagtgtttcatgcatggcagcaggcctgttgcttttttatggcgattcccattgaaaatgtaagtaaatgtctgtggccttgttctctctatggtaaagatattattcaccatgtaaaacaaaaaacaatatttattgtattttagtatatttatataattatgttattgaaaaaaattggcattaaaacttaaccgcatcagaacctattgtaaatacaagttctatttaagtgtactaattaacatataatatatgttttaaatatagaatttttaatgtttttaaatatattttcaaagtacataaaaaaaaaaaaaaaaaa

SEQ ID NO: 1289 - protein, 262 aa, Homo sapiens
MQSREEEWFHQVRRVMTILFLTMVISYFGCMKAAPMKEANIRGQGGLAYPGVRTHGTLESVNGPKAGSRGLTSLADTFEHVIEELLDEDQKVRPNEENNKDADLYTSRVMLSSQVPLEPPLLFLLEEYKNYLDAANMSMRVRRHSDPARRGELSVCDSISEWVTAADKKTAVDMSGGTVTVLEKVPVSKGQLKQYFYETKCNPMGYTKEGCRGIDKRHWNSQCRTTQSYVRALTMDSKKRIGWRFIRIDTSCVCTLTIKRGR

SEQ ID NO: 1290 - DNA, 4247 bp, Homo sapiens
gttccccaactgctgttttattgtgctattcatgcctagacatcacatagctagaaaggcccatcagacccctcaggccactgctgttcctgtcacacattcctgcaaaggaccatgttgctaacttgaaaaaaattactattaattacacttgcagttgttgcttagtaacatttatgattttgtgtttctcgtgacagcatgagcagagatcattaaaaattaaacttacaaagctgctaaagtgggaagaaggagaacttgaagccacaatttttgcacttgcttagaagccatctaatctcaggtttatatgctagatcttgggggaaacactgcatgtctctggtttatattaaaccacatacagcacactactgacactgatttgtgtctggtgcagctggagtttatcaccaagacataaaaaaaccttgaccctgcagaatggcctggaattacaatcagatgggccacatggcatcccggtgaaagaaagccctaaccagttttctgtcttgtttctgctttctccctacagttccaccaggtgagaagagtgatgaccatccttttccttactatggttatttcatactttggttgcatgaaggctgcccccatgaaagaagcaaacatccgaggacaaggtggcttggcctacccaggtgtgcggacccatgggactctggagagcgtgaatgggcccaaggcaggttcaagaggcttgacatcattggctgacactttcgaacacgtgatagaagagctgttggatgaggaccagaaagttcggcccaatgaagaaaacaataaggacgcagacttgtacacgtccagggtgatgctcagtagtcaagtgcctttggagcctcctcttctctttctgctggaggaatacaaaaattacctagatgctgcaaacatgtccatgagggtccggcgccactctgaccctgcccgccgaggggagctgagcgtgtgtgacagtattagtgagtgggtaacggcggcagacaaaaagactgcagtggacatgtcgggcgggacggtcacagtccttgaaaaggtccctgtatcaaaaggccaactgaagcaatacttctacgagaccaagtgcaatcccatgggttacacaaaagaaggctgcaggggcatagacaaaaggcattggaactcccagtgccgaactacccagtcgtacgtgcgggcccttaccatggatagcaaaaagagaattggctggcgattcataaggatagacacttcttgtgtatgtacattgaccattaaaaggggaagatagtggatttatgttgtatagattagattatattgagacaaaaattatctatttgtatatatacataacagggtaaattattcagttaagaaaaaaataattttatgaactgcatgtataaatgaagtttatacagtacagtggttctacaatctatttattggacatgtccatgaccagaagggaaacagtcatttgcgcacaacttaaaaagtctgcattacattccttgataatgttgtggtttgttgccgttgccaagaactgaaaacataaaaagttaaaaaaaataataaattgcatgctgctttaattgtgaattgataataaactgtcctctttcagaaaacagaaaaaaaacacacacacacacaacaaaaatttgaaccaaaacattccgtttacattttagacagtaagtatcttcgttcttgttagtactatatctgttttactgcttttaacttctgatagcgttggaattaaaacaatgtcaaggtgctgttgtcattgctttactggcttaggggatgggggatggggggtatatttttgtttgttttgtgtttttttttcgtttgtttgttttgttttttagttcccacagggagtagagatggggaaagaattcctacaatatatattctggctgataaaagatacatttgtatgttgtgaagatgtttgcaatatcgatcagatgactagaaagtgaataaaaattaaggcaactgaacaaaaaaatgctcacactccacatcccgtgatgcacctcccaggccccgctcattctttgggcgttggtcagagtaagctgcttttgacggaaggacctatgtttgctcagaacacattctttccccccctccccctctggtctcctctttgttttgttttaaggaagaaaaatcagttgcgcgttctgaaatattttaccactgctgtgaacaagtgaacacattgtgtcacatcatgacactcgtataagcatggagaacagtgatttttttttagaacagaaaacaacaaaaaataaccccaaaatgaagattattttttatgaggagtgaacatttgggtaaatcatggctaagcttaaaaaaaactcatggtgaggcttaacaatgtcttgtaagcaaaaggtagagccctgtatcaacccagaaacacctagatcagaacaggaatccacattgccagtgacatgagactgaacagccaaatggaggctatgtggagttggcattgcatttaccggcagtgcgggaggaatttctgagtggccatcccaaggtctaggtggaggtggggcatggtatttgagacattccaaaacgaaggcctctgaaggacccttcagaggtggctctggaatgacatgtgtcaagctgcttggacctcgtgctttaagtgcctacattatctaactgtgctcaagaggttctcgactggaggaccacactcaagccgacttatgcccaccatcccacctctggataattttgcataaaattggattagcctggagcaggttgggagccaaatgtggcatttgtgatcatgagattgatgcaatgagatagaagatgtttgctacctgaacacttattgctttgaaactagacttgaggaaaccagggtttatcttttgagaacttttggtaagggaaaagggaacaggaaaagaaaccccaaactcaggccgaatgatcaaggggacccataggaaatcttgtccagagacaagacttcgggaaggtgtctggacattcagaacaccaagacttgaaggtgccttgctcaatggaagaggccaggacagagctgacaaaattttgctccccagtgaaggccacagcaaccttctgcccatcctgtctgttcatggagagggtccctgcctcacctctgccattttgggttaggagaagtcaagttgggagcctgaaatagtggttcttggaaaaatggatccccagtgaaaactagagctctaagcccattcagcccatttcacacctgaaaatgttagtgatcaccacttggaccagcatccttaagtatcagaaagccccaagcaattgctgcatcttagtagggtgagggataagcaaaagaggatgttcaccataacccaggaatgaagataccatcagcaaagaatttcaatttgttcagtctttcatttagagctagtctttcacagtaccatctgaatacctctttgaaagaaggaagactttacgtagtgtagatttgttttgtgttgtttgaaaatattatctttgtaattatttttaatatgtaaggaatgcttggaatatctgctatatgtcaactttatgcagcttccttttgagggacaaatttaaaacaaacaaccccccatcacaaacttaaaggattgcaagggccagatctgttaagtggtttcataggagacacatccagcaattgtgtggtcagtggctcttttacccaataagatacatcacagtcacatgcttgatggtttatgttgacctaagatttattttgttaaaatctctctctgttgtgttcgttcttgttctgttttgttttgttttttaaagtcttgctgtggtctctttgtggcagaagtgtttcatgcatggcagcaggcctgttgcttttttatggcgattcccattgaaaatgtaagtaaatgtctgtggccttgttctctctatggtaaagatattattcaccatgtaaaacaaaaaacaatatttattgtattttagtatatttatataattatgttattgaaaaaaattggcattaaaacttaaccgcatcagaacctattgtaaatacaagttctatttaagtgtactaattaacatataatatatgttttaaatatagaatttttaatgtttttaaatatattttcaaagtacataaaaaaaaaaaaaaaaaa

SEQ ID NO: 1291 - protein, 247 aa, Homo sapiens; identical to SEQ ID NO: 1281

SEQ ID NO: 1292 - DNA, 2969 bp, Homo sapiens
agcaacgacgccgggcagcgggagcggcggccgcgccatgtggctgctggggccgctgtgcctgctgctgagcagcgccgcggagagccagctgctccccgggaacaacttcaccaatgagtgcaacataccaggcaacttcatgtgcagcaatggacggtgcatcccgggcgcctggcagtgtgacgggctgcctgactgcttcgacaagagtgatgagaaggagtgccccaaggctaagtcgaaatgtggcccaaccttcttcccctgtgccagcggcatccattgcatcattggtcgcttccggtgcaatgggtttgaggactgtcccgatggcagcgatgaagagaactgcacagcaaaccctctgctttgctccaccgcccgctaccactgcaagaacggcctctgtattgacaagagcttcatctgcgatggacagaataactgtcaagacaacagtgatgaggaaagctgtgaaagttctcaagaacccggcagtgggcaggtgtttgtgacttcagagaaccaacttgtgtattaccccagcatcacctatgccatcatcggcagctccgtcatttttgtgctggtggtggccctgctggcactggtcttgcaccaccagcggaagcggaacaacctcatgacgctgcccgtgcaccggctgcagcaccctgtgctgctgtcccgcctggtggtcctggaccacccccaccactgcaacgtcacctacaacgtcaataatggcatccagtatgtggccagccaggcggagcagaatgcgtcggaagtaggctccccaccctcctactccgaggccttgctggaccagaggcctgcgtggtatgaccttcctccaccgccctactcttctgacacggaatctctgaaccaagccgacctgcccccctaccgctcccggtccgggagtgccaacagtgccagctcccaggcagccagcagcctcctgagcgtggaagacaccagccacagcccggggcagcctggcccccaggagggcactgctgagcccagggactctgagcccagccagggcactgaagaagtataagtcccagttattccaaagtccatatgggttaatctgctctgacttgttgccattctaacaatttgtgctcatgggaagctctttaagcacctgtaaggatgtctcaagttacagtttgggatattaactatctctgcattcccctcctcccccagacttcagagatgtttttctggcgtctcagttgacatgatctgttgtgcgtcttttctgtcaggtcactcttcccttgggacccgagatcacaccctcatttttcacattattctgtttctgttggagagacagcatataaaacagtattgaaataggctgggagagagcaatgtttctgtgctatattggatgctcagaagtgcaggagacgctggacccaattctctctgctgggtagttaccttatagcatttggggatttgggttagatgatctaaccaggaggccatcactggatggtcacccccccaaaaaaattccatttgagcatcaaaacctgctttgcacaatcctatttgatgcccccagttcagcagagtcagtggccaaagaaaactttggacgtgagtaacacccttcagcagtcgcaacgttattttggttttgtgaaggactctgaaaccatctaccctgtataaattctggctttagaaatttgcccaagaatgctcattctgagagctttcctcagcagcatatatcatcagcctcatcctaaaataggcagggagcccctcccatgagtttatccaagttctcagctcctaaaatgcaggctgccaagaccctacacctgccctggctctacagccacttacctggtttctggactgtcaccctcccagctgacctgcccgtagccaaggaatgaggacctaacttgagttggcccaaagtctgacctggctgtatgtccctgtggcccacacccagcctgtcttgctcattcatgcagcctcaacactggcctccaaagttcccttaacacttgcaaagtcctttttacctgtgcatttggacttgaggacactggtttctatcacaggtgagagccatgttcaatacctccagcaagctctcctggctccctgcactgtgcacgctcctcttcccaaggtcccaataccagcacctctagttagagttagggtcagggtcaggcctctcccaacatcccagtagtttctcctctgagacacatgggcaagagacaatttggagtcaagattttccatttggatctattttaaatcttttagaaatgcatttgaaacagtgtgtttgttttttcccttctagttaagggactatttatatgtgtataggaaagctgtctctttttttgtttttcctttaacaaggtccaaagaaagatgcaaaaggagatcacacccttgccccgctgagccccgtgataacaagtcactccagactaacctgtgtgccagacatttgtgcattgttgcactttgaggttattatttatcaagttcttgaaggaagcagaaagagggactcctctctccctccgtgtatagtctctatgtttgtgctagtttttcttttttttctctgtgtccagtcagccacagggcccgcctccctgcaggaataaggggtaaaacgttaggtgttgtttggcaagaaaccacactgactgatgaggggtaaaatggaaccaggtagagccactccgggcagctgtcacccattcagaacttctttccgcagctgaagaaatgttcagtaacctgtttgacgctaattaaaacagagcctgcaggaagtggggctaaagtggcattcagtgatcctgttctgtagacttttctttctttttttaaccaaatccaaaggatgttacagaaaagctagccactggtattttgttttgttt

SEQ ID NO: 1293 - protein, 345 aa, Homo sapiens
MWLLGPLCLLLSSAAESQLLPGNNFTNECNIPGNFMCSNGRCIPGAWQCDGLPDCFDKSDEKECPKAKSKCGPTFFPCASGIHCIIGRFRCNGFEDCPDGSDEENCTANPLLCSTARYHCKNGLCIDKSFICDGQNNCQDNSDEESCESSQEPGSGQVFVTSENQLVYYPSITYAIIGSSVIFVLVVALLALVLHHQRKRNNLMTLPVHRLQHPVLLSRLVVLDHPHHCNVTYNVNNGIQYVASQAEQNASEVGSPPSYSEALLDQRPAWYDLPPPPYSSDTESLNQADLPPYRSRSGSANSASSQAASSLLSVEDTSHSPGQPGPQEGTAEPRDSEPSQGTEEV

SEQ ID NO: 1294 - DNA, 3945 bp, Homo sapiens
ggggcagctgggccgggggcgggggtcggctgcagatctcccgttgtgtgagagaaacgcaagcacggagctcccttgacctgctgcatcctcctcggcaattttttttttttaagtcaaaaagcttggatttcctgaaattgttgaactggatgcgcgcggagtctggggcggaggcgagcggcgggtgtgcgcgactcggggtgattcacgccggggaccccaaggaggtgttggctacgtttgtggttttaagaaagcctgagggcctgaaggcagcccctggagaagccctttccgagggcattcggaaccttctggtcctagaggtgaagctgaactgtcaccaggacttatgacccgcggcttcgctcccattctgcccgtcgagttccacaagatgggctccttccgcaggcctagaccgcgcttcatgagctcccccgtgctcagcgaccttccccgattccaagcaactcggcaggctctgcagctgagctccagctcagcctggaacagcgttcagactgctgtgatcaacgttttcaaagggggtggcttgcaaagcaacgagctctatgccctgaacgaaaacatcaggcggctgttgaagagtgaacttggatcattcattacagactattttcagaaccagcttcttgcaaaaggactgttctttgtggaggagaagatcaagctgtgtgaaggtgaaaatcgcattgaggttctggctgaagtctgggaccacttcttcactgagactctccctaccctgcaggcaatattttatccagttcagggccaggagctgactatccgccagatctccctgctgggcttccgagacctagtcttgctgaaggtgaagctgggtgacctgctgctgctggcccagtccaagctgccctcgtccattgtccagatgttgctcatcctgcagagtgttcacgagcccacaggcccaagtgagagttatttgcaactggaggagctggtgaagcaagtggtttctcctttcctcggcatcagcggggaccgtagcttctcaggccccacgtacacgctggccaggcggcactccagggtccggcccaaggtgactgtcctgaactatgcctccccgataaccgcagtcagccggccactgaatgagatggtcttgaccccactgacagagcaggagggggaagcctacctggagaagtgtggcagcgtgcggcggcacacggtggccaatgcccactcggacatccagctgctggccatggccaccatgatgcactcgggcctgggggaggaggccagcagtgagaacaagtgcctgctcctgccacccagcttccccccgccccaccggcagtgctccagtgagcccaacatcaccgacaaccctgacggactggaggagggggccaggggcagccaggagggctcggagctgaactgtgcttccctcagctgagtcgccacccctgggcctttccatctcctgttttgcaaccaggatgaggacccctccatctccgtggattactgaggggggctcttgctttatgcgatgctgccttatttcctttagggtactgtcctggtcaaaatgacctaaggggaaaccgttgttgtaaacctctttattttggtgactgtgaccacttctttgtagccaccaattgtagtgaccagttgcctaatggtcactttctgactccagccttgccagcctgactcagatcctcatctctgggcctttctccctccgatgttggactgcctgatgctcccaatgacatatccaatgctcctggcatttctggagcaggaggttgtcaggacaacacatataaccaccaaggatgtgttggcctttggagttcccctttaggttcctagtgatgtggaggtttatgggtgaaaaattagtggagagggaactcctctcccccattttgtgtagagtgaaaatagcctgaagcccctactcagcagggctctgggaatgtgccttccttattttagtttcagaattgctgggaaagttaccccactggtgggtgaggatctatcctcaacctacatccagatcctatgtgctgcttgcacagaggcctttggcttttgacccaggagggccgcgaggctggagctgccctgtctttcattgagccttagcatttccctctcaggcttcctctcaagctcaaggaactcacccccagataagaagctggtgcctcttgtctctctcatttcagaaacggactttctcatcatgctttcctatggtgggtatgaggggccagctgataccaaccaactggcctgtatctatctatctggatttgacttgaatttttaaaatgtgtatcgtttaaaaaaaaaaatgtttgcaaattttgcacataggatcttgcactgttcattttcagtggggtgagtcttcacactaaaaacacaagcagagctcctgggaaaagagactggaagtggttcaggataaagagatccatggtgggcagggctcttaggtcacagagctctagaagcagctggacttgaacccacaatggcttgtgtaaattcgtaaatttcatggtttctaggaaaagctgcattggggtggggagacccagtttgcctcataggcagaggattctccaggaagcatggaaaatggaatgtttccatgctttacagtgctgggagagaggggagatgtgggcaggaccttttggaaggatgtttattctctgtggttaaagaaatgctgagaatttctagcatgtgaagcacttgggggcagcaggccttggcacggtgctgcatccttctactgctccctccaggtctgggggcttttatccaccttgaatccctatcctcctctttgtagttgtcggtctcactgataacagctccagaaaaaaagacaaggctccccctctgacccttcctgttggtatttatgaaatctcaaagagatgagccaccttggcttccaatatggcaagagggtgctgggagaaggtgaagatcagtctaagctgccacggtgatgagaccttctcattatttaactcttgatggcatttcccttctgagtgaagatttgaaatatgattgattagaattgtgctcttgatggctgggaatttagaaattttattttaagagttatttcattttcatcctaagagtgatgggagagaaatgtccaaaagagatctgctgatctgctgagaatttcaaacaaacaaaaaaataatctctatgtatgtgttggataaagtctacagactgactaacatgcattagcaaatggagcatcagtaggtagcaacatgataatttatgtaactgatagcttctgtccttattagtacacttaacatttgagactagtatttattgatccaggcaaagtaattaattaatcatgcttgggcttactttttcagtttgtaaggttaagcatatgtgcatgcatgcgtgtgtatataaatgccttttccatatcttaaatgtccctgatgaggagagcagtcatcaattaaatatataagctcttaaaatgagaatggaagtgtcagtatagacccagtgtacttaagtgctgatgactgttagccagtttacaactttttaccatcgatgtacacatttgatatttgtgcagtaaatagactgtacctataaaaaattttattgatgtttatggtcatgttagctatcagagagctattggagtgagagctgaggtgtccttaaccactttttctctcctagattcattttcattatttatgctaggattttcttatggttgacatttgatgacaggaagcaatcatgactcttcaagtgagctcacagaaacctttcatgttgtctgtttccaaaatggattcaataaacaacattttgtccatgttaaaaaaaaaaaaaaaa

SEQ ID NO: 1295 - protein, 368 aa, Homo sapiens
MTRGFAPILPVEFHKMGSFRRPRPRFMSSPVLSDLPRFQATRQALQLSSSSAWNSVQTAVINVFKGGGLQSNELYALNENIRRLLKSELGSFITDYFQNQLLAKGLFFVEEKIKLCEGENRIEVLAEVWDHFFTETLPTLQAIFYPVQGQELTIRQISLLGFRDLVLLKVKLGDLLLLAQSKLPSSIVQMLLILQSVHEPTGPSESYLQLEELVKQVVSPFLGISGDRSFSGPTYTLARRHSRVRPKVTVLNYASPITAVSRPLNEMVLTPLTEQEGEAYLEKCGSVRRHTVANAHSDIQLLAMATMMHSGLGEEASSENKCLLLPPSFPPPHRQCSSEPNITDNPDGLEEGARGSQEGSELNCASLS

SEQ ID NO: 1296 - DNA, 778 bp, Homo sapiens
atatagcagcggcggcggtggcggcggccacaccgggcggcggacacgtggagggacccggcccgcgccttctgcccctgctgccggccgcgccatgcggtgagcgccccaggccgccagagcccacccgacccggcccgacgcccggacctgccgcccagacccgccaccgcacccggaccccgacgctccgaacccgggcgcagccgcagctcaagatggcccgaggcagcgccctcctgctcgcctccctcctcctcgccgcggccctttctgcctctgcggggctctggtcgccggccaaggaaaaacgaggctggaccctgaacagcgcgggctacctgctgggcccacatgccgttggcaaccacaggtcattcagcgacaagaatggcctcaccagcaagcgggagctgcggcccgaagatgacatgaaaccaggaagctttgacaggtccatacctgaaaacaatatcatgcgcacaatcattgagtttctgtctttcttgcatctcaaagaggccggtgccctcgaccgcctcctggatctccccgccgcagcctcctcagaagacatcgagcggtcctgagagcctcctgggcatgtttgtctgtgtgctgtaacctgaagtcaaaccttaagataatggataatcttcggccaatttatgcagagtcagccattcctgttctctttgccttgatgttgtgttgttatcatttaagattttttttttttggtaattattttgagtggcaaaataaagaatagcaatta

SEQ ID NO: 1297 - protein, 123 aa, Homo sapiens
MARGSALLLASLLLAAALSASAGLWSPAKEKRGWTLNSAGYLLGPHAVGNHRSFSDKNGLTSKRELRPEDDMKPGSFDRSIPENNIMRTIIEFLSFLHLKEAGALDRLLDLPAAASSEDIERS

SEQ ID NO: 1298 - DNA, 3625 bp, Homo sapiens
acccttcccccttctccaaccgccaacggccgcctgcgcctgaggcccggcccacgccccatcccgctcgctccacgctgcggcagccccggcggccccaggtgcgcggcccccgccatcccgccccgccgccctgcgccatggaggagggccctctgccgggcgggctgcccagccccgaggatgcgatggtgacggagctcttaagccccgagggtccgttcgcttcggagaacatcggcctgaaggcccccgtgaagtacgaggaggacgagttccacgtcttcaaagaagcgtacctgggcccggcggaccccaaggaacccgtcctgcacgcgttcaaccccgcgctgggcgccgactgcaagggccaggtcaaggcgaagctcgcggggggcgacagcgacggcggggagctcctcggggagtaccccgggatcccagagctcagcgcgctggaggacgtcgcgctcctgcaggccccgcagccgcccgcctgcaacgtgcacttcctgtcctcgctgctacccgcgcaccgcagcccggcggtgttgcccctgggcgcctgggtcctggaaggagcctcccacccgggcgtccgcatgatcccagttgaaatcaaggaagcaggtggtactactacaagtaataatccggaagaagcaactttgcagaatcttcttgctcaggaatcctgttgcaagttcccatcgtcccaggaactagaggatgcctcctgctgttctcttaagaaagattccaacccaatggtgatatgccaattgaaagggggcacacaaatgctatgtatagacaattctagaacaagagaactaaaagcactccatttggttcctcagtatcaagatcaaaataattatctacagtcagatgtccctaaaccaatgactgctttagtagggagatttttgccagcatcaacaaaattaaatctcattacacaacaacttgagggagccttaccatcggtagtcaacgggtctgctttcccctcgggatcaactcttccaggaccaccaaaaataactttggctgggtaaggattagaagcaatacattgtcactctaatgtaataatttaagagactcttggatacgttcacgattttcttctatactataaaatgagcttcactgcacaccttcatgacttctgagaaatgtttttaccatcagcaatgccactaacggtgttgctgtctgtgtctggtttcactggggctgcaaaggctgctggaaagtctggcccataacctgcatctgtccctgtcctcctgtccgctgtcctatgttggtgtttctgaggcttgttgccatttatagctctttgtcttcattccatgttgattcaaactgtactggcctctcttttttgctgtcgtccgtggaaataatggtgtggcagccatgcagcatgaacggggggctgcagagtgccctccagctgcctccgcccgctgccttccatgctgagttggctcgagctctatggcaggtgctaatgcatgatctgtcttcacatctccaggtggacataggctgcacttatctgggacctcatcttgctatttcttgcctgtcttgtgtttataatcttgctatttcttgcctgtcttgtgtttataattgttgctaattaaactaatcagctggttgaaattatcaggttaacatttatgtattaacagtggtttgggcaaccctctccattcgttgagccctgtagttgattatggagatcagcatattcctgcctccaagaggtgtttgtttgtttgtttgttttttcttgttttttgtttgtttgtttgttttgtttttttgagacggactcttgctctgtcacccaggctggaatacaatggcatgatctctgctcactgcaacctccgcctcctgggttcaagcaattctccttcctcagcctcccgagtagctgggaccacaggcgcataccactataccaggctaatttttgtattttttagtagagactgggttttaccatgttggccaggctggtcttgaaatactgacctcagatgatccgcccatctcagcctcccaaagtgctgggattacaggcgtgcccggcctgcctgcaggagttctttgggcccacagtctaaggcaaacacataccctgggcctgagagacagcagtcaaacaccttacaggatacagcccgcagcctccagtgctttccaggctcctgcagagttctgccatcgggcatggcttcgtgatggccttggtaagtgtgaggagagtggtttggggctggaatgaaaggccgtgaatctggaaacacactggaaccgatcaacgctatcagccctcatggtcgctgaagggcgttggttgctcctgggcaccgctgcttcagtttctgcagtggctctttcagctgttgtaattctgtgcctaggctgttgacaacttttgctgagttggacagaataagactgtgggccatgctgcttgcttcactctctgggtgtgatggatcggtgagggtgcagttgctatgattgtaattggtcatctcatcatggctgttaacatttctggaccaaacaaaaatgacttcagctacttccagattctgctgatacattacacaggatgatctaaaaggctacagttctgaagatactcatctttcttgtaatctgggggcatctggtcaatagtattgcctctgtgctgtattgtgtctagaacattcaaggacatttgatacttctcatactttaattgcgtgctctcccagttgcagcaccctctgaggcttctatgtgttgcagccgatgggcatttgcacagagcagcagtcatgacagcgttttcagggcagctatttctccttttcccccttttcctctcccccggcttcccattctcctcctcctccttcctcttctcgtcccctcctcctcctctttgttctcctccccctgctcttcttcctctctccttttcctccttctgtgtctatactagattattttcaatcagtcacatgtttttctttattttgaatgttacaaaatatttctctattgtaaacggtgtgccaggaaaaacatgagatgtgtatttgtattttttatgcacataattacttaatccaatgcctctccacttaattgggcctgatgatttttatctcgacatctgcaatactgatgatatactggaatctctaccaatttatttttggtggtaagaaagcagtcagagaacgttttgctggttatttcattccgtgtgagttcccaaccaagactgtcagcccagtgtggttcagccatatctaacctatagaggccatagaagcagttcagcttaggctggaggccagcaggctgagtgtgcgagctgacccgatggtcatttgttagggttggggggtgaactggctaacttattaactagcttatcatattaataaaaactctttaatacaaatccttgtcctgacactctgtagctttaataatcctattaccaatctggtaataaatgtgaattctgacacattgttgatgctactggttttagtaacataatgaacatcataataaagaatattcaagagtc

SEQ ID NO: 1299 - protein, 306 aa, Homo sapiens
MEEGPLPGGLPSPEDAMVTELLSPEGPFASENIGLKAPVKYEEDEFHVFKEAYLGPADPKEPVLHAFNPALGADCKGQVKAKLAGGDSDGGELLGEYPGIPELSALEDVALLQAPQPPACNVHFLSSLLPAHRSPAVLPLGAWVLEGASHPGVRMIPVEIKEAGGTTTSNNPEEATLQNLLAQESCCKFPSSQELEDASCCSLKKDSNPMVICQLKGGTQMLCIDNSRTRELKALHLVPQYQDQNNYLQSDVPKPMTALVGRFLPASTKLNLITQQLEGALPSVVNGSAFPSGSTLPGPPKITLAG

SEQ ID NO: 1300 - DNA, 2535 bp, Homo sapiens
acccttcccccttctccaaccgccaacggccgcctgcgcctgaggcccggcccacgccccatcccgctcgctccacgctgcggcagccccggcggccccaggtgcgcggcccccgccatcccgccccgccgccctgcgccatggaggagggccctctgccgggcgggctgcccagccccgaggatgcgatggtgacggagctcttaagccccgagggtccgttcgcttcggagaacatcggcctgaaggcccccgtgaagtacgaggaggacgagttccacgtcttcaaagaagcgtacctgggcccggcggaccccaaggaacccgtcctgcacgcgttcaaccccgcgctgggcgccgactgcaagggccaggtcaaggcgaagctcgcggggggcgacagcgacggcggggagctcctcggggagtaccccgggatcccagagctcagcgcgctggaggacgtcgcgctcctgcaggccccgcagccgcccgcctgcaacgtgcacttcctgtcctcgctgctacccgcgcaccgcagcccggcggtgttgcccctgggcgcctgggtcctggaaggagcctcccacccgggcgtccgcatgatcccagttgaaatcaaggaagcaggtggtactactacaagtaataatccggaagaagcaactttgcagaatcttcttgctcaggaatcctgttgcaagttcccatcgtcccaggaactagaggatgcctcctgctgttctcttaagaaagattccaacccaatggtgatatgccaattgaaagggggcacacaaatgctatgtatagacaattctagaacaagagaactaaaagcactccatttggttcctcagtatcaagatcaaaataattatctacagtcagatgtccctaaaccaatgactgctttagtagggagatttttgccagcatcaacaaaattaaatctcattacacaacaacttgagggagccttaccatcggtagtcaacgggtctgctttcccctcgggatcaactcttccaggaccaccaaaaataactttggctgggtactgtgactgctttgccagtggggacttttgcaacaactgcaattgtaataattgttgcaacaacttgcatcatgatattgaacggtttaaagccattaaggcatgtcttggtagaaatccagaagctttccagccaaaaattgggaagggccaattgggcaatgtcaagccccagcacaacaaagggtgcaactgcaggaggtcaggctgcctgaagaattactgcgagtgctatgaggcccaaattatgtgttcttctatttgcaaatgcattggttgcaaaaattatgaagaaagcccagaacgaaagacactaatgagcatgccaaactacatgcagactggaggtttggaaggcagccattacctgccaccaacgaaattttcaggacttccaagattcagtcacgataggcggccttcctcatgcatctcctgggaggtggtggaggccacatgcgcctgcctgcttgctcagggagaagaggccgagaaagaacactgctccaagtgcctggcagagcagatgatcctggaggaatttggaaggtgcttatcacagattctccacactgagtttaaatctaagggattgaaaatggagtagagtataaagtgtgaatgcatgttgattttgtcttagtctagaaatctctagtttagaaaggatgtttaggggaacatgaggctggctctgcagcaacaaccaggctcccctgcatccctgggcccagggagtttactcagagctctctgaagatgtggcaacccatgcccccttttctgaggaggtgcatggcctgagcattgtttgtctggcccagaggagagagcttgggttcccatagtcctgggagagtgtctgcagggcggcggagggcagagcagggcaggggagggcacagcaggccctgcgaagggcagagcggggcaggggagggcagagcaggccctgcggagagctcactctggtcgactcttcctctcagagaatgttgctctggaggctgctctgcatgaaaaccctaatggtttcttgtttgtttttcaaattatttagaaataagttctccggatgggctgttgtgataccacttaaaatctctagagaactactgaacacctaaagattttctgtagcgtagatatttccccagaggcacgcgaactgtcagtctttcctaaggcccccgggagacgcaggcaatggggcctcgcaggccaggcttgcaccagcatgtcttgagttagaggacttaaaattatccagtttcttctgtgtttctacttgaattgtggaaaagctctattatccaattaacttctccataattattgttgtaatattattattgtttgtaaaacatggttcacataactagcttgtggaaaccagcaggtaaaatgaattcttaagttgacgcttttggttctgttgtaaagcaaagatgaataaaaatttccaatgtcttcaa

SEQ ID NO: 1301 - protein, 508 aa, Homo sapiens
MEEGPLPGGLPSPEDAMVTELLSPEGPFASENIGLKAPVKYEEDEFHVFKEAYLGPADPKEPVLHAFNPALGADCKGQVKAKLAGGDSDGGELLGEYPGIPELSALEDVALLQAPQPPACNVHFLSSLLPAHRSPAVLPLGAWVLEGASHPGVRMIPVEIKEAGGTTTSNNPEEATLQNLLAQESCCKFPSSQELEDASCCSLKKDSNPMVICQLKGGTQMLCIDNSRTRELKALHLVPQYQDQNNYLQSDVPKPMTALVGRFLPASTKLNLITQQLEGALPSVVNGSAFPSGSTLPGPPKITLAGYCDCFASGDFCNNCNCNNCCNNLHHDIERFKAIKACLGRNPEAFQPKIGKGQLGNVKPQHNKGCNCRRSGCLKNYCECYEAQIMCSSICKCIGCKNYEESPERKTLMSMPNYMQTGGLEGSHYLPPTKFSGLPRFSHDRRPSSCISWEVVEATCACLLAQGEEAEKEHCSKCLAEQMILEEFGRCLSQILHTEFKSKGLKME

SEQ ID NO: 1302 - DNA, 2546 bp, Homo sapiens
gctgccgctgccgcacctccgtagctgactcggtactctctgaagatggcagaagctcaccaagctgtggcctttcagttcacggtcactccggacgggattgacctgcggctgagccatgaagctcttagacaaatctatctctctggacttcattcctggaaaaagaagttcatcagattcaagaacggcatcatcactggcgtgtacccggcaagcccctccagttggcttatcgtggtggtgggcgtgatgacaacgatgtacgccaagatcgacccctcgttaggaataattgcaaaaatcaatcggactctggaaacggccaactgcatgtccagccagacgaagaacgtggtcagcggcgtgctgtttggcaccggcctgtgggtggccctcatcgtcaccatgcgctactccctgaaagtgctgctctcctaccacgggtggatgttcactgagcacggcaagatgagtcgtgccaccaagatctggatgggtatggtcaagatcttttcaggccgaaaacccatgttgtacagcttccagacatcgctgcctcgcctgccggtcccggctgtcaaagacactgtgaacaggtatctacagtcggtgaggcctcttatgaaggaagaagacttcaaacggatgacagcacttgctcaagattttgctgtcggtcttggaccaagattacagtggtatttgaagttaaaatcctggtgggctacaaattacgtgagcgactggtgggaggagtacatctacctccgaggacgagggccgctcatggtgaacagcaactattatgccatggatctgctgtatatccttccaactcacattcaggcagcaagagccggcaacgccatccatgccatcctgctttacaggcgcaaactggaccgggaggaaatcaaaccaattcgtcttttgggatccacgattccactctgctccgctcagtgggagcggatgtttaatacttcccggatcccaggagaggagacagacaccatccagcacatgagagacagcaagcacatcgtcgtgtaccatcgaggacgctacttcaaggtctggctctaccatgatgggcggctgctgaagccccgggagatggagcagcagatgcagaggatcctggacaatacctcggagcctcagcccggggaggccaggctggcagccctcaccgcaggagacagagttccctgggccaggtgtcgtcaggcctattttggacgtgggaaaaataagcagtctcttgatgctgtggagaaagcagcgttcttcgtgacgttagatgaaactgaagaaggatacagaagtgaagacccggatacgtcaatggacagctacgccaaatctctactacacggccgatgttacgacaggtggtttgacaagtcgttcacgtttgttgtcttcaaaaacgggaagatgggcctcaacgctgaacactcctgggcagatgcgccgatcgtggcccacctttgggagtacgtcatgtccattgacagcctccagctgggctatgcggaggatgggcactgcaaaggcgacatcaatccgaacattccgtaccccaccaggctgcagtgggacatcccgggggaatgtcaagaggttatagagacctccctgaacaccgcaaatcttctggcaaacgacgtggatttccattccttcccattcgtagcctttggtaaaggaatcatcaagaaatgtcgcacgagcccagacgcctttgtgcagctggccctccagctggcgcactacaaggacatgggcaagttttgcctcacatacgaggcctccatgacccggctcttccgagaggggaggacggagaccgtgcgctcctgcaccactgagtcatgcgacttcgtgcgggccatggtggacccggcccagacggtggaacagaggctgaagttgttcaagttggcgtctgagaagcatcagcatatgtatcgcctcgccatgaccggctctgggatcgatcgtcacctcttctgcctttacgtggtgtctaaatatctcgctgtggagtcccctttccttaaggaagttttatctgagccttggagattatcaacaagccagacccctcagcagcaagtggagctgtttgacttggagaataacccagagtacgtgtccagcggagggggctttggaccggttgctgatgacggctatggtgtgtcgtacatccttgtgggagagaacctcatcaatttccacatttcttccaagttctcttgccctgagacggggattataagtcaaggaccaagttcagatacttgagacaaagtggaaagtctcagcatatggaaacaaggccttggaggagaccatggacatcaccaagttcatgtgctgggctggaaagaaaagcctgttgattttcacttgctgtgcatttattcatccattccattgcctcaatgctgagaacagtgcctgacacataaaagatgctcaataaatatgttaaaagtaaaaaaaaaaaaaaaaaaaaaaaaaaaaaaaaaaaa

SEQ ID NO: 1303 - protein, 756 aa, Homo sapiens
MAEAHQAVAFQFTVTPDGIDLRLSHEALRQIYLSGLHSWKKKFIRFKNGIITGVYPASPSSWLIVVVGVMTTMYAKIDPSLGIIAKINRTLETANCMSSQTKNVVSGVLFGTGLWVALIVTMRYSLKVLLSYHGWMFTEHGKMSRATKIWMGMVKIFSGRKPMLYSFQTSLPRLPVPAVKDTVNRYLQSVRPLMKEEDFKRMTALAQDFAVGLGPRLQWYLKLKSWWATNYVSDWWEEYIYLRGRGPLMVNSNYYAMDLLYILPTHIQAARAGNAIHAILLYRRKLDREEIKPIRLLGSTIPLCSAQWERMFNTSRIPGEETDTIQHMRDSKHIVVYHRGRYFKVWLYHDGRLLKPREMEQQMQRILDNTSEPQPGEARLAALTAGDRVPWARCRQAYFGRGKNKQSLDAVEKAAFFVTLDETEEGYRSEDPDTSMDSYAKSLLHGRCYDRWFDKSFTFVVFKNGKMGLNAEHSWADAPIVAHLWEYVMSIDSLQLGYAEDGHCKGDINPNIPYPTRLQWDIPGECQEVIETSLNTANLLANDVDFHSFPFVAFGKGIIKKCRTSPDAFVQLALQLAHYKDMGKFCLTYEASMTRLFREGRTETVRSCTTESCDFVRAMVDPAQTVEQRLKLFKLASEKHQHMYRLAMTGSGIDRHLFCLYVVSKYLAVESPFLKEVLSEPWRLSTSQTPQQQVELFDLENNPEYVSSGGGFGPVADDGYGVSYILVGENLINFHISSKFSCPETGIISQGPSSDT

SEQ ID NO: 1304 - DNA, 2941 bp, Homo sapiens
ctccaccgccgccgccgccgccgccgctgccgctgccgctgccgcacctccgtagctgactcggtactctctgaagatggcagaagctcaccaagctgtggcctttcagttcacggtcactccggacgggattgacctgcggctgagccatgaagctcttagacaaatctatctctctggacttcattcctggaaaaagaagttcatcagattcaagaacggcatcatcactggcgtgtacccggcaagcccctccagttggcttatcgtggtggtgggcgtgatgacaacgatgtacgccaagatcgacccctcgttaggaataattgcaaaaatcaatcggactctggaaacggccaactgcatgtccagccagacgaagaacgtggtcagcggcgtgctgtttggcaccggcctgtgggtggccctcatcgtcaccatgcgctactccctgaaagtgctgctctcctaccacgggtggatgttcactgagcacggcaagatgagtcgtgccaccaagatctggatgggtatggtcaagatcttttcaggccgaaaacccatgttgtacagcttccagacatcgctgcctcgcctgccggtcccggctgtcaaagacactgtgaacaggtatctacagtcggtgaggcctcttatgaaggaagaagacttcaaacggatgacagcacttgctcaagattttgctgtcggtcttggaccaagattacagtggtatttgaagttaaaatcctggtgggctacaaattacgtgagcgactggtgggaggagtacatctacctccgaggacgagggccgctcatggtgaacagcaactattatgccatggatctgctgtatatccttccaactcacattcaggcagcaagagccggcaacgccatccatgccatcctgctttacaggcgcaaactggaccgggaggaaatcaaaccaattcgtcttttgggatccacgattccactctgctccgctcagtgggagcggatgtttaatacttcccggatcccaggagaggagacagacaccatccagcacatgagagacagcaagcacatcgtcgtgtaccatcgaggacgctacttcaaggtctggctctaccatgatgggcggctgctgaagccccgggagatggagcagcagatgcagaggatcctggacaatacctcggagcctcagcccggggaggccaggctggcagccctcaccgcaggagacagagttccctgggccaggtgtcgtcaggcctattttggacgtgggaaaaataagcagtctcttgatgctgtggagaaagcagcgttcttcgtgacgttagatgaaactgaagaaggatacagaagtgaagacccggatacgtcaatggacagctacgccaaatctctactacacggccgatgttacgacaggtggtttgacaagtcgttcacgtttgttgtcttcaaaaacgggaagatgggcctcaacgctgaacactcctgggcagatgcgccgatcgtggcccacctttgggagtacgtcatgtccattgacagcctccagctgggctatgcggaggatgggcactgcaaaggcgacatcaatccgaacattccgtaccccaccaggctgcagtgggacatcccgggggaatgtcaagaggttatagagacctccctgaacaccgcaaatcttctggcaaacgacgtggatttccattccttcccattcgtagcctttggtaaaggaatcatcaagaaatgtcgcacgagcccagacgcctttgtgcagctggccctccagctggcgcactacaaggacatgggcaagttttgcctcacatacgaggcctccatgacccggctcttccgagaggggaggacggagaccgtgcgctcctgcaccactgagtcatgcgacttcgtgcgggccatggtggacccggcccagacggtggaacagaggctgaagttgttcaagttggcgtctgagaagcatcagcatatgtatcgcctcgccatgaccggctctgggatcgatcgtcacctcttctgcctttacgtggtgtctaaatatctcgctgtggagtcccctttccttaaggaagttttatctgagccttggagattatcaacaagccagacccctcagcagcaagtggagctgtttgacttggagaataacccagagtacgtgtccagcggagggggctttggaccggttgctgatgacggctatggtgtgtcgtacatccttgtgggagagaacctcatcaatttccacatttcttccaagttctcttgccctgagacggattctcatcgctttggaaggcacctgaaagaagcaatgactgacatcatcactttgtttggtctcagttctaattccaaaaagtaattccactggagctgctgggaaggaaaacgagctcttctgatgcaaaccaaatgaaaaataggcattaatcctgaccttagctcgggatgaaacactgctcttaaaaaaactcagttttccttccagaaaatgtgggtgtttttttttcctagaacagtatctctcccctgtgaagcataaccccactacttccagacttgccctcccttgggggacatctgataaagtctcccctgatgtctccgcatcggcttggatttattaagggatgcaaatcttgttgagttaatgaaggaattagtagggttgtggcttcacacacagtggaatggaaatggtgtgctttctcagtggcaaccgaaggcctagtgcttaagggcatttagcatcatccaagcagggtaaacttttgttttgttaaaagaaaaatgtgttattcaagttggtgtccccagttgtagctaacacatctggaatgcactaaccaaaatgctgtgctttggagacctgcttttgtcaccgtgggtaaccgttcccgtctgg

SEQ ID NO: 1305 - protein, 773 aa, Homo sapiens
MAEAHQAVAFQFTVTPDGIDLRLSHEALRQIYLSGLHSWKKKFIRFKNGIITGVYPASPSSWLIVVVGVMTTMYAKIDPSLGIIAKINRTLETANCMSSQTKNVVSGVLFGTGLWVALIVTMRYSLKVLLSYHGWMFTEHGKMSRATKIWMGMVKIFSGRKPMLYSFQTSLPRLPVPAVKDTVNRYLQSVRPLMKEEDFKRMTALAQDFAVGLGPRLQWYLKLKSWWATNYVSDWWEEYIYLRGRGPLMVNSNYYAMDLLYILPTHIQAARAGNAIHAILLYRRKLDREEIKPIRLLGSTIPLCSAQWERMFNTSRIPGEETDTIQHMRDSKHIVVYHRGRYFKVWLYHDGRLLKPREMEQQMQRILDNTSEPQPGEARLAALTAGDRVPWARCRQAYFGRGKNKQSLDAVEKAAFFVTLDETEEGYRSEDPDTSMDSYAKSLLHGRCYDRWFDKSFTFVVFKNGKMGLNAEHSWADAPIVAHLWEYVMSIDSLQLGYAEDGHCKGDINPNIPYPTRLQWDIPGECQEVIETSLNTANLLANDVDFHSFPFVAFGKGIIKKCRTSPDAFVQLALQLAHYKDMGKFCLTYEASMTRLFREGRTETVRSCTTESCDFVRAMVDPAQTVEQRLKLFKLASEKHQHMYRLAMTGSGIDRHLFCLYVVSKYLAVESPFLKEVLSEPWRLSTSQTPQQQVELFDLENNPEYVSSGGGFGPVADDGYGVSYILVGENLINFHISSKFSCPETDSHRFGRHLKEAMTDIITLFGLSSNSKK

SEQ ID NO: 1306 - DNA, 2400 bp, Homo sapiens
gtcagcattggtgtaaaggactggagcttcagggttctcgggattcgagtcctggccctgctgcttgccagctctgtgctgtggcaagttacttcctctccccaggtctctcggtttcctcatctgctgcctctccagacttctgccagaacattgcacgcgacagtttcaggcacagaactgactggcagcaggggctgctccacgagtgggaatttgctccagcacttcacggactgcaagcgaggcacttgctaactcttggcctccctgaacataggaaacccacctgggcagccatggaatgggacaatggcacaggccaggctctgggcttgccacccaccacctgtgtctaccgcgagaacttcaagcaactgctgctgccacctgtgtattcggcggtgctggcggctggcctgccgctgaacatctgtgtcattacccagatctgcacgtcccgccgggccctgacccgcacggccgtgtacaccctaaaccttgctctggctgacctgctatatgcctgctccctgcccctgctcatctacaactatgcccaaggtgatcactggccctttggcgacttcgcctgccgcctggtccgcttcctcttctatgccaacctgcacggcagcatcctcttcctcacctgcatcagcttccagcgctacctgggcatctgccacccgctggccccctggcacaaacgtgggggccgccgggctgcctggctagtgtgtgtagccgtgtggctggccgtgacaacccagtgcctgcccacagccatcttcgctgccacaggcatccagcgtaaccgcactgtctgctatgacctcagcccgcctgccctggccacccactatatgccctatggcatggctctcactgtcatcggcttcctgctgccctttgctgccctgctggcctgctactgtctcctggcctgccgcctgtgccgccaggatggcccggcagagcctgtggcccaggagcggcgtggcaaggcggcccgcatggccgtggtggtggctgctgcctttgccatcagcttcctgccttttcacatcaccaagacagcctacctggcagtgcgctcgacgccgggcgtcccctgcactgtattggaggcctttgcagcggcctacaaaggcacgcggccgtttgccagtgccaacagcgtgctggaccccatcctcttctacttcacccagaagaagttccgccggcgaccacatgagctcctacagaaactcacagccaaatggcagaggcagggtcgctgagtcctccaggtcctgggcagccttcatatttgccattgtgtccggggcaccaggagccccaccaaccccaaaccatgcggagaattagagttcagctcagctgggcatggagttaagatccctcacaggacccagaagctcaccaaaaactatttcttcagccccttctctggcccagaccctgtgggcatggagatggacagacctgggcctggctcttgagaggtcccagtcagccatggagagctggggaaaccacattaaggtgctcacaaaaatacagtgtgacgtgtactgtcatcaaggggtatgctccatgctttgagtcaccaatgaagcgggtgagggaagatgagagggggaggtgagagcttctgggaaggggcatttgagctgggttttgagggatgattatgagctctctggagaggagtgatattccatttatttagaaagcctttactgacaccttgtgctcaggcctgtgttggttctggggccctagaagaaccagtcctagccctggtccatacgggctcccaactgctggaagtacagactggcacagcaacatcagggttgtgacagagggaagcatggctggggggagggggtacacagacagtgcccatgacccagtccaaggagtcaggaaagagctctctgaggagggagcatctgagccagatgttgagggctgagtgggaacttggcaagcagaagtggggagcactttaatgcaacccaggtatgctccatgcatatccagctgggccagcctcgtgctgggctctgccctgggcagacaggcagagggccagagcagaggacacatggccttgcgtgtgtgaaagctgagaaaatgggagctgtgcttcagctaccctccagacaagggcaagagttagccagatgctccaggcagtgggaagccaatggagggattaagcggcggaagcttcttagaagaggcagggggcgaagtgcagtggctcatgcctgtaatctcagcaatttgggaggccaaggaaggaggaatgcttgagcccaagagttttagaccagcctgggcaacacagtaagaccctgtttctacaaaaaaatataaaaaata

SEQ ID NO: 1307 - protein, 328 aa, Homo sapiens
MEWDNGTGQALGLPPTTCVYRENFKQLLLPPVYSAVLAAGLPLNICVITQICTSRRALTRTAVYTLNLALADLLYACSLPLLIYNYAQGDHWPFGDFACRLVRFLFYANLHGSILFLTCISFQRYLGICHPLAPWHKRGGRRAAWLVCVAVWLAVTTQCLPTAIFAATGIQRNRTVCYDLSPPALATHYMPYGMALTVIGFLLPFAALLACYCLLACRLCRQDGPAEPVAQERRGKAARMAVVVAAAFAISFLPFHITKTAYLAVRSTPGVPCTVLEAFAAAYKGTRPFASANSVLDPILFYFTQKKFRRRPHELLQKLTAKWQRQGR

SEQ ID NO: 1308 - DNA, 1700 bp, Homo sapiens
ccagggacgctggggccggagctgctgccgccgtctacacggtcccctcatttgacgggttcgcctcctagcagcgcctgggcgagtgacatctgggccggaccagctggtgctgcgcggcgcaggtctctcggtttcctcatctgctgcctctccagacttctgccagaacattgcacgcgacagtttcaggcacagaactgactggcagcaggggctgctccacgagtgggaatttgctccagcacttcacggactgcaagcgaggcacttgctaactcttggataacaagacctctgccagaagaaccatggctttggaaggcggagttcaggctgaggagatgggtgcggtcctcagtgagcccctgcctccctgaacataggaaacccacctgggcagccatggaatgggacaatggcacaggccaggctctgggcttgccacccaccacctgtgtctaccgcgagaacttcaagcaactgctgctgccacctgtgtattcggcggtgctggcggctggcctgccgctgaacatctgtgtcattacccagatctgcacgtcccgccgggccctgacccgcacggccgtgtacaccctaaaccttgctctggctgacctgctatatgcctgctccctgcccctgctcatctacaactatgcccaaggtgatcactggccctttggcgacttcgcctgccgcctggtccgcttcctcttctatgccaacctgcacggcagcatcctcttcctcacctgcatcagcttccagcgctacctgggcatctgccacccgctggccccctggcacaaacgtgggggccgccgggctgcctggctagtgtgtgtagccgtgtggctggccgtgacaacccagtgcctgcccacagccatcttcgctgccacaggcatccagcgtaaccgcactgtctgctatgacctcagcccgcctgccctggccacccactatatgccctatggcatggctctcactgtcatcggcttcctgctgccctttgctgccctgctggcctgctactgtctcctggcctgccgcctgtgccgccaggatggcccggcagagcctgtggcccaggagcggcgtggcaaggcggcccgcatggccgtggtggtggctgctgcctttgccatcagcttcctgccttttcacatcaccaagacagcctacctggcagtgcgctcgacgccgggcgtcccctgcactgtattggaggcctttgcagcggcctacaaaggcacgcggccgtttgccagtgccaacagcgtgctggaccccatcctcttctacttcacccagaagaagttccgccggcgaccacatgagctcctacagaaactcacagccaaatggcagaggcagggtcgctgagtcctccaggtcctgggcagccttcatatttgccattgtgtccggggcaccaggagccccaccaaccccaaaccatgcggagaattagagttcagctcagctgggcatggagttaagatccctcacaggacccagaagctcaccaaaaactatttcttcagccccttctctggcccagaccctgtgggcatggagatggacagacctgggcctggctcttgagaggtcccagtcagccatggagagctggggaaaccacattaaggtgctcacaaaaatacagtgtgacgtgtactgtcaaaaaaaaa

SEQ ID NO: 1309 - protein, 328 aa, Homo sapiens; identical to SEQ ID NO: 1307

SEQ ID NO: 1310 - DNA, 1555 bp, Homo sapiens
ccagggacgctggggccggagctgctgccgccgtctacacggtcccctcatttgacgggttcgcctcctagcagcgcctgggcgagtgacatctgggccggaccagctggtgctgcgcggcgcagataacaagacctctgccagaagaaccatggctttggaaggcggagttcaggctgaggagatgggtgcggtcctcagtgagcccctgcctccctgaacataggaaacccacctgggcagccatggaatgggacaatggcacaggccaggctctgggcttgccacccaccacctgtgtctaccgcgagaacttcaagcaactgctgctgccacctgtgtattcggcggtgctggcggctggcctgccgctgaacatctgtgtcattacccagatctgcacgtcccgccgggccctgacccgcacggccgtgtacaccctaaaccttgctctggctgacctgctatatgcctgctccctgcccctgctcatctacaactatgcccaaggtgatcactggccctttggcgacttcgcctgccgcctggtccgcttcctcttctatgccaacctgcacggcagcatcctcttcctcacctgcatcagcttccagcgctacctgggcatctgccacccgctggccccctggcacaaacgtgggggccgccgggctgcctggctagtgtgtgtagccgtgtggctggccgtgacaacccagtgcctgcccacagccatcttcgctgccacaggcatccagcgtaaccgcactgtctgctatgacctcagcccgcctgccctggccacccactatatgccctatggcatggctctcactgtcatcggcttcctgctgccctttgctgccctgctggcctgctactgtctcctggcctgccgcctgtgccgccaggatggcccggcagagcctgtggcccaggagcggcgtggcaaggcggcccgcatggccgtggtggtggctgctgcctttgccatcagcttcctgccttttcacatcaccaagacagcctacctggcagtgcgctcgacgccgggcgtcccctgcactgtattggaggcctttgcagcggcctacaaaggcacgcggccgtttgccagtgccaacagcgtgctggaccccatcctcttctacttcacccagaagaagttccgccggcgaccacatgagctcctacagaaactcacagccaaatggcagaggcagggtcgctgagtcctccaggtcctgggcagccttcatatttgccattgtgtccggggcaccaggagccccaccaaccccaaaccatgcggagaattagagttcagctcagctgggcatggagttaagatccctcacaggacccagaagctcaccaaaaactatttcttcagccccttctctggcccagaccctgtgggcatggagatggacagacctgggcctggctcttgagaggtcccagtcagccatggagagctggggaaaccacattaaggtgctcacaaaaatacagtgtgacgtgtactgtcaaaaaaaaaaaaaaaaaaaaaaaa

SEQ ID NO: 1311 - protein, 328 aa, Homo sapiens; identical to SEQ ID NO: 1307

SEQ ID NO: 1312 - DNA, 1832 bp, Homo sapiens
aaggacagaggaggggcccttcctgtcagctggctgggagcagaggtggctttgtcttttcggaagaactggttctgtggaatttgtgcttatttcccatcaaggatcaaggacctgctctggggctacctcagggccccacaggatgaggggctggttttcagatgagttttctgcttgcctgtcatctggatagtgtctaaaaatttgcaaactgccttcttgtcagtgtcttgctcattcttcatgacactcctgatatgtctctcggtttcctcatctgctgcctctccagacttctgccagaacattgcacgcgacagtttcaggcacagaactgactggcagcaggggctgctccacgagtgggaatttgctccagcacttcacggactgcaagcgaggcacttgctaactcttggataacaagacctctgccagaagaaccatggctttggaaggcggagttcaggctgaggagatgggtgcggtcctcagtgagcccctgcctccctgaacataggaaacccacctgggcagccatggaatgggacaatggcacaggccaggctctgggcttgccacccaccacctgtgtctaccgcgagaacttcaagcaactgctgctgccacctgtgtattcggcggtgctggcggctggcctgccgctgaacatctgtgtcattacccagatctgcacgtcccgccgggccctgacccgcacggccgtgtacaccctaaaccttgctctggctgacctgctatatgcctgctccctgcccctgctcatctacaactatgcccaaggtgatcactggccctttggcgacttcgcctgccgcctggtccgcttcctcttctatgccaacctgcacggcagcatcctcttcctcacctgcatcagcttccagcgctacctgggcatctgccacccgctggccccctggcacaaacgtgggggccgccgggctgcctggctagtgtgtgtagccgtgtggctggccgtgacaacccagtgcctgcccacagccatcttcgctgccacaggcatccagcgtaaccgcactgtctgctatgacctcagcccgcctgccctggccacccactatatgccctatggcatggctctcactgtcatcggcttcctgctgccctttgctgccctgctggcctgctactgtctcctggcctgccgcctgtgccgccaggatggcccggcagagcctgtggcccaggagcggcgtggcaaggcggcccgcatggccgtggtggtggctgctgcctttgccatcagcttcctgccttttcacatcaccaagacagcctacctggcagtgcgctcgacgccgggcgtcccctgcactgtattggaggcctttgcagcggcctacaaaggcacgcggccgtttgccagtgccaacagcgtgctggaccccatcctcttctacttcacccagaagaagttccgccggcgaccacatgagctcctacagaaactcacagccaaatggcagaggcagggtcgctgagtcctccaggtcctgggcagccttcatatttgccattgtgtccggggcaccaggagccccaccaaccccaaaccatgcggagaattagagttcagctcagctgggcatggagttaagatccctcacaggacccagaagctcaccaaaaactatttcttcagccccttctctggcccagaccctgtgggcatggagatggacagacctgggcctggctcttgagaggtcccagtcagccatggagagctggggaaaccacattaaggtgctcacaaaaatacagtgtgacgtgtactgtcaaaa

SEQ ID NO: 1313 - protein, 328 aa, Homo sapiens; identical to SEQ ID NO: 1307

SEQ ID NO: 1314 - DNA, 3202 bp, Homo sapiens
atgccgaacttctgcgctgcccccaactgcacgcggaagagcacgcagtccgacttggccttcttcaggttcccgcgggaccctgccagatgccagaagtgggtggagaactgtaggagagcagacttagaagataaaacacctgatcagctaaataaacattatcgattatgtgccaaacattttgagacctctatgatctgtagaactagtccttataggacagttcttcgagataatgcaataccaacaatatttgatcttaccagtcatttgaacaacccacatagtagacacagaaaacgaataaaagaactgagtgaagatgaaatcaggacactgaaacagaaaaaaattgatgaaacttctgagcaggaacaaaaacataaagaaaccaacaatagcaatgctcagaaccccagcgaagaagagggtgaagggcaagatgaggacattttacctctaacccttgaagagaaggaaaacaaagaatacctaaaatctctatttgaaatcttgattctgatgggaaagcaaaacatacctctggatggacatgaggctgatgaaatcccagaaggtctctttactccagataactttcaggcactgctggagtgtcggataaattctggtgaagaggttctgagaaagcggtttgagacaacagcagttaacacgttgttttgttcaaaaacacagcagaggcagatgctagagatctgtgagagctgtattcgagaagaaactctcagggaagtgagagactcacacttcttttccattatcactgacgatgtagtggacatagcaggggaagagcacctacctgtgttggtgaggtttgttgatgaatctcataacctaagagaggaatttataggcttcctgccttatgaagccgatgcagaaattttggctgtgaaatttcacactatgataactgagaagtggggattaaatatggagtattgtcgtggccaggcttacattgtctctagtggattttcttccaaaatgaaagttgttgcttctagacttttagagaaatatccccaagctatctacacactctgctcttcctgtgccttaaatatgtggttggcaaaatcagtacctgttatgggagtatctgttgcattaggaacaattgaggaagtttgttcttttttccatcgatcaccacaactgcttttagaacttgacaacgtaatttctgttctttttcagaacagtaaagaaaggggtaaagaactgaaggaaatctgccattctcagtggacaggcaggcatgatgcttttgaaattttagtggaactcctgcaagcacttgttttatgtttagatggtataaatagtgacacaaatattagatggaataactatatagctggccgagcatttgtactctgcagtgcagtgtcagattttgatttcattgttactattgttgttcttaaaaatgtcctatcttttacaagagcctttgggaaaaacctccaggggcaaacctctgatgtcttctttgcggccggtagcttgactgcagtactgcattcactcaacgaagtgatggaaaatattgaagtttatcatgaattttggtttgaggaagccacaaatttggcaaccaaacttgatattcaaatgaaactccctgggaaattccgcagagctcaccagggtaacttggaatctcagctaacctctgagagttactataaagaaaccctaagtgtcccaacagtggagcacattattcaggaacttaaagatatattctcagaacagcacctcaaagctcttaaatgcttatctctggtaccctcagtcatgggacaactcaaattcaatacgtcggaggaacaccatgctgacatgtatagaagtgacttacccaatcctgacacgctgtcagctgagcttcattgttggagaatcaaatggaaacacagggggaaagatatagagcttccgtccaccatctatgaagccctccacctgcctgacatcaagttttttcctaatgtgtatgcattgctgaaggtcctgtgtattcttcctgtgatgaaggttgagaatgagcggtatgaaaatggacgaaagcgtcttaaagcatatttgaggaacactttgacagaccaaaggtcaagtaacttggctttgcttaacataaattttgatataaaacacgacctggatttaatggtggacacatatattaaactctatacaagtaagtcagagcttcctacagataattccgaaactgtggaaaatacctaagagacttttaaaaataggctttcttatatttgatatttggaagaaaaagccgtaaggtgtatgtagaccacttaatcactaaatatctttgcctataggactccattgaatacattagccattgataatctacctgtttaaatggcccctgtttgaactctcaagctttgaagacctacctgttcttccagaagagaacgttgaaagtgccatgtttccttttgcgtgatctctgttgatggcactctggaattgtttcagttaagtcattttagacatagcatttattatcactgtggatctctacttgttgggtgttatgaattctttgaagaaatatattttgaagaggtgtgggaggaaggaatacattttataaaatgttgtagtgaagcccacaattgacctttgactaataggagttttaagtatgttaaaaatctatactggacagttacaagaaattaccggagaaaagcttgtgagctcaccaaacaaggatttcagtgtagattttgtctttcttgaacttaaagaaacaaatgacaaagtttgaatggaaaagcctgctgttgttccacatctcgttgctgtttacattcctttgtggagcctgcatcttcctaagctttttagcaggtatatgttgaacacttctgtttcatggttgagacagaatcagaggccatggatactgacaactgatttgtctgttttttttctctgtctttttccatgactcttatatactgcctcatcttgatttataagcaaaacctggaaaacctacaaaataagtgttgtggtttatctagaaaaatatggaaaatattgctgttatttttggtgaagaaaatcaattttgtatagtttatttcaatctaaataaaatgtgaattttgttaaaaaaaaaaaa

SEQ ID NO: 1315 - protein, 761 aa, Homo sapiens
MPNFCAAPNCTRKSTQSDLAFFRFPRDPARCQKWVENCRRADLEDKTPDQLNKHYRLCAKHFETSMICRTSPYRTVLRDNAIPTIFDLTSHLNNPHSRHRKRIKELSEDEIRTLKQKKIDETSEQEQKHKETNNSNAQNPSEEEGEGQDEDILPLTLEEKENKEYLKSLFEILILMGKQNIPLDGHEADEIPEGLFTPDNFQALLECRINSGEEVLRKRFETTAVNTLFCSKTQQRQMLEICESCIREETLREVRDSHFFSIITDDVVDIAGEEHLPVLVRFVDESHNLREEFIGFLPYEADAEILAVKFHTMITEKWGLNMEYCRGQAYIVSSGFSSKMKVVASRLLEKYPQAIYTLCSSCALNMWLAKSVPVMGVSVALGTIEEVCSFFHRSPQLLLELDNVISVLFQNSKERGKELKEICHSQWTGRHDAFEILVELLQALVLCLDGINSDTNIRWNNYIAGRAFVLCSAVSDFDFIVTIVVLKNVLSFTRAFGKNLQGQTSDVFFAAGSLTAVLHSLNEVMENIEVYHEFWFEEATNLATKLDIQMKLPGKFRRAHQGNLESQLTSESYYKETLSVPTVEHIIQELKDIFSEQHLKALKCLSLVPSVMGQLKFNTSEEHHADMYRSDLPNPDTLSAELHCWRIKWKHRGKDIELPSTIYEALHLPDIKFFPNVYALLKVLCILPVMKVENERYENGRKRLKAYLRNTLTDQRSSNLALLNINFDIKHDLDLMVDTYIKLYTSKSELPTDNSETVENT

SEQ ID NO: 1316 - DNA, 5518 bp, Homo sapiens
gtcgccatcttgccccttcagaggcaccgcaaacaaacccaattcctggtgtcccctagtcttggcggaggagccttttagatgagccccgaaaggccgggcagggaggacaagctctttggggctaccaaacagaagcagcaatgcctgttgtgtggccaacccttctggatctcagcagggatgaatgcaaaagaattcttcgaaaattggaattggaggcatatgctggagttatcagtgcacttcgggcacagggggatctcaccaaggaaaagaaagatcttcttggagaactatcaaaagttcttagcatctcaacagaacgccaccgtgctgaagttcggagagcagtaaacgatgaacggttaacaacaattgcacataatatgtctggacctaatagctcttcagaatggtccattgaaggtcgtcgattggtaccactgatgccccggctcgttccccaaaccgcctttactgtaacagctaatgctgttgctaatgcagctatccagcataatgcatctcttccagtgcctgcagaaacaggaagcaaggaagtggtttgctattcctacacaagtaccacgtcaaccccaacctctacccctgttccaagtggcagcatagcaacggttaagtctccaagacctgccagtcctgcctccaatgtagttgtcttgccaagtggaagtactgtttatgtcaaaagtgtaagctgttcagatgaagatgaaaaacccagaaaacgaaggcgaacaaactcttccagctcctctcctgttgttctaaaggaagttccaaaggccgttgttccagtctcaaagacgatcactgtgcctgtgagtggtagtcccaagatgagcaacatcatgcagagcattgccaactccttaccaccccacatgtctcctgtaaaaataaccttcactaaaccatcaacacagacaacaaacacaacaacacagaaggttattatagtcaccacatcaccaagctcaaccttcgtgcccaacattctctccaaatcccataactatgcagcagtcactaagcttgtaccaacgtcagtcattgcttctacaacccagaagccaccagttgttataactgcttcacagtcctctctggtcagtaatagcagcagtggcagcagcagttctacaccatcacctattcctaatacagttgcagtaacagctgtggtgtcctctacaccatctgtggtcatgtcaacagtagcacaaggtgtatctacatcagcaatcaaaatggcatcaaccagacttccttcccccaaaagcttagtgagtgccccaactcagattcttgcacagttccctaaacaacatcaacagtctcctaagcagcagttatatcaagtgcaacagcagacacagcaacaagtggcccagccttctccagtatctcatcagcaacagcctcagcagtctcctttgccacctggtattaaacctaccatccaaatcaaacaggagtcaggtgttaaaatcatcacacaacaggttcaaccaagtaaaatcttacccaaaccagtgacagcaactctacccaccagtagcaattcccctattatggtggttagcagtaatggtgcaattatgacaactaaactggtaaccactcctactggcacacaagcaacctatacccggccaacagtgagcccatccattggtcggatggctgcaacccctggagctgcaacctatgtgaaaactacgagtggtagcatcattacagtagtacccaaatcattagctaccttggggggcaagataattagcagtaatatagtttctggaacgactaccaaaatcactacaatcccaatgacttccaagcccaacgtgattgttgtacaaaagactacaggaaaaggaacgaccattcaaggcctcccgggcaaaaatgttgtcacaacgttgctaaatgctggaggagaaaagactattcagacagtgccaacaggagcaaagccagctatccttactgctacaagacccatcaccaaaatgattgtaacgcagccaaaaggaataggttctacagttcaaccagcagctaaaatcatcccaacaaaaattgtttatgggcagcaagggaaaacgcaggttcttattaaacccaaaccagtgacttttcaagcgacagttgttagtgaacaaacaagacagctagtaacagaaacattacagcaagcatccagggtagcagaggctggtaattcatctattcaggaaggaaaagaagaaccacagaattatacagatagtagttcctcttctacagagtcctcccagagttcccaagattcccagcctgtagttcatgtaattgcttcccggcgtcaggattggtcagaacatgagattgcaatggagactagccctaccataatttatcaggatgtatccagtgaatcacaatcagctacttcaacaatcaaagctctgttagaactccaacagacaacagtaaaggaaaaattggaatctaaaccaagacaacccactattgacctgagtcaaatggcagtgcctattcagatgacccaggaaaagagacattctcctgagagtccatcaattgctgtggtagagtcagaactagtagctgaatacatcactactgaacgcactgatgaggggacagaggttgcttttccccttctagtcagccatcgctcccagccccaacagccttcccagccccagcggaccctgctccagcatgtggctcagtcacagaccgcaacacagacttcggtggtggtgaagtccatcccagcatcttcccctggagcaatcacccacattatgcagcaggcattaagcagtcacactgcttttaccaaacacagcgaggaacttggaactgaggagggcgaggttgaagagatggacactttagaccctcagacaggtctgttttaccgatctgccctgactcagtcacagtcagctaaacagcagaaacttagccagcccccgctggaacagactcagctgcaagtgaaaactctgcagtgcttccagactaaacagaagcagaccatccacctgcaggcagaccagctccagcacaaactcccgcaaatgccccagctttccatcaggcatcaaaaactcacccctctccagcaagaacaagcacagcccaagccagatgtacagcacacacagcatcccatggtggccaaagacaggcagcttcctaccttaatggcacagcccccgcaaactgtagtacaggtgcttgcagtgaaaaccacgcagcagctccctaaactgcagcaggctccgaaccaaccaaaaatctacgtgcaaccccaaaccccccagagccaaatgtcgctcccagcttcttcagagaaacagacggcaagccaggtggagcagccaattataacccaaggatcctctgttacaaagataacttttgaggggcgccagcctcccacagttacaaagataactggtggcagttctgtgcctaagctgacatcaccagttacaagcatatctcccattcaggcctctgagaagacagcagtgtctgacattttgaaaatgtctttgatggaagctcagattgatacaaatgtagaacatatgatagtggatcccccaaagaaggctcttgccactagcatgctcactggtgaagcaggatcattaccctccacccacatggtggtggcagggatggcgaattccactccccagcaacagaaatgtagagagtcctgttcgagtccatccactgttggctcttccctaacgacaaggaaaattgatccaccagcagtgcctgcgacaggccagttcatgcgtattcagaatgtaggccaaaagaaagctgaagagagtccagcagaaattatcatccaggctattcctcagtatgctattccttgtcactccagctccaatgtggtggtggagcccagtgggcttcttgagctaaacaacttcactagtcaacagctggatgatgaggagacagcaatggagcaggacatagacagtagcacggaggatggaactgaacccagcccttctcagagctctgctgaacggtcctagtgtttggacacaatagtgcactttaaaacctgcttggttaccaagtgtccagggaaacccttgtattttgatgactaaaaagagcactttgcccgtacttaggctgtggaccctaaaacagcagtgtttcaacaagatgttgctgcaggagcagctttttaaaacaagataaaactcacaggggaatgtacttttttaaaaaaaaatgaaaaagaaaaaaaaagctgcacatttacagtgacttaagacctggtcttctttctctgttggatcatggccggtgaaacagttttgtcttgcagtggaaagagacttcctgtgaatgtttctcaactggtttctactgagcaaaataccatctaaaaggagaatgtgaatagttgtattttgaaatgatgtgtcaggaaaagttttttaaaaacttgtatgtttttgcaaatccctggaagtgttgaattggttaaaattttacattttctcagttcataattagtttataaacacctagaataatactggcattaaagaatccttgttggatggtagaaatcagatccctaaccagtgggaggtactttttgggtggcttgtgcattcttatcagttgtgtgctaatttattgtattgttcctttgtgctctaagcagcacacttgccttctatttatttaagtgtaaacatttcaaagcaggccgtactccttctgacaaatttcttgtaaaccaggattgcctacgctttccactgtcgtcgtctccccactttccctcttcctttaagaaaacttactaaaaaatgtttcattgcgaagcagaggaaaagaaacgttttcagacctaaaggaaatgtttggtcatgttaagaaaacaaattattcattcatatgatgctttcttaacgttgaaattgcacattcacattggactgagactttgaaaataacttttacatacttttgtttaagcccctttgaaatgtataaaaagttcatttacagttctaaatgtaatgtttttaagccttctatctttttaggacacagtttgtttaagcaatatgttttggtcttgtgatcactgtctgtcacaagtagagtgaaaggggtaagggggtgggagggtaagagttttgacaagttgtggcaaaggaaactatacttttcatttttaaaaatgtaaatagaaaagtttttaacggttttatatagatttcactataaataagcattttaagactgacaaatgttgaactgtacatacatttatcagcataactgcccagtttttttggtgctgaagtactgtaagtagaattcatcaacggtctcctaatttttgcatctacatctggggggaaaaagctgtgatactatagttaataaattcccactagagtgacaaaaaaaa

SEQ ID NO: 1317 - protein, 1322 aa, Homo sapiens
MPVVWPTLLDLSRDECKRILRKLELEAYAGVISALRAQGDLTKEKKDLLGELSKVLSISTERHRAEVRRAVNDERLTTIAHNMSGPNSSSEWSIEGRRLVPLMPRLVPQTAFTVTANAVANAAIQHNASLPVPAETGSKEVVCYSYTSTTSTPTSTPVPSGSIATVKSPRPASPASNVVVLPSGSTVYVKSVSCSDEDEKPRKRRRTNSSSSSPVVLKEVPKAVVPVSKTITVPVSGSPKMSNIMQSIANSLPPHMSPVKITFTKPSTQTTNTTTQKVIIVTTSPSSTFVPNILSKSHNYAAVTKLVPTSVIASTTQKPPVVITASQSSLVSNSSSGSSSSTPSPIPNTVAVTAVVSSTPSVVMSTVAQGVSTSAIKMASTRLPSPKSLVSAPTQILAQFPKQHQQSPKQQLYQVQQQTQQQVAQPSPVSHQQQPQQSPLPPGIKPTIQIKQESGVKIITQQVQPSKILPKPVTATLPTSSNSPIMVVSSNGAIMTTKLVTTPTGTQATYTRPTVSPSIGRMAATPGAATYVKTTSGSIITVVPKSLATLGGKIISSNIVSGTTTKITTIPMTSKPNVIVVQKTTGKGTTIQGLPGKNVVTTLLNAGGEKTIQTVPTGAKPAILTATRPITKMIVTQPKGIGSTVQPAAKIIPTKIVYGQQGKTQVLIKPKPVTFQATVVSEQTRQLVTETLQQASRVAEAGNSSIQEGKEEPQNYTDSSSSSTESSQSSQDSQPVVHVIASRRQDWSEHEIAMETSPTIIYQDVSSESQSATSTIKALLELQQTTVKEKLESKPRQPTIDLSQMAVPIQMTQEKRHSPESPSIAVVESELVAEYITTERTDEGTEVAFPLLVSHRSQPQQPSQPQRTLLQHVAQSQTATQTSVVVKSIPASSPGAITHIMQQALSSHTAFTKHSEELGTEEGEVEEMDTLDPQTGLFYRSALTQSQSAKQQKLSQPPLEQTQLQVKTLQCFQTKQKQTIHLQADQLQHKLPQMPQLSIRHQKLTPLQQEQAQPKPDVQHTQHPMVAKDRQLPTLMAQPPQTVVQVLAVKTTQQLPKLQQAPNQPKIYVQPQTPQSQMSLPASSEKQTASQVEQPIITQGSSVTKITFEGRQPPTVTKITGGSSVPKLTSPVTSISPIQASEKTAVSDILKMSLMEAQIDTNVEHMIVDPPKKALATSMLTGEAGSLPSTHMVVAGMANSTPQQQKCRESCSSPSTVGSSLTTRKIDPPAVPATGQFMRIQNVGQKKAEESPAEIIIQAIPQYAIPCHSSSNVVVEPSGLLELNNFTSQQLDDEETAMEQDIDSSTEDGTEPSPSQSSAERS

SEQ ID NO: 1318 - DNA, 825 bp, Homo sapiens
atgaattttgatcctgcgctggggctgctaactccaactctgtgtcccgaggtgagcccccctccccctacttcccatagtcctctcagctcagaacaaacccaaggcaagaagaactggactgcgcgccccagccggcagtatgacataaagaaaaggggtggggaggaggaagaaggggcagagccaaaggaatcctctccctccacaagccagtccccgcctcccgacaggatcttggaggcggccggcgactgctcgaaccgagcaccacgtcacggcatcccggcgcgtcctagccaggggaccccagagcggggccgcaacgcatcggaaacccgggcagtagtttccggagcccgctcggggaaccaggatcttgtaggatccttccccactcaagtgtcaaggagacaagcccgccccgccccctctccaaacacgcactccctagcagcaccacaacaagagcagccagcccaggctcctcacccggacctctcggcgccggtcccaatgtcaagtccacgacccaagcccctctgggccagtagctgttgtcaggggtcccggccggcacccgcgcctcactccctccccagcggagaggacaaccgagagagagtaagccagcggatacccagccagacgacctggactcaccgggagtctcccagagctaaacccccagagtcccagcaccaggccagccagagtccccctgagtccaccccggggagccccacgatcccgttaggaaacaacggaggatggggctgggagccccaagccgggctccgaatgcttggcccggcgctcctctag

SEQ ID NO: 1319 - protein, 274 aa, Homo sapiens [sequence omitted]

SEQ ID NO: 1320 - DNA, 4164 bp, Homo sapiens
aattcgcctctgccacaggctgcaaaggacccgaggaaccgctctctctgaactgtgctgatgggcaggaggatgggagacaggaattgagagtcacagaggaaggacagtggagtctggcatcttattggtgtctttaaaggattgccatttaatgccattcaagatctactaagcatcatttttgcatgactactgcaaaaggattactttacagataccagttcctttgtcaagagcatactttggaccctgttttcagaaagcagggcactctttaatgaagaaacaccagagctgttaaacacattgagacacagaagattctagtgactgaggatggcttcctcttggaaactaatgctgtttctgtcagtcaccatgtgtctttcagagtattcaaaatctcttcctggtctctccacttcatatgctgctttgttaagaattaagaagagttcatcttcatctctctttggttccaaaaccagaccacgatacagcagcccttcattaggaacactgagtgcttcttcacccagctggctaggggcagctcagaattattattcccccatcaatctttatcattcctcagatgccttcaaacaagatgaaagtgtggactatgggccagtttttgtgcaagaaccagatgatattatttttccaactgattctgatgaaaagaaggtagcattgaattgtgaagttcgtggcaatccagttcccagttacagatggcttcgaaatggaacagaaatagatctggaaagtgattatcgctacagtttgatagatggcaccttcattataagcaatccaagtgaagcaaaggattctggtcattatcagtgtttagcaaccaacactgtggggagtattcttagtagagaagctacactgcagtttgcctatctgggaaattttagtggccggacaagaagtgcagtctctgtgagggaaggccagggtgtcgttctgatgtgctctcctccgccacattcaccagagatcatctatagctgggtatttaatgagttcccttcctttgtggcggaagacagccggcggttcatctcccaggagacaggcaacctttatatttctaaagtccaaacatcagatgttggcagctatatttgtctggtgaaaaacacagtgacgaatgctagagtccttagtcctccaacgccactcactctgcgtaatgatggtgtgatgggagaatatgagccgaaaattgaggtccattttcctttcacggttacagctgctaaaggaacaactgttaagatggaatgctttgcacttggcaaccccgttccaacaatcacatggatgaaggttaatggttatattcctagtaaggcacgtctgcggaaatctcaggcggtgctggaaataccgaatgtacagctggatgatgcaggcatttatgagtgcagagctgaaaactcacgtggaaaaaattcctttcgtggacaattacaagtatacacctacccacactgggtagaaaaactgaatgatactcagttagacagtgggagccctctccgatgggaatgtaaggctactggaaaacccagacccacgtatcgttggctgaagaatggagtacccctctcacctcagagtagggttgagatggttaatggagtattgatgatccacaatgtgaatcaatcagatgctggaatgtatcagtgtttggctgaaaataagtatggagccatttacgctagtgctgagctgaagattctagcttcagctcccacttttgcactgaatcaactgaagaaaacaataattgttaccaaagaccaagaagttgtcatagagtgcaaaccccaaggctctccaaaaccaaccatctcttggaagaaaggagacagagcagttagagaaaacaaaagaatagctattcttccagacgggagtctacggatcctaaatgcttccaaatcagacgagggaaagtacgtttgccgaggggaaaacgtctttggttctgctgaaattatagcttcgctatctgtaaaagaacctacaaggatagaacttactcctaaaagaacagaattgacagtgggagaaagcattgtccttaattgcaaagcaattcacgatgctagtttggatgtcactttctactggactctgaaaggacagcctattgatttcgaggaagagggtggacattttgaaagcatcagggcccaagcatcctctgcagatttaatgatcaggaacatccttctgatgcatgctgggagatatggctgcagggtacagaccacagcagacagtgtgtcagatgaggcagaacttcttgttaggggacccccaggcccacctgggatagtaattgttgaggaaataaccgaaagtacggccacactgtcctggagcccagcagctgacaaccacagcccaatctcctcctacaaccttcaagctcgcagcccattttccctgggctggcaaacagtaaagacagtcccagaaatcataacaggggacatggagtcagccatggctgtggacctaaatccctgggtggaatatgaatttcgagtggtagccaccaaccctattgggacaggagatccaagcaccccatctcgaatgatccgcacaaatgaagcagttccgaagacagcacccaccaatgtaagcggaagaagtggaagaaggcatgagttagtcattgcctgggagccagtatctgaagagtttcagaatggggaaggcttcggctatattgtggctttcagacccaatggaacacgtggctggaaggaaaaaatggtgacatcctctgaagcttccaaattcatttatcgagatgaaagtgtccctcctcttactccctttgaagtgaaagttggcgtttataacaataaaggagatgggccttttagtcaaattgtggtcatctgttcagctgaaggagaacccagtgctgctcccacagatgtcaaggcgacaagtgtgtctgtgtcagagattcttgttgcatggaaacacattaaagagagtctaggaagaccacagggatttgaggttggttactggaaagacatggaacaggaagatacagcagaaacagtcaaaactagagggaatgagtctttcgtcatcctaacaggattagaaggaaatacgttatatcacttcacagtgagggcttacaatggagctggatatgggccacctagcagtgaagtgagtgcaaccaccaagaaatcccctcctagtcaagcacctagcaacctcaggtgggagcagcaaggctctcaggtttctctgggctgggaacccgtcataccattagccaacgaatctgaagttgtgggttacaaggttttttataggcaagagggtcacagcaacagccaagttattgaaacacagaaacttcaagcagtagtaccactcccagatgctggagtctatattattgaagttcgagcatatagtgaaggaggagatggaacagctagttctcaaattagggtaccatcatattcaggtggaaaaatcacaagtgcacagtcgacccttcactctctctccacatcttcgtcatcagtcaccttgctcttggcattgatgattccttcaacttcctggtgaaaactgctgacttaatttgcttttgtttgctttagcttggtaacagcggtgaatagagtgtagtgtaagtggagaaccaggatcctgagatgagcttgagctttaaaaacttgggactatacatggtgaacttacaggaggttaggggggaaatattacttatccatcaggtttctctttggtttttgtaaacggagaggacagttcttagtccagtaaaaatatgcagattgtatgtaatgaatttttgtaaacaaaggtaatttctgtcaaatgtattctttacttttttaatatgttgggattttattttatatctgatgactccgagtgtgtgccatccatttgttaagtaactggcctttagcagatctgtttcaaaaacaaatacaaaaatgagaatgaaaagtttgcttaagactaagtccagtgtttttcattttccctttggctgaatatttcaattgacaaaccagcaggacatatgaaaaatgcttcagtgatgtggtccattataagata

SEQ ID NO: 1321 - protein, 1100 aa, Homo sapiens
MASSWKLMLFLSVTMCLSEYSKSLPGLSTSYAALLRIKKSSSSSLFGSKTRPRYSSPSLGTLSASSPSWLGAAQNYYSPINLYHSSDAFKQDESVDYGPVFVQEPDDIIFPTDSDEKKVALNCEVRGNPVPSYRWLRNGTEIDLESDYRYSLIDGTFIISNPSEAKDSGHYQCLATNTVGSILSREATLQFAYLGNFSGRTRSAVSVREGQGVVLMCSPPPHSPEIIYSWVFNEFPSFVAEDSRRFISQETGNLYISKVQTSDVGSYICLVKNTVTNARVLSPPTPLTLRNDGVMGEYEPKIEVHFPFTVTAAKGTTVKMECFALGNPVPTITWMKVNGYIPSKARLRKSQAVLEIPNVQLDDAGIYECRAENSRGKNSFRGQLQVYTYPHWVEKLNDTQLDSGSPLRWECKATGKPRPTYRWLKNGVPLSPQSRVEMVNGVLMIHNVNQSDAGMYQCLAENKYGAIYASAELKILASAPTFALNQLKKTIIVTKDQEVVIECKPQGSPKPTISWKKGDRAVRENKRIAILPDGSLRILNASKSDEGKYVCRGENVFGSAEIIASLSVKEPTRIELTPKRTELTVGESIVLNCKAIHDASLDVTFYWTLKGQPIDFEEEGGHFESIRAQASSADLMIRNILLMHAGRYGCRVQTTADSVSDEAELLVRGPPGPPGIVIVEEITESTATLSWSPAADNHSPISSYNLQARSPFSLGWQTVKTVPEIITGDMESAMAVDLNPWVEYEFRVVATNPIGTGDPSTPSRMIRTNEAVPKTAPTNVSGRSGRRHELVIAWEPVSEEFQNGEGFGYIVAFRPNGTRGWKEKMVTSSEASKFIYRDESVPPLTPFEVKVGVYNNKGDGPFSQIVVICSAEGEPSAAPTDVKATSVSVSEILVAWKHIKESLGRPQGFEVGYWKDMEQEDTAETVKTRGNESFVILTGLEGNTLYHFTVRAYNGAGYGPPSSEVSATTKKSPPSQAPSNLRWEQQGSQVSLGWEPVIPLANESEVVGYKVFYRQEGHSNSQVIETQKLQAVVPLPDAGVYIIEVRAYSEGGDGTASSQIRVPSYSGGKITSAQSTLHSLSTSSSSVTLLLALMIPSTSW

SEQ ID NO: 1322 - DNA, 3942 bp, Homo sapiens
aattcgcctctgccacaggctgcaaaggacccgaggaaccgctctctctgaactgtgctgatgggcaggaggatgggagacaggaattgagagtcacagaggaaggacagtggagtctggcatcttattggtgtctttaaaggattgccatttaatgccattcaagatctactaagcatcatttttgcatgactactgcaaaaggattactttacagataccagttcctttgtcaagagcatactttggaccctgttttcagaaagcagggcactctttaatgaagaaacaccagagctgttaaacacattgagacacagaagattctagtgactgaggatggcttcctcttggaaactaatgctgtttctgtcagtcaccatgtgtctttcagaaagtgtggactatgggccagtttttgtgcaagaaccagatgatattatttttccaactgattctgatgaaaagaaggtagcattgaattgtgaagttcgtggcaatccagttcccagttacagatggcttcgaaatggaacagaaatagatctggaaagtgattatcgctacagtttgatagatggcaccttcattataagcaatccaagtgaagcaaaggattctggtcattatcagtgtttagcaaccaacactgtggggagtattcttagtagagaagctacactgcagtttgcctatctgggaaattttagtggccggacaagaagtgcagtctctgtgagggaaggccagggtgtcgttctgatgtgctctcctccgccacattcaccagagatcatctatagctgggtatttaatgagttcccttcctttgtggcggaagacagccggcggttcatctcccaggagacaggcaacctttatatttctaaagtccaaacatcagatgttggcagctatatttgtctggtgaaaaacacagtgacgaatgctagagtccttagtcctccaacgccactcactctgcgtaatgatggtgtgatgggagaatatgagccgaaaattgaggtccattttcctttcacggttacagctgctaaaggaacaactgttaagatggaatgctttgcacttggcaaccccgttccaacaatcacatggatgaaggttaatggttatattcctagtaaggcacgtctgcggaaatctcaggcggtgctggaaataccgaatgtacagctggatgatgcaggcatttatgagtgcagagctgaaaactcacgtggaaaaaattcctttcgtggacaattacaagtatacacctacccacactgggtagaaaaactgaatgatactcagttagacagtgggagccctctccgatgggaatgtaaggctactggaaaacccagacccacgtatcgttggctgaagaatggagtacccctctcacctcagagtagggttgagatggttaatggagtattgatgatccacaatgtgaatcaatcagatgctggaatgtatcagtgtttggctgaaaataagtatggagccatttacgctagtgctgagctgaagattctagcttcagctcccacttttgcactgaatcaactgaagaaaacaataattgttaccaaagaccaagaagttgtcatagagtgcaaaccccaaggctctccaaaaccaaccatctcttggaagaaaggagacagagcagttagagaaaacaaaagaatagctattcttccagacgggagtctacggatcctaaatgcttccaaatcagacgagggaaagtacgtttgccgaggggaaaacgtctttggttctgctgaaattatagcttcgctatctgtaaaagaacctacaaggatagaacttactcctaaaagaacagaattgacagtgggagaaagcattgtccttaattgcaaagcaattcacgatgctagtttggatgtcactttctactggactctgaaaggacagcctattgatttcgaggaagagggtggacattttgaaagcatcagggcccaagcatcctctgcagatttaatgatcaggaacatccttctgatgcatgctgggagatatggctgcagggtacagaccacagcagacagtgtgtcagatgaggcagaacttcttgttaggggacccccaggcccacctgggatagtaattgttgaggaaataaccgaaagtacggccacactgtcctggagcccagcagctgacaaccacagcccaatctcctcctacaaccttcaagctcgcagcccattttccctgggctggcaaacagtaaagacagtcccagaaatcataacaggggacatggagtcagccatggctgtggacctaaatccctgggtggaatatgaatttcgagtggtagccaccaaccctattgggacaggagatccaagcaccccatctcgaatgatccgcacaaatgaagcagttccgaagacagcacccaccaatgtaagcggaagaagtggaagaaggcatgagttagtcattgcctgggagccagtatctgaagagtttcagaatggggaaggcttcggctatattgtggctttcagacccaatggaacacgtggctggaaggaaaaaatggtgacatcctctgaagcttccaaattcatttatcgagatgaaagtgtccctcctcttactccctttgaagtgaaagttggcgtttataacaataaaggagatgggccttttagtcaaattgtggtcatctgttcagctgaaggagaacccagtgctgctcccacagatgtcaaggcgacaagtgtgtctgtgtcagagattcttgttgcatggaaacacattaaagagagtctaggaagaccacagggatttgaggttggttactggaaagacatggaacaggaagatacagcagaaacagtcaaaactagagggaatgagtctttcgtcatcctaacaggattagaaggaaatacgttatatcacttcacagtgagggcttacaatggagctggatatgggccacctagcagtgaagtgagtgcaaccaccaagaaatcccctcctagtcaagcacctagcaacctcaggtgggagcagcaaggctctcaggtttctctgggctgggaacccgtcataccattagccaacgaatctgaagttgtgggttacaaggttttttataggcaagagggtcacagcaacagccaagttattgaaacacagaaacttcaagcagtagtaccactcccagatgctggagtctatattattgaagttcgagcatatagtgaaggaggagatggaacagctagttctcaaattagggtaccatcatattcaggtggaaaaatcacaagtgcacagtcgacccttcactctctctccacatcttcgtcatcagtcaccttgctcttggcattgatgattccttcaacttcctggtgaaaactgctgacttaatttgcttttgtttgctttagcttggtaacagcggtgaatagagtgtagtgtaagtggagaaccaggatcctgagatgagcttgagctttaaaaacttgggactatacatggtgaacttacaggaggttaggggggaaatattacttatccatcaggtttctctttggtttttgtaaacggagaggacagttcttagtccagtaaaaatatgcagattgtatgtaatgaatttttgtaaacaaaggtaatttctgtcaaatgtattctttacttttttaatatgttgggattttattttatatctgatgactccgagtgtgtgccatccatttgttaagtaactggcctttagcagatctgtttcaaaaacaaatacaaaaatgagaatgaaaagtttgcttaagactaagtccagtgtttttcattttccctttggctgaatatttcaattgacaaaccagcaggacatatgaaaaatgcttcagtgatgtggtccattataagata

SEQ ID NO: 1323 - protein, 1026 aa, Homo sapiens
MASSWKLMLFLSVTMCLSESVDYGPVFVQEPDDIIFPTDSDEKKVALNCEVRGNPVPSYRWLRNGTEIDLESDYRYSLIDGTFIISNPSEAKDSGHYQCLATNTVGSILSREATLQFAYLGNFSGRTRSAVSVREGQGVVLMCSPPPHSPEIIYSWVFNEFPSFVAEDSRRFISQETGNLYISKVQTSDVGSYICLVKNTVTNARVLSPPTPLTLRNDGVMGEYEPKIEVHFPFTVTAAKGTTVKMECFALGNPVPTITWMKVNGYIPSKARLRKSQAVLEIPNVQLDDAGIYECRAENSRGKNSFRGQLQVYTYPHWVEKLNDTQLDSGSPLRWECKATGKPRPTYRWLKNGVPLSPQSRVEMVNGVLMIHNVNQSDAGMYQCLAENKYGAIYASAELKILASAPTFALNQLKKTIIVTKDQEVVIECKPQGSPKPTISWKKGDRAVRENKRIAILPDGSLRILNASKSDEGKYVCRGENVFGSAEIIASLSVKEPTRIELTPKRTELTVGESIVLNCKAIHDASLDVTFYWTLKGQPIDFEEEGGHFESIRAQASSADLMIRNILLMHAGRYGCRVQTTADSVSDEAELLVRGPPGPPGIVIVEEITESTATLSWSPAADNHSPISSYNLQARSPFSLGWQTVKTVPEIITGDMESAMAVDLNPWVEYEFRVVATNPIGTGDPSTPSRMIRTNEAVPKTAPTNVSGRSGRRHELVIAWEPVSEEFQNGEGFGYIVAFRPNGTRGWKEKMVTSSEASKFIYRDESVPPLTPFEVKVGVYNNKGDGPFSQIVVICSAEGEPSAAPTDVKATSVSVSEILVAWKHIKESLGRPQGFEVGYWKDMEQEDTAETVKTRGNESFVILTGLEGNTLYHFTVRAYNGAGYGPPSSEVSATTKKSPPSQAPSNLRWEQQGSQVSLGWEPVIPLANESEVVGYKVFYRQEGHSNSQVIETQKLQAVVPLPDAGVYIIEVRAYSEGGDGTASSQIRVPSYSGGKITSAQSTLHSLSTSSSSVTLLLALMIPSTSW

SEQ ID NO: 1324 - DNA, 6655 bp, Homo sapiens
gatcaagttcgtgaaactggtcttgtacaggttgaaaaatgccttcctaacaggaggcgccaaggagcttaagtgtaactcacacacagtaaagaaaatgacgaaagttcctccggcgtttgatttcagtttcttaaatgacgaagaggccgggaagatccttcaggtgctggaaaggaatgaggagttacagagggccgagaaggacaggatcagcaaacttcagaagacaaagagggatatcagatggcttcagggagtgactggtgaatggtttgaagaaattcaaagaaaaaagttttgcaatgaaacagatgttagccaaatgttaaaacaaccacttacatacaggctaagtaaggagatggcaaaaaatgatccgatagaattacctacatcaagatctaaaaatgtaactaatcaaaaaaagccgacacctttttcttcccggatgagcttcagatcgtcatttgcttccctgttctcattcaggaaatctggaaaggagacttcaaagcttccatcactgggacagaaaggatgtgatggccatgcaggacctcctatgcctgtgaggggagctgctgtgcaggcaaaaatatacaattcacctctggaaaatcatctagttgacagtacatttgtcccaaagccagcagtcatgagggaggagagtggcatgcctccaccgtgggatgcttcactgctggagaatgagtttttccaagttttagatgacttggatagcaaattggctcaggaacagtctgcaagctcagtgaataccagaacacccctcaactatggatcaagaacacagttcggtcacttttattccagtggtaacagacatggtaatatcacagaaaggcacaaaaaacactataatgaaacttccaatatgtctatctatgacatcctaagaccaggaactcctagggaaggttttaaaaccttttctcctaggacaagcacaatttatgatatgtataggacaagggagcccagagtctttaaagaagattatgtgcaaaagaatacttttggcagtacttcgctgtgttttgacagcaggcaacggtcggccttaccagccacagggcatttcacagcaagaagcttacattttccagccacaactcagagcaagagtgggtttataccaccaaggcaccagcagagtccaaagagaactcctttatcatccatcatatggaacagatcagattcctctagagacagggagaaccaggaagagttcctgagggcaccatcaccaatggaaattgatcccgctgacaagtatgtgtatcccaggggttttcaggagaataagagatatgaatcgtaccattcacagaatgtttaccaacgtgttagtttaaatgctcccatggagaatgcaatgagtcccgacacttttgagaactcagagaacatgccattctaccatcaaagcaacacatttaccagatctttcttcagcaatacctttggacgaagcggagaacagaggagatttggacaaggtcctttttggggccaagagaaaggacattctttctggtctgactttcatcgaagcaggaaatcattcagttcttctgacagagactttgaaatgatttccatggaagcaaatagtgtatcagccattcatggccataatgtttcttctgaacactgggaatcattttcttctggttatggaacagatgtttccagaggccaagaagagccacatccttggcagtttgattttcagagatccacactggatagcatggtggtatcacatggtaatgagacccagttgactcctcattttggcacaccaaatgtttgctccatgactggttcaagctatcacgtcaaatctagtgagttggtaagtcaacaggacagttctcctgtagaagtacatataaacaaagaagcttcctcatttggaattgctcagactctagcatcctcattcaaaacttccttttcccagatttctgatgacagaaggaatcctcagagtcccaacttgcagaatcccacagtcactttgcagaaaatttttccaaataagcctgcctctcatccaatgagaagccatacagaagtcactgtgaccaacagcaattcagttgactctctgcctcttgccaaaagccagcccaatatcttggtcacagaagtaaataatgagaaagacttaaatgaatctatttcagaagaagacaaacagctaagcaagatggaccagacaaacaaggcaggtgaaataccccaacctgtttcacagacagggatctcaaactctttacctgattttcaaaatcccttatcccaggactcagccaagagcaacgggtttggttttaatgcatctaccataataagttcaaaaaagtcacccagagtcttttccaggaaagatacctccaaaatgtatataccgcacacagataaatccaatgacattaaacaagataagaggtttactgaaaacagaaaacttggctcaacagcttcccttcctttcattcaggaacacagaacaccaccatctttccccaggacagaccaaggttgtcaccaggaattaactgtaaataatgaagatatttcaagaattattacaaataaccactggagctctgcactgactgatactcaaaatgcacaatactcaaaatgcaagttaactcctggccacaagacctcgtgtgattctttagatctgtcatcagctgcactaccagattcctcaccatcaaagaattcttcccttgatgctcctgtggttccatctactacagtgttctccaggagaagtccttcagacaaagatccatcgctaggagaaagagaagaaaaagacaatgctgggaagaaccaaaagaatcagtttattgtaagccactcagaaaaccaagagagaaatgatagtcctgtgcctacacatgatgaagtggttgatgtcaaatgccattcacactctccttttaggaatgaaagaggaaaaggaaaaataaggcatcatatatcctgtattgaaaagttaagcaaaacagaaagtatatcagtacccaccagtgatcacaggagcctcattgaagcaaatcaaagcaattccaaagtttctgaacttgacacaatttattgtaccttgccaagaaaatcaagcagttttctcatacatggcaggcagtcaggaagtaaaataatggctgcttcattgaggaatgggccacctcccttccaaatcaaaaataatgtggaagatgcaatggggaactatatgttaaacaaatttagtcccagttctcctgagtcagcgaatgaatgttccaaagtcctttcagactcagccctggaagcacctgaagccacagagagaatgacaaatgtaaaaagcagtggatctacttccgttagaaaaggaccacttccattcctcatcaacagggctatgtcatgtccctcaggggagccacatgcctcaactggaagagaaggaagaaaaaagccattgacctcaggcatggatgcttctgagctaacaccaagggcttgggagagaatcattagccctgtggaaagtgactcatctgttagagattgttctttaaccaaaagacaacaccaaaaggaaaacttccaagaatacactgagaaagagggtaaaatggctgcctccaggagaagtgtatttgctctttcaaatgaagaccctttacctttttgctcagacttgtcaggaaaagaacgtgggaaaacattacataaagttaagacgactagtacgttttctgtttctggtgatgaagataatgtaaaatgtctggaggtggtctcaatatattacactctaccgaggaaacccagcaaaaaattctgtaacctccttcaacagtatacacaaaatactaatttacttatagaatcacctcaagtggagactgaaacatttcctaacgctttagaaaaagacaaacagaattattctacacgagagcagtcaggaacaccttcatgtgaaaatctaaagatgtccgtcaactctgatcagacgctcaccactgaaaatatgactgccttccgattatcaaatagggggcccctagctcctacattacaggaaatggcttctgttgaggcagctgtttctcttcctgaagaggaatctaaagctagagagattttttcagataatttagctaaaacacctctaggtgattcagaaaacaagaaggaaagaggcaaaaagttgcaaagtgaaaccctgcatacttcattgatgcttcagagaaaaaatgtatccgaagaaaaatctgaaaattgtcaacaatccattaattcaagtaacagtggtccctctagtcttccagctctttcagaagttaatattggaaattcccaaactagaagaagttcttgggagtgtacagggagtggtagagccattccatttactggaagtggcaagtgtccccagaaagatcacacatccacagctgtaggtgatggctccagtggatcacagcctagggaaggcagaggggacattggaaccaactgccaaaaaatgactaataaaacactttctcactcagagagtcaagtctttgcccttactccagcattgcataaactacagcttggtgaggagactcagtcagatgaaccaaacttagagagtctgcagtctgaaccaagagaattacctcaaagaagtcaggaggcaaatatgacagagagcaggaaggctgaagatgaaatgcagaagtcagcttgggatcaaccttcacttcctgaaggaaacaaaaataaaaccaacttggatgacctagtaaagggggaaaatagatcttcagttaaacacagattggcagccatgtctaaagccagcagaaaattcccagctaaagatgtaagccccagaagacatgtagctactatcttcccccaaagtggaagcagatctggctttgaccatttatctcttggcacagtggagtgcaacccactgttccctgagcctactccaaaatctgcagagtccattggcgaaagcaggttgagtgagaacagaaagcatgtgaagaaatccgagaaccttctccccattactgtactacccaacagagaaccttctacacacgtcagcaaccagaagtctaacagcatttcacaacgacatcagaatgagtttaaaaacgtctcagaatcaccatcaaagcatgagaattctaaagacgtcacagcagctcagaatttagtaagagaatcaggagccccatcacccatcacattcaccagcctcagggaagcagaattctctgacaatcagaggaggctgagccctccttttccactggagcctgcacagaaatctagagtaagcagtccactggccagttttctgcagcaacaaaggagtgcttcatctctggagtgggaacctgagccacacctctatcgttcaaagagtttaaaaagcattaatgttcatggcgatctactacgaaaaagccatcctccaaaagtcagggagcgccatttttctgaaagcacttctattgacaatgccctgagtcgactgacccttgggaatgaattctctgtcaacaatgggtacagtcgaagattcagatctttttctgaactcccctcctgtgatggaaatgaaagttgggcttatcgcagcgggacaaaaacaggtcccaggtctgcaatatctatatacagacctatcgactatgggatctttgggaaagaacaacagttagctttcttagaaaatgtaaagaggtcacttacacaaggaagattatggaaaccaagttttcttaagaaccctggcttcctaaaagatgatttgaggaaccctcccaacccctcagagtcattaagctcaaattctcccagtagtcaggtgccagaagatggcttatctccaagtgaaccgcttaatatctatgaggatgacccagtggactcagattgtgacacagacacaaccacagatgatgaatactacctggatgaaaatgacaaagagtcagaactgtgaggctttttcaataaaatgctttacttttttcaccaaaagcttataatggaactaaggtgtacatgtgcatgtgcatggaaggataaaagatctagtctgggcagtgtctgctctgaaatgtcccacatctccttttttttcctccacaccctatatagacacttcctgaatgctagaacaatgaattcttgttttgagagagtctctgctattttctatctctgtaaatgttcttagcctgcctttccaccactcccacttaatccctgattcactgtctgatttgggctttctgctttacttccctcctaacatttttcatctttaattgtgatttacaaccctaatatcccaggcacatacaaaacttatgaattacccagcacaactgtgaaactctgtattgcttcttccggtccacaccctatactcatgacattaaataaaaggtagggatgataacagtggggtaaatattatcatcctgtttgactcatgaacatttaggaagtttaaggtggtgatcttctctttcaaacaaagataaaggaatttattttttaacctgagaaactgattgcaaaaagg

SEQ ID NO: 1325 - protein, 1989 aa, Homo sapiens
MTKVPPAFDFSFLNDEEAGKILQVLERNEELQRAEKDRISKLQKTKRDIRWLQGVTGEWFEEIQRKKFCNETDVSQMLKQPLTYRLSKEMAKNDPIELPTSRSKNVTNQKKPTPFSSRMSFRSSFASLFSFRKSGKETSKLPSLGQKGCDGHAGPPMPVRGAAVQAKIYNSPLENHLVDSTFVPKPAVMREESGMPPPWDASLLENEFFQVLDDLDSKLAQEQSASSVNTRTPLNYGSRTQFGHFYSSGNRHGNITERHKKHYNETSNMSIYDILRPGTPREGFKTFSPRTSTIYDMYRTREPRVFKEDYVQKNTFGSTSLCFDSRQRSALPATGHFTARSLHFPATTQSKSGFIPPRHQQSPKRTPLSSIIWNRSDSSRDRENQEEFLRAPSPMEIDPADKYVYPRGFQENKRYESYHSQNVYQRVSLNAPMENAMSPDTFENSENMPFYHQSNTFTRSFFSNTFGRSGEQRRFGQGPFWGQEKGHSFWSDFHRSRKSFSSSDRDFEMISMEANSVSAIHGHNVSSEHWESFSSGYGTDVSRGQEEPHPWQFDFQRSTLDSMVVSHGNETQLTPHFGTPNVCSMTGSSYHVKSSELVSQQDSSPVEVHINKEASSFGIAQTLASSFKTSFSQISDDRRNPQSPNLQNPTVTLQKIFPNKPASHPMRSHTEVTVTNSNSVDSLPLAKSQPNILVTEVNNEKDLNESISEEDKQLSKMDQTNKAGEIPQPVSQTGISNSLPDFQNPLSQDSAKSNGFGFNASTIISSKKSPRVFSRKDTSKMYIPHTDKSNDIKQDKRFTENRKLGSTASLPFIQEHRTPPSFPRTDQGCHQELTVNNEDISRIITNNHWSSALTDTQNAQYSKCKLTPGHKTSCDSLDLSSAALPDSSPSKNSSLDAPVVPSTTVFSRRSPSDKDPSLGEREEKDNAGKNQKNQFIVSHSENQERNDSPVPTHDEVVDVKCHSHSPFRNERGKGKIRHHISCIEKLSKTESISVPTSDHRSLIEANQSNSKVSELDTIYCTLPRKSSSFLIHGRQSGSKIMAASLRNGPPPFQIKNNVEDAMGNYMLNKFSPSSPESANECSKVLSDSALEAPEATERMTNVKSSGSTSVRKGPLPFLINRAMSCPSGEPHASTGREGRKKPLTSGMDASELTPRAWERIISPVESDSSVRDCSLTKRQHQKENFQEYTEKEGKMAASRRSVFALSNEDPLPFCSDLSGKERGKTLHKVKTTSTFSVSGDEDNVKCLEVVSIYYTLPRKPSKKFCNLLQQYTQNTNLLIESPQVETETFPNALEKDKQNYSTREQSGTPSCENLKMSVNSDQTLTTENMTAFRLSNRGPLAPTLQEMASVEAAVSLPEEESKAREIFSDNLAKTPLGDSENKKERGKKLQSETLHTSLMLQRKNVSEEKSENCQQSINSSNSGPSSLPALSEVNIGNSQTRRSSWECTGSGRAIPFTGSGKCPQKDHTSTAVGDGSSGSQPREGRGDIGTNCQKMTNKTLSHSESQVFALTPALHKLQLGEETQSDEPNLESLQSEPRELPQRSQEANMTESRKAEDEMQKSAWDQPSLPEGNKNKTNLDDLVKGENRSSVKHRLAAMSKASRKFPAKDVSPRRHVATIFPQSGSRSGFDHLSLGTVECNPLFPEPTPKSAESIGESRLSENRKHVKKSENLLPITVLPNREPSTHVSNQKSNSISQRHQNEFKNVSESPSKHENSKDVTAAQNLVRESGAPSPITFTSLREAEFSDNQRRLSPPFPLEPAQKSRVSSPLASFLQQQRSASSLEWEPEPHLYRSKSLKSINVHGDLLRKSHPPKVRERHFSESTSIDNALSRLTLGNEFSVNNGYSRRFRSFSELPSCDGNESWAYRSGTKTGPRSAISIYRPIDYGIFGKEQQLAFLENVKRSLTQGRLWKPSFLKNPGFLKDDLRNPPNPSESLSSNSPSSQVPEDGLSPSEPLNIYEDDPVDSDCDTDTTTDDEYYLDENDKESEL

SEQ ID NO: 1326 - DNA, 1672 bp, Homo sapiens
atgtcggaacagagaggcacaaagtcaaggcatgcgagtaagggccggggatccggagaggacgcgagccacgctgtggccgctcccactcagcgcctgtcccggagggcagaggcccagaggccgagttggccgctccggacgtccgcgtaccccaggcccccgcccgccctcccacgtatccactgttgtgtcctgagacacgcggtgcggaccctgcgcgcccagaagctgctacggggggagctagaggctcacagtgagcctgggacgggggcagagcgcaccgactgcactgagccgagctgtggcggtccctgcgcggaccccgaggggcgcccgctgcccgcggagtccggagccgatcggggaacggggtggtggggctgcgcgctcaggggtccctcccagcgaacccctcttgagcgcgcccgccacctcccgcgagccggggcagtccgaccgggccccgccagccccggggcggcccctaccgaagggcggcctcccggcggagtgcagggtcatcgggagccccggacggctttccccagctcgcgctgcgcggactcgccccggagcctcagtgcgcctcggagaaacgcctgccccagaaagggaggggaaaaaccgaaggtgtatcaaggtgtccgagtgaagatcacagtgaaggagctgctgcagcaaagacgggcacaccaggcggcctccgggggaacccggtccggaggcagcagtgtccacctttcagacccagttgcaccatcttctgcaggactgtattttgagcctgaaccaatttcttccacgcccaattatttgcaacggggagaattttccagttgtgtttcatgtgaagaaaactcaagctgcctcgaccagatctttgattcctaccttcagacagagatgcacccggagcctttgctcaattccacacaaagtgctccacaccatttcccagacagcttccaggccacccctttctgctttaaccagagcctgatcccaggatcaccttcaaattcctccattctctctggctccttagactacagttactcgccagtgcagctgccttcatatgctccagagaattacaattcccctgcttctctggacaccagaacctgtggctaccccccagaagaccattcctaccaacacttgtcctcacacgcccagtacagctgcttctcctcggccaccacctccatctgctactgcgcatcgtgtgaggcagaggacttggatgctctccaggcagcagagtacttctacccgagcacagactgtgtggactttgccccctcagcagccgccaccagtgatttctataagagggaaacaaactgtgacatctgctatagttaatagaaattacagtaattcagaacatggcatgggtatatctatttttctaccacgtctagatgacactgcaaaatatgcaacttggtaacacaatatcccaagcacagtttacatgtcactatttccaattttctgatgctaagcattcatatgaagtcctcagacccggtcacagcgccactcctactttgtatgctcatagtttaaatttttgtaggaaactttcaattgttttactttttgtataacgaacaaatgctgtctccttttttactaataaataattttgtattactaa

SEQ ID NO: 1327 - protein, 457 aa, Homo sapiens
MSEQRGTKSRHASKGRGSGEDASHAVAAPTQRLSRRAEAQRPSWPLRTSAYPRPPPALPRIHCCVLRHAVRTLRAQKLLRGELEAHSEPGTGAERTDCTEPSCGGPCADPEGRPLPAESGADRGTGWWGCALRGPSQRTPLERARHLPRAGAVRPGPASPGAAPTEGRPPGGVQGHREPRTAFPSSRCADSPRSLSAPRRNACPRKGGEKPKVYQGVRVKITVKELLQQRRAHQAASGGTRSGGSSVHLSDPVAPSSAGLYFEPEPISSTPNYLQRGEFSSCVSCEENSSCLDQIFDSYLQTEMHPEPLLNSTQSAPHHFPDSFQATPFCFNQSLIPGSPSNSSILSGSLDYSYSPVQLPSYAPENYNSPASLDTRTCGYPPEDHSYQHLSSHAQYSCFSSATTSICYCASCEAEDLDALQAAEYFYPSTDCVDFAPSAAATSDFYKRETNCDICYS

SEQ ID NO: 1328 - DNA, 3314 bp, Homo sapiens
gaattccggcaggcgcccatggcgggctgagtcctgcccatgccctggtggcctggaagcctgcatgggcgccgtgcaaagatcaacgttttccagaggagcttttgggctcatcactggcctggggagggcttgacacggggttcccacagcttgccccacaccaccttcacacccacacacagcaggtccccgcggggccggtgcaggctgtggctgcccgcgctgcgctgttgctctgtcccggctggctggctccgagtgtggggcgctctgggccggggccgctggggcgcgcacagtggggtgacaggcggcctggctgcagaaacgttgcaccggtgcctgaggtgggaggatgtgatgacgcggcccacgcagcgggaacccaggcctttaaaaagcccaggaaacagcctcagctcaagcggtggctccactggaggaaaacacaccccggtctcacattaaagaagccaaactgtcggcttcaaagagaaaaggcaacatcctgtcacaggccatgctctggcaaaaacccacagctccggagcaagccccagccccggcccggccataccagggcgtccgtgtgaaggagccagtgaaggaactgctgaggaggaagcgaggccacgccagcagtggggcagcacctgcacctacggcggtggtgctgccccatcagcccctggcgacctacaccacagtgggtccttcctgcctggacatggaaggttctgtgtctgcagtgacagaggaggctgccctgtgtgccggctggctctcccagcccaccccggccaccctgcagcccctggccccatggacaccttacaccgagtatgtgccccatgaagctgtcagctgcccctactcagctgacatgtatgtgcagcccgtgtgccccagctacacggtggtggggccctcctcagtgttggcctatgcctctccgccactcatcaccaatgtcacgacaagaagctccgccacgcccgcagtggggcccccgctggagggcccagagcaccaggcacccctcacctatttcccgtggcctcagcccctttccacactacccacctccaccctgcagtaccggcctccggccccagccctacctgggccccagtttgtccagctccccatctctatcccagagccagtccttcaggacatggaagaccccagaagagccgccagctcgttgaccatcgacaagctgcttttggaggaagaggatagcgacgcctatgcgcttaaccacactctctctgtggaaggcttttaggcgtggctcccacctgagtcctgttccctgaaactgggattttaaaatgagcctggaattgagccccaggttcatgcttgtttggagtagtcatttcatgactactctttctacgcacagctagaattgtagacctgtaaaccttccttcccttcttccttcccctccctccctcacttcctccctctcccccatccttccattcttcccctccctcccttcttcctttccaaccccttccttccttttcctccctcccttccttccctccttcccttctccctttccaaccccttccttccttttcctccctcccttccttccctccttcccttctccctttccttctttacctccctccctccctcgcttcttctctctttcttacttcttttttcaattctgttccattttgggaggtaattatagggattttagcaataacattttatgtcaaatgttgccaagtctgtggtccatgggctttcatttctgtcacatttcatttcttggaaaaggcctccttcctccagtgcctgctgaaccatcttagggtcactcacaccctctgtaattttaagatgtatgtggtggccggcgggaagaccagccccgacagcacctcctgagaaagtcagccaagggcctaccctgatgccagagtccttgagctgtcagttcccacagttgctcctttgtttgctcttctcagcctcggccagatttacagtccaggcagcaaaatctcaaggcctggggctcagagtagtaaggggtgggaagtgggtggcagggagaaaagaacatcagggtgggtggggacaggccagtgacgaagagagggacagaggagggatgggaacaggctgtgcatcttagttggagagaggggtgtgggaggaagcttgagtttgatgcagggaggaggaaggctgaggaatgacttggctccagattacttggttattaagaagaacaataaactaaaggaaagcattgcttgaagagatggttttgctgctctccttgaggatacgtgcaagggaagttgggctgttgtaaacagggtgaagggtgtgtttggtcggccatttctctctcacctctaggccctctgctggtgctgtggaggccaagaccccattaagcctaaaggtgatgggtcctcgcctaggcttagtgctaccatgtgggttttgtttctttccttccttccttccttccttccttccttccttccttccttccttccttccttccttccttccttctttccttccttccttccttccttccttcctctctctttctttcttttttttggttttttttgggacggagtctcactccattgcccaggctggagtacaatggtgcgatcttggctcactgcacctctgtctcccaagttcaagtgattctcctgcctgagcctcccgagtagctgggattacaggtgcatgccaccatgcctggctaatttttgtatttttagtagagacggggtttcaccatgttggccaggctggtctcgaactcctgaccttgtgatccgcgcgcctcagcctctcagagtgctgggatcacaggcgtgagccaccgcacccagccttttaccatgtgggtttctttagtgtcttaaaagcgtccataagccaccattctgtggaaccaaggccccctccacgcaaacaccctccctcctggggacctctggagcctcagccagaagtaccattaggtttaattttaatttgttttgctggagaaacatcaggtttgtaggagactgagttgttagcaggtgtgcttagctcttgatagtgaacgtgtaccttgggaactggctcacccacctgctaatagcaccatcgtcactattaagcagacatttcagttggtagaatccatgtagaagtcatggacttttctgggaaatgacttttctgggaaatgacagtttctttgacatattttctttgcccactttaaataaaaactctggagaaaaaaaaaaaaa

SEQ ID NO: 1329 - protein, 256 aa, Homo sapiens
MLWQKPTAPEQAPAPARPYQGVRVKEPVKELLRRKRGHASSGAAPAPTAVVLPHQPLATYTTVGPSCLDMEGSVSAVTEEAALCAGWLSQPTPATLQPLAPWTPYTEYVPHEAVSCPYSADMYVQPVCPSYTVVGPSSVLAYASPPLITNVTTRSSATPAVGPPLEGPEHQAPLTYFPWPQPLSTLPTSTLQYRPPAPALPGPQFVQLPISIPEPVLQDMEDPRRAASSLTIDKLLLEEEDSDAYALNHTLSVEGF

SEQ ID NO: 1330 - DNA, 2495 bp, Homo sapiens
cggaggctgagcaccgagagccgccaaggaagagaaactaaccacagccaagttaccccgccggctttccttcgctgcgctaaggaatgaaacccttccagctcgatctgctcttcgtctgcttcttcctcttcagtcaagagctgggcctccagaagagaggatgctgtctggtgctgggctacatggccaaggacaagtttcggagaatgaatgaaggccaagtctattccttcagccagcagccccaggaccaggtggtggtgtcgggacagccagtgacgctactttgcgccatccccgaatacgatggcttcgttctgtggatcaaggacggcttggctctgggtgtgggcagggacctctcaagttacccacagtacctggtggtagggaaccacctgtcaggggagcaccacctgaagatcctgagggcagagctgcaagacgatgcggtgtacgagtgccaggccatccaggccgccatccgctcccgccccgcacgcctcacagtcctggtgccgcctgatgaccccgtcatcctggggggccctgtgatcagcctgcgtgcgggggaccctctcaacctcacctgccacgcagacaatgccaagcctgcagcctccatcatctggttgcgaaagggagaggtcatcaatggggccacctactccaagaccctgcttcgggacggcaagcgggagagcatcgtcagcaccctcttcatctcccctggtgacgtggagaatggccagagcatcgtgtgtcgtgccaccaacaaagccatccccggaggaaaggagacgtcggtcaccattgacatccagcaccctccactggtcaacctctcggtggagccacagccagtgctggaggacaacgtcgtcactttccactgctctgcaaaggccaacccagctgtcacccagtacaggtgggccaagcggggccagatcatcaaggaggcatctggagaggtgtacaggaccacagtggactacacgtacttctcagagcccgtctcctgtgaggtgaccaacgccctgggcagcaccaacctcagccgcacggttgacgtctactttgggccccggatgaccacagaaccccaatccttgctcgtggatctgggctctgatgccatcttcagctgcgcctggaccggcaacccatccctgaccatcgtctggatgaagcggggctccggagtggtcctgagcaatgagaagaccctgaccctcaaatccgtgcgccaggaggacgcgggcaagtacgtgtgccgggctgtggtgccccgtgtgggagccggggagagagaggtgaccctgaccgtcaatggaccccccatcatctccagcacccagacccagcacgccctccacggcgagaagggccagatcaagtgcttcatccggagcacgccgccgccggaccgcatcgcctggtcctggaaggagaacgttctggagtcgggcacatcggggcgctatacggtggagaccatcagcaccgaggagggcgtcatctccaccctgaccatcagcaacatcgtgcgggccgacttccagaccatctacaactgcacggcctggaacagcttcggctccgacactgagatcatccggctcaaggagcaaggttcggaaatgaagtcgggagccgggctggaagcagagtctgtgccgatggccgtcatcattggggtggccgtaggagctggtgtggccttcctcgtccttatggcaaccatcgtggcgttctgctgtgcccgttcccagagaaatctcaaaggtgttgtgtcagccaaaaatgatatccgagtggaaattgtccacaaggaaccagcctctggtcgggagggtgaggagcactccaccatcaagcagctgatgatggaccggggtgaattccagcaagactcagtcctgaaacagctggaggtcctcaaagaagaggagaaagagtttcagaacctgaaggaccccaccaatggctactacagcgtcaacaccttcaaagagcaccactcaaccccgaccatctccctctccagctgccagcccgacctgcgtcctgcgggcaagcagcgtgtgcccacaggcatgtccttcaccaacatctacagcaccctgagcggccagggccgcctctacgactacgggcagcggtttgtgctgggcatgggcagctcgtccatcgagctttgtgagcgggagttccagagaggctccctcagcgacagcagctccttcctggacacgcagtgtgacagcagcgtcagcagcagcggcaagcaggatggctatgtgcagttcgacaaggccagcaaggcttctgcttcctcctcccaccactcccagtcctcgtcccagaactctgaccccagtcgacccctgcagcggcggatgcagactcacgtctaaggatcacacaccgcgggtggggacgggccagggaagaggtcagggcacgttctggttgtccagggacgaggg

SEQ ID NO: 1331 - protein, 778 aa, Homo sapiens
MKPFQLDLLFVCFFLFSQELGLQKRGCCLVLGYMAKDKFRRMNEGQVYSFSQQPQDQVVVSGQPVTLLCAIPEYDGFVLWIKDGLALGVGRDLSSYPQYLVVGNHLSGEHHLKILRAELQDDAVYECQAIQAAIRSRPARLTVLVPPDDPVILGGPVISLRAGDPLNLTCHADNAKPAASIIWLRKGEVINGATYSKTLLRDGKRESIVSTLFISPGDVENGQSIVCRATNKAIPGGKETSVTIDIQHPPLVNLSVEPQPVLEDNVVTFHCSAKANPAVTQYRWAKRGQIIKEASGEVYRTTVDYTYFSEPVSCEVTNALGSTNLSRTVDVYFGPRMTTEPQSLLVDLGSDAIFSCAWTGNPSLTIVWMKRGSGVVLSNEKTLTLKSVRQEDAGKYVCRAVVPRVGAGEREVTLTVNGPPIISSTQTQHALHGEKGQIKCFIRSTPPPDRIAWSWKENVLESGTSGRYTVETISTEEGVISTLTISNIVRADFQTIYNCTAWNSFGSDTEIIRLKEQGSEMKSGAGLEAESVPMAVIIGVAVGAGVAFLVLMATIVAFCCARSQRNLKGVVSAKNDIRVEIVHKEPASGREGEEHSTIKQLMMDRGEFQQDSVLKQLEVLKEEEKEFQNLKDPTNGYYSVNTFKEHHSTPTISLSSCQPDLRPAGKQRVPTGMSFTNIYSTLSGQGRLYDYGQRFVLGMGSSSIELCEREFQRGSLSDSSSFLDTQCDSSVSSSGKQDGYVQFDKASKASASSSHHSQSSSQNSDPSRPLQRRMQTHV

SEQ ID NO: 1332 - DNA, 10316 bp, Homo sapiens
ctcctctgccccggggccgccaccgcccgggcgtcggacctggtcccgtgctcgcggtgccgccgccctctgggcctagcccgcccagctcggcgagcggcggcagtgggagccgcgtccgccgcatccgcctcgactcggtgccggcccctggccctcccctcatgactgcggcgcctctgctgccaccgcccgcccggccgccgctcgccgcaggatggatgcggaccgtgcggcgctaacccccgtggctcagctcccgaatcgcccgccttcgagccctcctcgtgagccgcagcagcctcggtgccagcccccgccgcagctgggcccagcggtccgcctgtccctcgttgcggcttgtcggtgctgagtgaggcgtcgtccgggtcggcgcgaacccgcccggccgcggttccctgcagacctctgcgcgggcggctcggcccttcacgcccttttcgttcacgaatccgagcccgctcgcctctctccagcgaaccgaccatgtctggcggcgccgcagagaagcagagcagcactcccggttccctgttcctctcgccgccggctcctgcccccaagaatggctccagctccgattcctccgtgggggagaaactgggagccgcggccgccgacgctgtgaccggcaggaccgaggagtacaggcgccgccgccacactatggacaaggacagccgtggggcggccgcgaccactaccaccactgagcaccgcttcttccgccggagcgtcatctgtgactccaatgccactgcactggagcttcccggccttcctctttccctgccccagcccagcatccccgcggctgtcccgcagagtgctccaccggagccccaccgggaagagaccgtgaccgccaccgccacttcccaggtagcccagcagcctccagccgctgccgcccctggggaacaggccgtcgcgggccctgccccctcgactgtccccagcagtaccagcaaagaccgcccagtgtcccagcctagccttgtggggagcaaagaggagccgccgccggcgagaagtggcagcggcggcggcagcgccaaggagccacaggaggaacggagccagcagcaggatgatatcgaagagctggagaccaaggccgtgggaatgtctaacgatggccgctttctcaagtttgacatcgaaatcggcagaggctcctttaagacggtctacaaaggtctggacactgaaaccaccgtggaagtcgcctggtgtgaactgcaggatcgaaaattaacaaagtctgagaggcagagatttaaagaagaagctgaaatgttaaaaggtcttcagcatcccaatattgttagattttatgattcctgggaatccacagtaaaaggaaagaagtgcattgttttggtgactgaacttatgacgtctggaacacttaaaacgtatctgaaaaggtttaaagtgatgaagatcaaagttctaagaagctggtgccgtcagatccttaaaggtcttcagtttcttcatactcgaactccacctatcattcaccgcgatcttaaatgtgacaacatctttatcaccggccctactggctcagtcaagattggagacctcggtctggcaaccctgaagcgggcttcttttgccaagagtgtgataggtaccccagagttcatggcccctgagatgtatgaggagaaatatgatgaatccgttgacgtttatgcttttgggatgtgcatgcttgagatggctacatctgaatatccttactcggagtgccaaaatgctgcacagatctaccgtcgcgtgaccagtggggtgaagccagccagttttgacaaagtagcaattcctgaagtgaaggaaattattgaaggatgcatacgacaaaacaaagatgaaagatattccatcaaagaccttttgaaccatgccttcttccaagaggaaacaggagtacgggtagaattagcagaagaagatgatggagaaaaaatagccataaaattatggctacgtattgaagatattaagaaattaaagggaaaatacaaagataatgaagctattgagttttcttttgatttagagagagatgtcccagaagatgttgcacaagaaatggtagagtctgggtatgtctgtgaaggtgatcacaagaccatggctaaagctatcaaagacagagtatcattaattaagaggaaacgagagcagcggcagttggtacgggaggagcaagaaaaaaaaaagcaggaagagagcagtctcaaacagcaggtagaacaatccagtgcttcccagacaggaatcaagcagctcccttctgctagcaccggcatacctactgcttctaccacttcagcttcagtttctacacaagtagaacctgaagaacctgaggcagatcaacatcaacaactacagtaccagcaacccagtatatctgtgttatctgatgggacggttgacagtggtcagggatcctctgtcttcacagaatctcgagtgagcagccaacagacagtttcatatggttcccaacatgaacaggcacattctacaggcacagtcccagggcatataccttctactgtccaagcacagtctcagccccatggggtatatccaccctcaagtgtggcacaggggcagagccagggtcagccatcctcaagtagcttaacaggggtttcatcttcccaacccatacaacatcctcagcagcagcagggaatacagcagacagcccctcctcaacagacagtgcagtattcactttcacagacatcaacctccagtgaggccactactgcacagccagtgagtcagcctcaagctccacaagtcttgcctcaagtatcagctggaaaacagcttccagtttcccagccagtaccaactatccaaggcgaacctcagatcccagttgcgacacaaccctcggttgttccagtccactctggtgctcatttccttccagtgggacagccgctccctactcccttgctccctcagtaccctgtctctcagattcccatatcaactcctcatgtgtctacggctcagacaggtttctcatcccttcccatcacaatggcagctggcattactcagcctctgctcacgttggcttcatctgctacaacagctgcgatcccgggggtatcaactgtggttcctagtcagcttccaacccttctgcagcctgtgactcagctgccaagtcaggttcacccacagctcctacaaccagcagttcagtccatgggaataccagctaaccttggacaagctgctgaggttccactttcctctggagatgttctgtaccagggcttcccacctcgactgccaccacagtacccaggagattcaaatattgctccctcttccaacgtggcttctgtttgcatccattctacagtcctatcccctcccatgccgacagaagtactggctacacctgggtactttcccacagtggtgcagccttatgtggaatcaaatcttttagttcctatgggtggtgtaggaggacaggttcaagtgtcccagccaggagggagtttagcacaagcccccactacatcctcccagcaagcagttttggagagtactcagggagtctctcaggttgctcctgcagagccagttgcagtagcacagacccaagctacccagccgaccactttggcttcctctgtagacagtgcacattcagatgttgcttcaggtatgagtgatggcaatgagaacgtcccatcttccagtggaaggcatgaaggaagaactacaaaacggcattaccgaaaatctgtaaggagtcgctctcgacatgaaaaaacttcacgcccaaaattaagaattttgaatgtttcaaataaaggagaccgagtagtagaatgtcaattagagactcataataggaaaatggttacattcaaatttgacctagatggtgacaaccccgaggagatagcaacaattatggtgaacaatgactttattctagcaatagagagagagtcgtttgtggatcaagtgcgagaaattattgaaaaagctgatgaaatgctcagtgaggatgtcagtgtggaaccagagggtgatcagggattggagagtctacaaggaaaggatgactatggcttttcaggttctcagaaattggaaggagagttcaaacaaccaattcctgcgtcttccatgccacagcaaataggcattcctaccagttctttaactcaagttgttcattctgcgggaaggcggtttatagtgagtcctgtgccagaaagccgattacgagaatcaaaagttttccccagtgaaataacagatacagttgctgcctctacagctcagagccctggaatgaacttgtctcactctgcatcatcccttagtctacaacaggccttttctgaacttagacgtgcccaaatgacagaaggacccaacacagcacctccaaactttagtcatacaggaccaacatttccagtagtacctcctttcttaagtagcattgctggagtcccaaccacagcagcagccacagcaccagtccctgcaacaagcagccctcctaatgacatttccacatcagtaattcagtctgaggttacagtgcccactgaagaggggattgctggagttgccaccagcacaggtgtggtaacttcaggtggtctccccataccacctgtgtctgaatcaccagtactttccagcgtagtttcaagtatcacaatacctgcagttgtctcaatatctactacatccccgtcacttcaagtccccacatccacatctgagatcgttgtttctagtacagcactgtatccttcagtaacagtttcagcaacttcagcctctgcagggggcagtactgctaccccaggtcctaagcctccagctgtagtatctcagcaggcagcaggcagcactactgtgggagccacattaacatcagtttctaccaccacttcattcccaagcacagcttcacagctgtccattcagcttagcagcagtacttctactcctactttagctgaaaccgtggtagttagcgcacactcactagataagacatctcatagcagtacaactggattggctttctccctctctgcaccatcttcctcttcctctcctggagcaggagtgtctagttatatttctcagcctggtgggctgcatcctttggtcattccatcagtgatagcttctactcctattcttccccaagcagcaggacctacttctacacctttattaccccaagtacctagtatcccacccttggtacagcctgttgccaatgtgcctgctgtacagcagacactaattcatagtcagcctcaaccagctttgcttcccaaccagccccatactcattgtcctgaagtagattctgatacacaacccaaagctcctggaattgatgacataaagactctagaagaaaagctgcggtctctgttcagtgaacacagctcatctggagctcagcatgcctctgtctcactggagacctcactagtcatagagagcactgtcacaccaggcatcccaactactgctgttgcaccaagcaaactcctgacttctaccacaagtacttgcttaccaccaaccaatttaccactaggaacagttgctttgccagttacaccagtggtcacacctgggcaagtttctaccccagtcagcactactacatcaggagtgaaacctggaactgctccctccaagccacctctaactaaggctccggtgctgccagtgggtactgaacttccagcaggtactctacccagcgagcagctgccaccttttccaggaccttctctaacccagtcccagcaacctctagaggatcttgatgctcaattgagaagaacacttagtccagagatgatcacagtgacttctgcggttggtcctgtgtccatggcggctccaacagcaatcacagaagcaggaacacagcctcagaagggtgtttctcaagtcaaagaaggccctgtcctagcaactagttcaggagctggtgtttttaagatgggacgatttcaggtttctgttgcagcagacggtgcccagaaagagggtaaaaataagtcagaagatgcaaagtctgttcattttgaatccagcacctcagagtcctcagtgctatcaagtagtagtccagagagtaccttggtgaaaccagagccgaatggcataaccatccctggtatctcttcagatgtgccagagagtgcccacaaaactactgcctcagaggcaaagtcagacactgggcagcctaccaaggttggacgttttcaggtgacaactacagcaaacaaagtgggtcgtttctctgtatcaaaaactgaggacaagatcactgacacaaagaaagaaggaccagtggcatctcctccttttatggatttggaacaagctgttcttcctgctgtgataccaaagaaagagaagcctgaactgtcagagccttcacatctaaatgggccgtcttctgacccggaggccgcttttttaagtagggatgtggatgatggttccggtagtccacactcgccccatcagctgagctcaaagagccttcctagccagaatctaagtcaaagccttagtaattcatttaactcctcttacatgagtagcgacaatgagtcagatatcgaagatgaagacttaaagttagagctgcgacgactacgagataaacatctcaaagagattcaggacctgcagagtcgccagaagcatgaaattgaatctttgtataccaaactgggcaaggtgccccctgctgttattattcccccagctgctcccctttcagggagaagacgacgacccactaaaagcaaaggcagcaaatctagtcgaagcagttccttggggaataaaagcccccagctttcaggtaacctgtctggtcagagtgcagcttcagtcttgcacccccagcagaccctccaccctcctggcaacatcccagagtccgggcagaatcagctgttacagccccttaagccatctccctccagtgacaacctctattcagccttcaccagtgatggtgccatttcagtaccaagcctttctgctccaggtcaaggaaccagcagcacaaacactgttggggcaacagtgaacagccaagccgcccaagctcagcctcctgccatgacgtccagcaggaagggcacattcacagatgacttgcacaagttggtagacaattgggcccgagatgccatgaatctctcaggcaggagaggaagcaaagggcacatgaattacgagggccctggaatggcaaggaagttctctgcacctgggcaactgtgcatctccatgacctcgaacctgggtggctctgcccccatctctgcagcatcagctacctctctaggtcacttcaccaagtctatgtgccccccacagcagtatggctttccagctaccccatttggcgctcaatggagtgggacgggtggcccagcaccacagccacttggccagttccaacctgtgggaactgcctccttgcagaatttcaacatcagcaatttgcagaaatccatcagcaaccccccaggctccaacctgcggaccacttagacctagagacattaactgaatagatctgggggcaggagatggaatgctgagggggtgggtgggggtgggaagtagcctatatactaactactagtgctgcatttaactggttatttcttgccagaggggaatgtttttaatactgcattgagccctcagaatggagagtctcccccgctccagttattggaatgggagaggaaggaaagaacagcttttttgtcaaggggcagcttcagaccatgctttcctgtttatctatactcagtaatgaggatgagggctaggaaagtcttgttcataaggaagctggagaactcaatgtaaaatcaaacccatctgtaatttcgagtgggtggagctcttgcttttggtacatgccctgaatccctcactccctcaagaatccgaaccacaggacaaaaaccacctactgggctctctcctaccctgccctcctcccttttttttacccctctcttttttattttttctttgctctttagaacccagtgaaaaataccagggtactggggtgcaactctttcttatgataggtcattagtgctttaagcaaaagatattagcagctttgactgcagcattagcaattaggaaaaaaaaaaaattaagttccctgcggacatgtaactttgccatcagttttgatgtggaaacactgtgatatataaaatgttgttggacaacagtagttttaagagtaaaatatgaaacgtttaaaaagttccaaaaaaagctagctctgtcctttacttattgagacactttaactttttcctttgtatttccattgtattagataaataaatgtgaatgtaaaattgtataaattactgtacttgaatacttctgtttcccagtgttgcttgctggacattttagtgccttggacttctattgcttctgccattagcatcaacttaccagaccccagatcaataaagggcatgtggaaggaaatcgtaggtccatgtgaccccagcagtccagcagtggttatgccaaagggaaattgaaaaagtatttttttaagtcattcaacaactttgtctagagcaggtgtaagatgagtagggtgggaagttaggttggcatcagtggttaaaaacagaaagttctgtttcgggaatagtgaggagggggtgttgtaacaaaattggacaacttaaaagaatggtgtgtgctgggtgaaagacaaagactaaagaatgaggaaacaaacgtgatgcctggccagtgactgtcatataaacctttcttatttgagctaggcttgaacagacgtgacctagaagaaactgaacataaagagaagggggtggggggctagttttcaagttggggaacctgatagtgaaaagtcacagatggagaaaattgctctcagaaaaactgtttggattgctttcctcttgttgcacatgtaccatgcatttctcagcttggggtactacattttgtggaaagttaatctatctatctttccacatctgaattaatcattctaggaaagaatacttattcctactcatttcctttatgatgtccaaatggttgcaggatcataatctattgtgccacctttatttctagaagtacaactaatatgttcacattttcaaataaataatactccccgtaagtaataactgcaaccaatcagtgttattcagtgctatgcctccttgtaatgggtagttattaattattttcagagctttccggaaatactgtcctaactggctatgtttaggatctttgttatctctgaagacaaagaaagaagctaggactcttaattttggggtgcttcttgactcttagttgggaaactgaaaatatttccaaccttttacccacgtcaatggcatattctgggaatcaccaccaccaccaccactaccacagaaagaggctggaggctcctgtaccctgttcattccttaagggccctgcttcccttagtaagtaagtaagttggtctacggccctaaatatgcaaatgagagctgaaggtttttaaaaggtagaaaggaaaagggcaagggcttccacccctgctttaaaatgatttatttattctctgcttgtatttcttgtggagagagtaaggatagaaccaacaaggggctgagtagctgagaaaggggccacccaagagtgaaacatactttataccagaggagcagtggagcctcatgcagcacattatcatttgttatttgggtttaataataattttgacatcttttcactcatacacaaaaaaagtcagaactggtgttatttactgttgatttcatcctcctgtgtatgaaataacaagcctagaggaatgaactagtgctactgaactgtttaaattatttttgtgttaatagtacactttgagtatctttttccacattaaaaactttctgaattataaatgttttccttacattatttaacaatgtacactgttaaaaataaaaataaaaattcaaactttgggggtttctcagcagccgttaattgtacattttgcactaactctgggtgttgcgcttcttgtaagattgcgctttgtgcttcagtttgttacctttgtagacttatttaatgaaaccattcaaataaaccaaacttgcttttgttga

SEQ ID NO: 1333 - protein, 2382 aa, Homo sapiens
MSGGAAEKQSSTPGSLFLSPPAPAPKNGSSSDSSVGEKLGAAAADAVTGRTEEYRRRRHTMDKDSRGAAATTTTTEHRFFRRSVICDSNATALELPGLPLSLPQPSIPAAVPQSAPPEPHREETVTATATSQVAQQPPAAAAPGEQAVAGPAPSTVPSSTSKDRPVSQPSLVGSKEEPPPARSGSGGGSAKEPQEERSQQQDDIEELETKAVGMSNDGRFLKFDIEIGRGSFKTVYKGLDTETTVEVAWCELQDRKLTKSERQRFKEEAEMLKGLQHPNIVRFYDSWESTVKGKKCIVLVTELMTSGTLKTYLKRFKVMKIKVLRSWCRQILKGLQFLHTRTPPIIHRDLKCDNIFITGPTGSVKIGDLGLATLKRASFAKSVIGTPEFMAPEMYEEKYDESVDVYAFGMCMLEMATSEYPYSECQNAAQIYRRVTSGVKPASFDKVAIPEVKEIIEGCIRQNKDERYSIKDLLNHAFFQEETGVRVELAEEDDGEKIAIKLWLRIEDIKKLKGKYKDNEAIEFSFDLERDVPEDVAQEMVESGYVCEGDHKTMAKAIKDRVSLIKRKREQRQLVREEQEKKKQEESSLKQQVEQSSASQTGIKQLPSASTGIPTASTTSASVSTQVEPEEPEADQHQQLQYQQPSISVLSDGTVDSGQGSSVFTESRVSSQQTVSYGSQHEQAHSTGTVPGHIPSTVQAQSQPHGVYPPSSVAQGQSQGQPSSSSLTGVSSSQPIQHPQQQQGIQQTAPPQQTVQYSLSQTSTSSEATTAQPVSQPQAPQVLPQVSAGKQLPVSQPVPTIQGEPQIPVATQPSVVPVHSGAHFLPVGQPLPTPLLPQYPVSQIPISTPHVSTAQTGFSSLPITMAAGITQPLLTLASSATTAAIPGVSTVVPSQLPTLLQPVTQLPSQVHPQLLQPAVQSMGIPANLGQAAEVPLSSGDVLYQGFPPRLPPQYPGDSNIAPSSNVASVCIHSTVLSPPMPTEVLATPGYFPTVVQPYVESNLLVPMGGVGGQVQVSQPGGSLAQAPTTSSQQAVLESTQGVSQVAPAEPVAVAQTQATQPTTLASSVDSAHSDVASGMSDGNENVPSSSGRHEGRTTKRHYRKSVRSRSRHEKTSRPKLRILNVSNKGDRVVECQLETHNRKMVTFKFDLDGDNPEEIATIMVNNDFILAIERESFVDQVREIIEKADEMLSEDVSVEPEGDQGLESLQGKDDYGFSGSQKLEGEFKQPIPASSMPQQIGIPTSSLTQVVHSAGRRFIVSPVPESRLRESKVFPSEITDTVAASTAQSPGMNLSHSASSLSLQQAFSELRRAQMTEGPNTAPPNFSHTGPTFPVVPPFLSSIAGVPTTAAATAPVPATSSPPNDISTSVIQSEVTVPTEEGIAGVATSTGVVTSGGLPIPPVSESPVLSSVVSSITIPAVVSISTTSPSLQVPTSTSEIVVSSTALYPSVTVSATSASAGGSTATPGPKPPAVVSQQAAGSTTVGATLTSVSTTTSFPSTASQLSIQLSSSTSTPTLAETVVVSAHSLDKTSHSSTTGLAFSLSAPSSSSSPGAGVSSYISQPGGLHPLVIPSVIASTPILPQAAGPTSTPLLPQVPSIPPLVQPVANVPAVQQTLIHSQPQPALLPNQPHTHCPEVDSDTQPKAPGIDDIKTLEEKLRSLFSEHSSSGAQHASVSLETSLVIESTVTPGIPTTAVAPSKLLTSTTSTCLPPTNLPLGTVALPVTPVVTPGQVSTPVSTTTSGVKPGTAPSKPPLTKAPVLPVGTELPAGTLPSEQLPPFPGPSLTQSQQPLEDLDAQLRRTLSPEMITVTSAVGPVSMAAPTAITEAGTQPQKGVSQVKEGPVLATSSGAGVFKMGRFQVSVAADGAQKEGKNKSEDAKSVHFESSTSESSVLSSSSPESTLVKPEPNGITIPGISSDVPESAHKTTASEAKSDTGQPTKVGRFQVTTTANKVGRFSVSKTEDKITDTKKEGPVASPPFMDLEQAVLPAVIPKKEKPELSEPSHLNGPSSDPEAAFLSRDVDDGSGSPHSPHQLSSKSLPSQNLSQSLSNSFNSSYMSSDNESDIEDEDLKLELRRLRDKHLKEIQDLQSRQKHEIESLYTKLGKVPPAVIIPPAAPLSGRRRRPTKSKGSKSSRSSSLGNKSPQLSGNLSGQSAASVLHPQQTLHPPGNIPESGQNQLLQPLKPSPSSDNLYSAFTSDGAISVPSLSAPGQGTSSTNTVGATVNSQAAQAQPPAMTSSRKGTFTDDLHKLVDNWARDAMNLSGRRGSKGHMNYEGPGMARKFSAPGQLCISMTSNLGGSAPISAASATSLGHFTKSMCPPQQYGFPATPFGAQWSGTGGPAPQPLGQFQPVGTASLQNFNISNLQKSISNPPGSNLRTT

SEQ ID NO: 1334 - DNA, 1305 bp, Homo sapiens
atgtatgaattacttgtcttattcatgttgatacagcctcagtccatggcgcatccgtgtggggggaccccaacatacccagaatcacagatatttttcccaactattcatgaacgtccagtttctttttcaccacctcccacctgcccaccgaaagtagccatttcccagcggcgtaagagcacctccttcctggaagcccaaactcaccacttccaacccctgctgaggactgttggccaaagtcttcttccacctggtggcagcccaactaactggacaccagaggccgtagttatgttgggtactacagccagtagagtaactggagagtcatgtgagatacaggtccatcctatgtttgaaccatctcaagtttacagtgactatagacctggactagtacttccagaagaagctcactattttattcctcaggaagcagtgtatgtagctggggtacattaccaggcccgggtggcagaacagtatgagggcattccatacaactcatcagtactgtcaagtcctatgaaacagatacctgaacagaagccagtacaagggggccctacttcaagttctgtctttgaatttccatctggacaggctttcctggtaggacaccttcagaatctaagattagattctggattgggtccgggatctcccctctctagtatttctgcacctatcagtacagatgctacacgtttgaaatttcaccctgtctttgttcctcattctgcgcctgctgtgttaactcataacaatgagagcagaagcaactgtgtatttgaatttcatgttcacacaccaagctcctcttcaggagaaggaggtggaattttacctcagcgtgtttaccgaaatcggcaggttgcagtggacttgaatcaagaagaactgcctcctcaatcagttggattacatggctacttgcagcctgtgactgaagaaaagcataattaccatgccccagaattgaccgtttctgtggtagagcctatcggacagaactggccaataggaagcccagaatattccagtgattcctcacaaatcacttcttcagaccccagtgattttcagtcacctccccctacagggggagcagctgcaccttttggctctgacgtctcaatgccctttatccatctgcctcagacagtgttacaagaatccccacttttcttctgtttcccccaaggaaccacatctcagcaggtcttaactgcctcattttcttcaggaggatctgcacttcatccacaggttataggaaaacttccacaattattttaa

SEQ ID NO: 1335 - protein, 434 aa, Homo sapiens
MYELLVLFMLIQPQSMAHPCGGTPTYPESQIFFPTIHERPVSFSPPPTCPPKVAISQRRKSTSFLEAQTHHFQPLLRTVGQSLLPPGGSPTNWTPEAVVMLGTTASRVTGESCEIQVHPMFEPSQVYSDYRPGLVLPEEAHYFIPQEAVYVAGVHYQARVAEQYEGIPYNSSVLSSPMKQIPEQKPVQGGPTSSSVFEFPSGQAFLVGHLQNLRLDSGLGPGSPLSSISAPISTDATRLKFHPVFVPHSAPAVLTHNNESRSNCVFEFHVHTPSSSSGEGGGILPQRVYRNRQVAVDLNQEELPPQSVGLHGYLQPVTEEKHNYHAPELTVSVVEPIGQNWPIGSPEYSSDSSQITSSDPSDFQSPPPTGGAAAPFGSDVSMPFIHLPQTVLQESPLFFCFPQGTTSQQVLTASFSSGGSALHPQVIGKLPQLF

SEQ ID NO: 1336 - DNA, 2673 bp, Homo sapiens
cccattctcctctgcgcggcctccatctaagatctcttccccttgtccatagcctagatcgagctccctgtgtgcaccgcgcgctgcccgaggcgcaggtcaaccagaatcaagatgtctgggactgaggaagcaattcttggaggacgtgacagccatcctgctgctggcggcggctcagtgttatgctttggacagtgccagtacacagcagaagagtaccaggccatccagaaggccctgaggcagaggctgggcccagaatacataagtagccgcatggctggcggaggccagaaggtgtgctacattgagggtcatcgggtaattaatctggccaatgagatgtttggttacaatggctgggcacactccatcacgcagcagaatgtggattttgttgacctcaacaatggcaagttctacgtgggagtctgtgcatttgtgagggtccagctgaaggatggttcatatcatgaagatgttggttatggtgttagtgagggcctcaagtccaaggctttatctttggagaaggcaaggaaggaggcggtgacagacgggctgaagcgagccctcaggagttttgggaatgcacttggaaactgtattctggacaaagactacctgagatcactaaataagcttccacgccagttgcctcttgaagtggatttaactaaagcgaagagacaagatcttgaaccgtctgtggaggaggcaagatacaacagctgccgaccgaacatggccctgggacacccacagctgcagcaggtgacctccccttccagacccagccatgctgtgataccggcggaccaggactgcagctcccgaagcctgagctcatccgccgtggagagcgaggccacgcaccagcggaagctccggcagaagcagctgcagcagcagttccgggagcggatggagaagcagcaggttcgagtctccacgccgtcagctgagaagagtgaggcagcgcctccggcccctcctgtgacgcacagcactcctgtaactgtctcagaaccactcctggagaaagacttccttgcaggagtgactcaagaattaatcaagactcttgaagacaactctgaaaagtgggctgtgactcccgatgcaggggatggtgtggtcaagccctcgtctagagcagacccagcccagacctctgacacattagccttgaacaaccagatggtgacccagaacaggactccacacagcgtttgccaccagaaaccacaagcaaaatctggatcttgggacctccaaacttatagcgctgaccaacgcacaacaggaaactgggaatctcataggaagagccaggacatgaagaaaaggaaatatgatccatcttaactgaggctcaggccacataattggactctgtcacaaagggactttggaaaactactttttggtcatgaaattgttcatcgctgctggagaatgaacgtcattgcgatttatcttgcttcattctgaaccttatcaagaggatctgactgagagcccactgcagttagagctgagcacttttgaaaagcttgtccatcactctagtagggagaggctctggacagatgaataccttttcttcggcttgtgaggcttcccactatttattactgaactattatgttaatgaagatggacattttaggaatcaccaatggctccttgccctcaagcaatataggccagacttggtcctaagcacctgcctcagcaattgtctacattcagttgttttgcataacgtctgccttctttcctttacggtccatgcctttaatgttgcccacattaagcactgtggatcacgacaggaaaaaggttggagcagtgcttttcactactttgtatcaatccaggctacaatcttcatttaatataaataatttatggatttatgacattacaatcctgcattgtttcaagactgacattttttcctaaggaaggaaataatcatctaagaccacgaaaaaaggctgttttttgtttttttttttttttttttttttgagacggggtctggctgtgttgccctgactggagttcagtggtgcaaacacagctctctccacaacctcttgggcccaagtgatactcccacctctgccttacaaaatacagggattactggtgtgagccactgtgtctggccagaaaaggcatttttgagaaagcaaatcgtataccttattaacaaaatagaatatatatatattgcttatctgaaatgcttgaaaccagaattgttttgcattttttgaatatttgtatacacataatgagaccttggggatgggacccaagtctgaacgtggaattcacctgtgtttcgtgtatatgcctcatacacataattttgtgcatgaaacagagtttttgtataagaagatacactgcagctgaagagggctgggtttttttttctcttagggtcgctgcataaactgttgtatgcctggtgctttgcgacttgtcacacgaggtcacgtgtggaattttccacttctggcatcacgtcagtgctcagaaattttctgatctcagagcatttcaattagggatgctcaaacgcaactgtttctacttccccatttcaggtgtgagatgtaacccaccttgaccataaattggcttttcatagtg

SEQ ID NO: 1337 - protein, 418 aa, Homo sapiens
MSGTEEAILGGRDSHPAAGGGSVLCFGQCQYTAEEYQAIQKALRQRLGPEYISSRMAGGGQKVCYIEGHRVINLANEMFGYNGWAHSITQQNVDFVDLNNGKFYVGVCAFVRVQLKDGSYHEDVGYGVSEGLKSKALSLEKARKEAVTDGLKRALRSFGNALGNCILDKDYLRSLNKLPRQLPLEVDLTKAKRQDLEPSVEEARYNSCRPNMALGHPQLQQVTSPSRPSHAVIPADQDCSSRSLSSSAVESEATHQRKLRQKQLQQQFRERMEKQQVRVSTPSAEKSEAAPPAPPVTHSTPVTVSEPLLEKDFLAGVTQELIKTLEDNSEKWAVTPDAGDGVVKPSSRADPAQTSDTLALNNQMVTQNRTPHSVCHQKPQAKSGSWDLQTYSADQRTTGNWESHRKSQDMKKRKYDPS

SEQ ID NO: 1338 - DNA, 3018 bp, Homo sapiens
cggcaaaaaggagggaatccagtctaggatcctcacaccagctacttgcaagggagaaggaaaaggccagtaaggcctgggccaggagagtcccgacaggagtgtcaggtttcaatctcagcaccagccactcagagcagggcacgatgttgggggcccgcctcaggctctgggtctgtgccttgtgcagcgtctgcagcatgagcgtcctcagagcctatcccaatgcctccccactgctcggctccagctggggtggcctgatccacctgtacacagccacagccaggaacagctaccacctgcagatccacaagaatggccatgtggatggcgcaccccatcagaccatctacagtgccctgatgatcagatcagaggatgctggctttgtggtgattacaggtgtgatgagcagaagatacctctgcatggatttcagaggcaacatttttggatcacactatttcgacccggagaactgcaggttccaacaccagacgctggaaaacgggtacgacgtctaccactctcctcagtatcacttcctggtcagtctgggccgggcgaagagagccttcctgccaggcatgaacccacccccgtactcccagttcctgtcccggaggaacgagatccccctaattcacttcaacacccccataccacggcggcacacccggagcgccgaggacgactcggagcgggaccccctgaacgtgctgaagccccgggcccggatgaccccggccccggcctcctgttcacaggagctcccgagcgccgaggacaacagcccgatggccagtgacccattaggggtggtcaggggcggtcgagtgaacacgcacgctgggggaacgggcccggaaggctgccgccccttcgccaagttcatctagggtcgctggaagggcaccctctttaacccatccctcagcaaacgcagctcttcccaaggaccaggtcccttgacgttccgaggatgggaaaggtgacaggggcatgtatggaatttgctgcttctctggggtcccttccacaggaggtcctgtgagaaccaacctttgaggcccaagtcatggggtttcaccgccttcctcactccatatagaacacctttcccaataggaaaccccaacaggtaaactagaaatttccccttcatgaaggtagagagaaggggtctctcccaacatatttctcttccttgtgcctctcctctttatcacttttaagcataaaaaaaaaaaaaaaaaaaaaaaaaaaaaaaagcagtgggttcctgagctcaagactttgaaggtgtagggaagaggaaatcggagatcccagaagcttctccactgccctatgcatttatgttagatgccccgatcccactggcatttgagtgtgcaaaccttgacattaacagctgaatggggcaagttgatgaaaacactactttcaagccttcgttcttccttgagcatctctggggaagagctgtcaaaagactggtggtaggctggtgaaaacttgacagctagacttgatgcttgctgaaatgaggcaggaatcataatagaaaactcagcctccctacagggtgagcaccttctgtctcgctgtctccctctgtgcagccacagccagagggcccagaatggccccactctgttcccaagcagttcatgatacagcctcaccttttggccccatctctggtttttgaaaatttggtctaaggaataaatagcttttacactggctcacgaaaatctgccctgctagaatttgcttttcaaaatggaaataaattccaactctcctaagaggcatttaattaaggctctacttccaggttgagtaggaatccattctgaacaaactacaaaaatgtgactgggaagggggctttgagagactgggactgctctgggttaggttttctgtggactgaaaaatcgtgtccttttctctaaatgaagtggcatcaaggactcagggggaaagaaatcaggggacatgttatagaagttatgaaaagacaaccacatggtcaggctcttgtctgtggtctctagggctctgcagcagcagtggctcttcgattagttaaaactctcctaggctgacacatctgggtctcaatccccttggaaattcttggtgcattaaatgaagccttaccccattactgcggttcttcctgtaagggggctccattttcctccctctctttaaatgaccacctaaaggacagtatattaacaagcaaagtcgattcaacaacagcttcttcccagtcacttttttttttctcactgccatcacatactaaccttatactttgatctattctttttggttatgagagaaatgttgggcaactgtttttacctgatggttttaagctgaacttgaaggactggttcctattctgaaacagtaaaactatgtataatagtatatagccatgcatggcaaatattttaatatttctgttttcatttcctgttggaaatattatcctgcataatagctattggaggctcctcagtgaaagatcccaaaaggattttggtggaaaactagttgtaatctcacaaactcaacactaccatcaggggttttctttatggcaaagccaaaatagctcctacaatttcttatatccctcgtcatgtggcagtatttatttatttatttggaagtttgcctatccttctatatttatagatatttataaaaatgtaacccctttttcctttcttctgtttaaaataaaaataaaatttatctcagcttctgttagcttatcctctttgtagtactacttaaaagcatgtcggaatataagaataaaaaggattatgggaggggaacattagggaaatccagagaaggcaaaattgaaaaaaagattttagaattttaaaattttcaaagatttcttccattcataaggagactcaatgattttaattgatctagacagaattatttaagttttatcaatattggatttctggt

SEQ ID NO: 1339 - protein, 251 aa, Homo sapiens
MLGARLRLWVCALCSVCSMSVLRAYPNASPLLGSSWGGLIHLYTATARNSYHLQIHKNGHVDGAPHQTIYSALMIRSEDAGFVVITGVMSRRYLCMDFRGNIFGSHYFDPENCRFQHQTLENGYDVYHSPQYHFLVSLGRAKRAFLPGMNPPPYSQFLSRRNEIPLIHFNTPIPRRHTRSAEDDSERDPLNVLKPRARMTPAPASCSQELPSAEDNSPMASDPLGVVRGGRVNTHAGGTGPEGCRPFAKFI

SEQ ID NO: 1340 - DNA, 1334 bp, Homo sapiens
gtgggaaaagatggcggctgccgcacaatcccgggttgtccgggtcctgtcaatgtcacgttctgccattactgcaatagccacatctgtgtgtcacggcccaccctgtcgccagcttcatcatgccctcatgcctcatgggaaaggtggacgttcctcagtcagtgggattgtggccactgtgtttggagcaacaggattcctggggcgatatgttgtcaaccaccttggacgcatggggtcacaggtaatcataccctatcggtgtgataaatatgacatcatgcaccttcgtcccatgggtgacctgggccagcttctgtttctggaatgggacgcgagagataaagattctatccgacgagtagtacaacacagcaatgtggtcatcaatcttattggacgagactgggaaaccaaaaactttgattttgaggatgtttttgtgaagattccccaagcaattgctcaactgtccaaggaagctggagttgaaaaattcattcatgtttcacatctgaatgcgaatattaaaagctcttctagatatttgagaaataaggctgttggagagaaagtagtgagagatgcatttccggaagccattatcgtaaagccgtcggacatctttggaagagaggatagattccttaattcttttgcaagtatgcatcggtttggtcctataccccttggttccttgggctggaagacagttaaacaaccagtatatgtcgtagatgtatccaaaggaattgttaatgcagttaaggatcctgatgccaatgggaaatcctttgctttcgttggtcccagtcggtacctccttttccacctggtgaagtacatctttgctgtggctcacagattgttcctcccattccccttgccgctttttgcctatcgatgggtagcaagagtctttgaaataagcccatttgagccctggataacaagggataaagtggagcggatgcacatcacagacatgaaattgcctcacctgcctggcttagaagaccttggtattcaggcaacaccactggaactcaaggccattgaggtgctgcggcgtcatcgcacttaccgctggctgtctgctgaaattgaggatgtgaagccggccaagaccgtcaacatttagtgcctcctgagcagctcttggttttggcgtcttttgggtcggcccatgtggtttgagcacccagccaggcggtctctttagaggatcctgtacacagttccactattaaaacatttcaggttgaaaaaaaaaaaaaaaaaaaaaaaaaaaaaaaaaaaaaaaaaaaaaaaaaaaaaaaaaaaaaaaaaaa

SEQ ID NO: 1341 - protein, 377 aa, Homo sapiens
MAAAAQSRVVRVLSMSRSAITAIATSVCHGPPCRQLHHALMPHGKGGRSSVSGIVATVFGATGFLGRYVVNHLGRMGSQVIIPYRCDKYDIMHLRPMGDLGQLLFLEWDARDKDSIRRVVQHSNVVINLIGRDWETKNFDFEDVFVKIPQAIAQLSKEAGVEKFIHVSHLNANIKSSSRYLRNKAVGEKVVRDAFPEAIIVKPSDIFGREDRFLNSFASMHRFGPIPLGSLGWKTVKQPVYVVDVSKGIVNAVKDPDANGKSFAFVGPSRYLLFHLVKYIFAVAHRLFLPFPLPLFAYRWVARVFEISPFEPWITRDKVERMHITDMKLPHLPGLEDLGIQATPLELKAIEVLRRHRTYRWLSAEIEDVKPAKTVNI

SEQ ID NO: 1342 - DNA, 2135 bp, Homo sapiens
ttcccacaaaagctaggctggttctgattcttaacctgctccagcagtgacacactcagtcccacagggagtggacgacccccaggaagaagatgatgttttggaggaaactccccaaagccctcttcattgggctgactctggccattgctgtcaatctccttctggtattttctagcaaggggactttacaaaacctgtttacgggtggtctccacagggagcttcctttacatctgaataaacgctacggggcagtgataaagagactctcccacttggaggtggaattgcaggatctgaaagaaagtatgaaattagctctgaggcaacaagaaaatgtgaacagcacactgaagagggcgaaagatgaagtacgccctcttctaaaggcaatggaaaccaaggtgaatgagacaaagaagcacaaaacccaaatgaaactcttcccacactcacagcttttcaggcaatggggcgaggatctttctgaggcccagcagaaggcggcccaggacctcttccggaagtttggttacaacgcgtacctcagcaaccagctgcctctcaatcgcaccatccccgacacgcgagactacagatgtcttcggaagacatatccttcccaactcccatccctcagtgtcattctcatattcgtgaatgaagctctgtccattatacaacgggccatcaccagtatcatcaaccggacgccctctcgattgttgaaggaaatcatcttggtggatgatttcagctcaaatggagaactaaaggtacacttggatgagaagattaagctttacaaccagaagtatccaggactactgaaaataatacggcatcctgaaaggaaaggtcttgctcaagcccgcaacactggctgggaagctgccacagcagacgtggtcgccatcttggatgctcacattgaagtcaatgttgggtgggcagagccaatcttggctcggattcaggaggaccgcactgtgattgtgtctcctgtgtttgacaacattcgttttgacaccttcaaactggataagtatgaactggcagttgatgggtttaactgggaactctggtgccgctacgatgcactgccacaagcctggattgatctgcatgatgtcactgccccagtgaagagtccttcaatcatgggcatcctggctgctaacaggcacttcctgggagagatcgggtctctggatggtggaatgctcatctatggaggagagaacgtggagcttagcctgagggtgtggcagtgtggagggaaggtcgagattttgccctgttcccggattgcccacctagagagacaccacaagccctacgccttggatctcaccgctgccttgaagcgcaatgctctgcgagtggccgaaatctggatggatgagcacaaacacatggtctacttggcctggaacatacctctccagaactctggaatagattttggagacgtttcttccagaatggcactccgggaaaaactgaaatgtaaaacttttgactggtacctgaaaaatgtttatccactcttgaagccactccacaccatcgtgggctatggaagaatgaaaaacctattggatgaaaatgtctgcttggatcagggacccgttccaggcaacacccccatcatgtattactgccatgaattcagctcacagaatgtctactatcacctaactggggagctctatgtgggacaactgattgcagaggccagtgctagtgatcgctgcctgacagaccctggcaaggcggagaagcccaccttagaaccatgctccaaggcagctaagaatagactgcatatatattgggattttaaaccgggaggagctgtcataaacagagataccaagcggtgtctggagatgaagaaggatcttttgggtagccacgtgcttgtgctccagacctgtagcacgcaagtgtgggaaatccagcacactgtcagagactggggtcagaccaacagccagtgatcctcagatggtgctggatctgggtcatcaattcttgcaagtggaatggcttctactcctaacactcccagcttctttctcaatgagaaagaaagcatgtgtatgtctgtttatggcgacttcaggtgg

SEQ ID NO: 1343 - protein, 637 aa, Homo sapiens
MMFWRKLPKALFIGLTLAIAVNLLLVFSSKGTLQNLFTGGLHRELPLHLNKRYGAVIKRLSHLEVELQDLKESMKLALRQQENVNSTLKRAKDEVRPLLKAMETKVNETKKHKTQMKLFPHSQLFRQWGEDLSEAQQKAAQDLFRKFGYNAYLSNQLPLNRTIPDTRDYRCLRKTYPSQLPSLSVILIFVNEALSIIQRAITSIINRTPSRLLKEIILVDDFSSNGELKVHLDEKIKLYNQKYPGLLKIIRHPERKGLAQARNTGWEAATADVVAILDAHIEVNVGWAEPILARIQEDRTVIVSPVFDNIRFDTFKLDKYELAVDGFNWELWCRYDALPQAWIDLHDVTAPVKSPSIMGILAANRHFLGEIGSLDGGMLIYGGENVELSLRVWQCGGKVEILPCSRIAHLERHHKPYALDLTAALKRNALRVAEIWMDEHKHMVYLAWNIPLQNSGIDFGDVSSRMALREKLKCKTFDWYLKNVYPLLKPLHTIVGYGRMKNLLDENVCLDQGPVPGNTPIMYYCHEFSSQNVYYHLTGELYVGQLIAEASASDRCLTDPGKAEKPTLEPCSKAAKNRLHIYWDFKPGGAVINRDTKRCLEMKKDLLGSHVLVLQTCSTQVWEIQHTVRDWGQTNSQ

SEQ ID NO: 1344 - DNA, 3103 bp, Homo sapiens
ccaggcctagggtgtggaggagccttgccatcgggcttcctgtctctcttcatttaagcacgactctgcagaaggaacaaagcaccctccccactgggctcctggttgcagagctccaagtcctcacacagatacgcctgtttgagaagcagcgggcaagaaagacgcaagcccagaggccctgccatttctgtgggctcaggtccctactggctcaggcccctgcctccctcggcaaggccacaatgaaccggggagtcccttttaggcacttgcttctggtgctgcaactggcgctcctcccagcagccactcagggaaagaaagtggtgctgggcaaaaaaggggatacagtggaactgacctgtacagcttcccagaagaagagcatacaattccactggaaaaactccaaccagataaagattctgggaaatcagggctccttcttaactaaaggtccatccaagctgaatgatcgcgctgactcaagaagaagcctttgggaccaaggaaactttcccctgatcatcaagaatcttaagatagaagactcagatacttacatctgtgaagtggaggaccagaaggaggaggtgcaattgctagtgttcggattgactgccaactctgacacccacctgcttcaggggcagagcctgaccctgaccttggagagcccccctggtagtagcccctcagtgcaatgtaggagtccaaggggtaaaaacatacagggggggaagaccctctccgtgtctcagctggagctccaggatagtggcacctggacatgcactgtcttgcagaaccagaagaaggtggagttcaaaatagacatcgtggtgctagctttccagaaggcctccagcatagtctataagaaagagggggaacaggtggagttctccttcccactcgcctttacagttgaaaagctgacgggcagtggcgagctgtggtggcaggcggagagggcttcctcctccaagtcttggatcacctttgacctgaagaacaaggaagtgtctgtaaaacgggttacccaggaccctaagctccagatgggcaagaagctcccgctccacctcaccctgccccaggccttgcctcagtatgctggctctggaaacctcaccctggcccttgaagcgaaaacaggaaagttgcatcaggaagtgaacctggtggtgatgagagccactcagctccagaaaaatttgacctgtgaggtgtggggacccacctcccctaagctgatgctgagtttgaaactggagaacaaggaggcaaaggtctcgaagcgggagaaggcggtgtgggtgctgaaccctgaggcggggatgtggcagtgtctgctgagtgactcgggacaggtcctgctggaatccaacatcaaggttctgcccacatggtccaccccggtgcagccaatggccctgattgtgctggggggcgtcgccggcctcctgcttttcattgggctaggcatcttcttctgtgtcaggtgccggcaccgaaggcgccaagcagagcggatgtctcagatcaagagactcctcagtgagaagaagacctgccagtgtcctcaccggtttcagaagacatgtagccccatttgaggcacgaggccaggcagatcccacttgcagcctccccaggtgtctgccccgcgtttcctgcctgcggaccagatgaatgtagcagatccccagcctctggcctcctgttcgcctcctctacaatttgccattgtttctcctgggttaggccccggcttcactggttgagtgttgctctctagtttccagaggcttaatcacaccgtcctccacgccatttccttttccttcaagcctagcccttctctcattatttctctctgaccctctccccactgctcatttggatcccaggggagtgttcagggccagccctggctggcatggagggtgaggctgggtgtctggaagcatggagcatgggactgttcttttacaagacaggaccctgggaccacagagggcaggaacttgcacaaaatcacacagccaagccagtcaaggatggatgcagatccagaggtttctggcagccagtacctcctgccccatgctgcccgcttctcaccctatgtgggtgggaccacagactcacatcctgaccttgcacaaacagcccctctggacacagccccatgtacacggcctcaagggatgtctcacatcctctgtctatttgagacttagaaaaatcctacaaggctggcagtgacagaactaagatgatcatctccagtttatagaccagaaccagagctcagagaggctagatgattgattaccaagtgccggactagcaagtgctggagtcgggactaacccaggtcccttgtcccaagttccactgctgcctcttgaatgcagggacaaatgccacacggctctcaccagtggctagtggtgggtactcaatgtgtacttttgggttcacagaagcacagcacccatgggaagggtccatctcagagaatttacgagcagggatgaaggcctccctgtctaaaatccctccttcatcccccgctggtggcagaatctgttaccagaggacaaagcctttggctcttctaatcagagcgcaagctgggagcacaggcactgcaggagagaatgcccagtgaccagtcactgaccctgtgcagaacctcctggaagcgagctttgctgggagagggggtagctagcctgagagggaaccctctaagggacctcaaaggtgattgtgccaggctctgcgcctgccccacaccctcccttaccctcctccagaccattcaggacacagggaaatcagggttacaaatcttcttgatccacttctctcaggatcccctctcttcctacccttcctcaccacttccctcagtcccaactccttttccctatttccttctcctcctgtctttaaagcctgcctcttccaggaagacccccctattgctgctggggctccccatttgcttactttgcatttgtgcccactctccacccctgctcccctgagctgaaataaaaatacaataaacttactataaagatgc

SEQ ID NO: 1345 - protein, 458 aa, Homo sapiens
MNRGVPFRHLLLVLQLALLPAATQGKKVVLGKKGDTVELTCTASQKKSIQFHWKNSNQIKILGNQGSFLTKGPSKLNDRADSRRSLWDQGNFPLIIKNLKIEDSDTYICEVEDQKEEVQLLVFGLTANSDTHLLQGQSLTLTLESPPGSSPSVQCRSPRGKNIQGGKTLSVSQLELQDSGTWTCTVLQNQKKVEFKIDIVVLAFQKASSIVYKKEGEQVEFSFPLAFTVEKLTGSGELWWQAERASSSKSWITFDLKNKEVSVKRVTQDPKLQMGKKLPLHLTLPQALPQYAGSGNLTLALEAKTGKLHQEVNLVVMRATQLQKNLTCEVWGPTSPKLMLSLKLENKEAKVSKREKAVWVLNPEAGMWQCLLSDSGQVLLESNIKVLPTWSTPVQPMALIVLGGVAGLLLFIGLGIFFCVRCRHRRRQAERMSQIKRLLSEKKTCQCPHRFQKTCSPI

SEQ ID NO: 1346 - DNA, 1514 bp, Homo sapiens
gagggaggagggcgggcgagctggagccggcaggcagcgggagcccgagagagccgcgtcgggagtgcggtctccatggcagtgctgggcgcagccggagagagcctgtccagggggctgagccccacccccaaatccctggggcatccagaagattcctgactggtcaagaaccagaggcaaaagagacctggaagtcccagcatggggaccagaaccccccagccagcctcatagttgggaaagtagccagcttgcctgccccatcaattgcagggatgcttaaggaaggccccgcccagtatgaaagctgaggattgcctctgctgaccctcagtctcctcccctgccctctacatctgccctcagctgggtccatcatgcaatgctgagcactggggtggtgagcttcttctccctcaagtcggactcggcgcccccctggatggtgctggctgtgctgtggtgctccatggcacagacgctgctgctgccctccttcatctggtcctgcgagcgctaccgcgccgacgtgcgcacagtgtgggagcaatgcgtggccatcatgtctgaggaggatggagatgacgatgggggctgtgacgactatgcagagggccgagtttgcaaagttcgctttgatgctaacggagccacaggaccagggagccgggaccccgcccaggtgaagctgctgcctggaaggcacatgctcttccctcctcttgagagagtccactacttacaggtccccctatcccggcgtctgtcccatgatgagacaaacatcttctctacccctcgggaaccaggctccttcctgcacaagtggtcatcctctgatgacatccgggtcctcccagcccagagccgggccctcgggggtcctcctgagtacctgggacaaagacacaggttggaggacgaggaggacgaggaagaggctgaaggtggggggctggccagccttcgccaattcttggagagtggggttctggggtcaggtgggggacccccacggggtcctggcttcttccgggaggagatcaccaccttcatcgatgagacacctctgccttctccgactgcctcaccagggcactctcctcgtcggccccggccactgggcctctcaccccgccgactctcccttgggtcccctgagagcagagccgttggacttcctttgggactaagcgcagggagacgctgctccctgacggggggtgaagaaagtgcaagggcttggggaggatcctggggcccaggcaaccccatctttccccagctgaccctgtgagcccaagcaggcctgctgaactcagaggagaaagcctgagtgagtaacacctcattctggccgagagtagggcagctgcctccagactctggggagacgggcgctagatttggggctcagaaggccctgctctctcccatccaagtgaccagatgccctactcagcttccatcacccctagcaatatgtattaaagtctgaagtgttgccatgg

SEQ ID NO: 1347 - protein, 304 aa, Homo sapiens
MLSTGVVSFFSLKSDSAPPWMVLAVLWCSMAQTLLLPSFIWSCERYRADVRTVWEQCVAIMSEEDGDDDGGCDDYAEGRVCKVRFDANGATGPGSRDPAQVKLLPGRHMLFPPLERVHYLQVPLSRRLSHDETNIFSTPREPGSFLHKWSSSDDIRVLPAQSRALGGPPEYLGQRHRLEDEEDEEEAEGGGLASLRQFLESGVLGSGGGPPRGPGFFREEITTFIDETPLPSPTASPGHSPRRPRPLGLSPRRLSLGSPESRAVGLPLGLSAGRRCSLTGGEESARAWGGSWGPGNPIFPQLTL

SEQ ID NO: 1348 - DNA, 2516 bp, Homo sapiens
gagggaggagggcgggcgagctggagccggcaggcagcgggagcccgagagagccgcgtcgggagtgcggtctccatggcagtgctgggcgcagccggagagagcctgtccagggggctgagccccacccccaaatccctggggcatccagaagattcctgactggtcaagaaccagaggcaaaagagacctggaagtcccagcatggggaccagaaccccccagccagcctcatagttgggaaagtagccagcttgcctgccccatcaattgcagggatgcttaaggaaggccccgcccagtatgaaagctgaggattgcctctgctgaccctcagtctcctcccctgccctctacatctgccctcagctgggtccatcatgcaatgctgagcactggggtgagcctgggggcagcctgcctgctgacagggcgaggattgtggggatcatgggagtgtttgtgagtggggctcctgggtgagacctagcccccacccccacagagctcaagggggtggggggctgaggataggatggctcggggcggggcgggggcagaggaggcctccctgcgctccaacgcattgtcctggctggcctgtgggctcctggcgctgctggccaatgcctggatcatcctcagcatctcggccaagcagcagaagcacaagccactggagctgctgctctgcttcctagcgggcacacacatactcatggcagctgtgcccctcaccacctttgccgtggtgcagctgcgtcgtcaggcttcctccgactatgactggaacgagagtatctgcaaggtcttcgtgtccacctactacaccctggcgctggccacctgcttcacggtcgcctccctctcctaccatcgcatgtggatggtgcgctggcccgtcaactaccgcctcagcaacgccaagaagcaggcactgcatgccgtcatgggcatctggatggtcagcttcatcctctccacactgccctccattggctggcacaacaacggcgagcgctactatgcccgcggctgccagttcatagtctccaagatcggcctcggctttggcgtttgcttcagcctcttgctacttgggggaattgtcatgggtctggtctgtgtggccatcaccttctaccagacactgtgggcccggccccggagggctcggcaggcccggagagtggggggtggtggggggaccaaagcgggtgggccaggggccttgggtacccggccagcttttgaggtaccagccattgtggtggaggatgcccgagggaagcggcggtcctcgctggatggctcggagtctgccaagacatccctgcaggtcaccaacttggtcagcgccatcgtctttctctatgactcactcacaggggtgcccatcttggtggtgagcttcttctccctcaagtcggactcggcgcccccctggatggtgctggctgtgctgtggtgctccatggcacagacgctgctgctgccctccttcatctggtcctgcgagcgctaccgcgccgacgtgcgcacagtgtgggagcaatgcgtggccatcatgtctgaggaggatggagatgacgatgggggctgtgacgactatgcagagggccgagtttgcaaagttcgctttgatgctaacggagccacaggaccagggagccgggaccccgcccaggtgaagctgctgcctggaaggcacatgctcttccctcctcttgagagagtccactacttacaggtccccctatcccggcgtctgtcccatgatgagacaaacatcttctctacccctcgggaaccaggctccttcctgcacaagtggtcatcctctgatgacatccgggtcctcccagcccagagccgggccctcgggggtcctcctgagtacctgggacaaagacacaggttggaggacgaggaggacgaggaagaggctgaaggtggggggctggccagccttcgccaattcttggagagtggggttctggggtcaggtgggggacccccacggggtcctggcttcttccgggaggagatcaccaccttcatcgatgagacacctctgccttctccgactgcctcaccagggcactctcctcgtcggccccggccactgggcctctcaccccgccgactctcccttgggtcccctgagagcagagccgttggacttcctttgggactaagcgcagggagacgctgctccctgacggggggtgaagaaagtgcaagggcttggggaggatcctggggcccaggcaaccccatctttccccagctgaccctgtgagcccaagcaggcctgctgaactcagaggagaaagcctgagtgagtaacacctcattctggccgagagtagggcagctgcctccagactctggggagacgggcgctagatttggggctcagaaggccctgctctctcccatccaagtgaccagatgccctactcagcttccatcacccctagcaatatgtattaaagtctgaagtgttgccatgg

SEQ ID NO: 1349 - protein, 588 aa, Homo sapiens
MARGGAGAEEASLRSNALSWLACGLLALLANAWIILSISAKQQKHKPLELLLCFLAGTHILMAAVPLTTFAVVQLRRQASSDYDWNESICKVFVSTYYTLALATCFTVASLSYHRMWMVRWPVNYRLSNAKKQALHAVMGIWMVSFILSTLPSIGWHNNGERYYARGCQFIVSKIGLGFGVCFSLLLLGGIVMGLVCVAITFYQTLWARPRRARQARRVGGGGGTKAGGPGALGTRPAFEVPAIVVEDARGKRRSSLDGSESAKTSLQVTNLVSAIVFLYDSLTGVPILVVSFFSLKSDSAPPWMVLAVLWCSMAQTLLLPSFIWSCERYRADVRTVWEQCVAIMSEEDGDDDGGCDDYAEGRVCKVRFDANGATGPGSRDPAQVKLLPGRHMLFPPLERVHYLQVPLSRRLSHDETNIFSTPREPGSFLHKWSSSDDIRVLPAQSRALGGPPEYLGQRHRLEDEEDEEEAEGGGLASLRQFLESGVLGSGGGPPRGPGFFREEITTFIDETPLPSPTASPGHSPRRPRPLGLSPRRLSLGSPESRAVGLPLGLSAGRRCSLTGGEESARAWGGSWGPGNPIFPQLTL

SEQ ID NO: 1350 - DNA, 2656 bp, Homo sapiens
gcatttcccctcggctgccggcggctccgacatcatgctccggctcctccggccgctgctgctactgctgctgctgcctcccccggggtcccctgagccccccggcctgacccagctgtccccgggggcgcccccgcaggcccccgacttgctctacgctgacgggctgcgcgcctacgcggccggggcttgggcgccggccgtggcgctgctgcgggaggcgctgcggagccaggcggcgctgggccgggtgcggctggattgcggggcgagctgcgcggccgatccgggcgccgcgctccccgccgtgcttctcggggccccggagcccgactccgggccgggacccacgcaggggtcctgggagcgacagcttctccgtgcagcgctccgccgcgcagactgcctgacccagtgcgcagcacggaggctgggccccgggggcgcggcgcggcttcgcgtggggagcgcgctccgggacgccttccgccgtcgggagccctacaactacctgcagagggcctattaccagttgaagaagctggatctggcagctgcggcagcacacaccttctttgtagcaaaccccatgcacctgcagatgcgggaggacatggctaagtacagacgaatgtcgggagttcggccccagagcttccgggacctggagacgcccccacactgggcagcctatgacactggcctggagctactggggcgccaggaggcaggactggcactgcccaggctagaggaggctcttcaggggagcctggcccagatggagagctgccgtgctgactgtgaggggcctgaggagcagcagggggctgaagaagaggaggatggggctgcgagccaggggggcctctatgaggccattgcaggacactggattcaggtcctgcagtgccggcaacgctgtgtgggggaaacagccacacgccctggtcgcagcttccctgtcccagacttccttcccaaccagctgaggcggctacatgaggcccatgctcaggtgggcaatctgtcccaggctatagaaaatgtcctgagtgtcctgctcttctacccggaggatgaggctgccaagagggctctgaaccagtaccaggcccagctgggagagccgagacctggcctcggacccagagaggacatccagcgcttcatcctccgatccctgggggagaagaggcagctctactatgccatggagcacctggggaccagcttcaaggatcctgacccctggacccctgcagctctcatccctgaggcacttagagaaaagctcagagaggatcaagagaagaggccttgggaccatgagcccgtgaagccaaagcccttgacctactggaaggatgtccttctcctggagggtgtgaccttgacccaggattccaggcagctgaatgggtcggagcgggcggtgttggatgggctgctcaccccagccgagtgtggggtgctgctgcagctggctaaggatgcagctggggctggagccaggtctggctatcgtggtcgccgctcccctcacaccccccatgaacgcttcgaggggctcacggtgcttaaggctgcgcagctggcccgggctgggacagtgggcagtcagggtgctaagctgcttctggaggtgagcgagcgggtgcggaccttgacccaggcctacttctccccggaacggcccctgcatctgtccttcacccacctggtgtgccgcagcgccatagaaggagagcaagagcagcgcatggacctgagtcacccagtgcacgcagacaactgcgtcctggaccctgacacgggagagtgctggcgggagcccccagcctacacctatcgggactacagcggactcctctacctcaacgatgacttccagggtggggacctgttcttcacggagcccaacgccctcactgtcacggctcgggtgcgtcctcgctgtgggcgccttgtggccttcagctccggtgtcgagaatccccatggggtgtgggccgtgactcggggacggcgctgtgccctggcactgtggcacacgtgggcacctgagcacagggagcaggagtggatagaagccaaagaactgctgcaggagtcacaggaggaggaggaagaggaagaggaagaaatgcccagcaaagacccttccccagagccccctagccgcaggcaccagagggtccaagacaagactggaagggcacctcgggttcgggaggagctgtgagtggctgagccagctccttgaggatgtggccacttgacttgtggaaggccatcttgatgccaggacacacaggaagcccctgtgtgacatcaggagcagaacagcaagctctctgtccctgcacccccaccatcttggggacctacaagggcctggactcagaggacagtgcacaggctagcctggagctcaccaggcctggggagctgggacggggccccgctgccggacctgcagccctggacagatggggaacactgtgcctccctgaacagaaatggcaggggaggaggctgatgctttaaatgaagaggatggtggggttgggaggtataaccctgctcctctctcccagtctgtgcaataaaggtcgtgaagatctctcagccagggaaaaaaaaaaaaaaaaaa

SEQ ID NO: 1351 - protein, 736 aa, Homo sapiens
MLRLLRPLLLLLLLPPPGSPEPPGLTQLSPGAPPQAPDLLYADGLRAYAAGAWAPAVALLREALRSQAALGRVRLDCGASCAADPGAALPAVLLGAPEPDSGPGPTQGSWERQLLRAALRRADCLTQCAARRLGPGGAARLRVGSALRDAFRRREPYNYLQRAYYQLKKLDLAAAAAHTFFVANPMHLQMREDMAKYRRMSGVRPQSFRDLETPPHWAAYDTGLELLGRQEAGLALPRLEEALQGSLAQMESCRADCEGPEEQQGAEEEEDGAASQGGLYEAIAGHWIQVLQCRQRCVGETATRPGRSFPVPDFLPNQLRRLHEAHAQVGNLSQAIENVLSVLLFYPEDEAAKRALNQYQAQLGEPRPGLGPREDIQRFILRSLGEKRQLYYAMEHLGTSFKDPDPWTPAALIPEALREKLREDQEKRPWDHEPVKPKPLTYWKDVLLLEGVTLTQDSRQLNGSERAVLDGLLTPAECGVLLQLAKDAAGAGARSGYRGRRSPHTPHERFEGLTVLKAAQLARAGTVGSQGAKLLLEVSERVRTLTQAYFSPERPLHLSFTHLVCRSAIEGEQEQRMDLSHPVHADNCVLDPDTGECWREPPAYTYRDYSGLLYLNDDFQGGDLFFTEPNALTVTARVRPRCGRLVAFSSGVENPHGVWAVTRGRRCALALWHTWAPEHREQEWIEAKELLQESQEEEEEEEEEMPSKDPSPEPPSRRHQRVQDKTGRAPRVREEL

SEQ ID NO: 1352 - DNA, 1923 bp, Homo sapiens
ccacaataggggcagacctgtccatccttctctgtgggtcccctgtacctttctcccccaacaggatcagacccagaggcagctggttggggtttgtcgagaagaaggattatccagatcagtcctttctaatctcagctcctgcctgtaccctcccatactcaccaaaccctcttccccaccaccctgagctgaggagcacagtttgaggcccccccaaccccccgccggtcggggccaggccaggccaggccagctcctctggcagcagagcctgggcaggtgacgggcgggcgcgggcgtcgcagctgagggagtaaggaggctcccaggaaccggagctggaaacccggccgaggtccagccagagcccaagagccagagtgacccctcgacctgtcagccatgggggagatggagcaactgcgtcaggaagcggagcagctcaagaagcagattgcagatgccaggaaagcctgtgctgacgttactctggcagagctggtgtctggcctagaggtggtgggacgagtccagatgcggacgcggcggacgttaaggggacacctggccaagatttacgccatgcactgggccactgattctaagctgctggtaagtgcctcgcaagatgggaagctgatcgtgtgggacagctacaccaccaacaaggtgcacgccatcccactgcgctcctcctgggtcatgacctgtgcctatgccccatcagggaactttgtggcatgtggggggctggacaacatgtgttccatctacaacctcaaatcccgtgagggcaatgtcaaggtcagccgggagctttctgctcacacaggttatctctcctgctgccgcttcctggatgacaacaatattgtgaccagctcgggggacaccacgtgtgccttgtgggacattgagactgggcagcagaagactgtatttgtgggacacacgggtgactgcatgagcctggctgtgtctcctgacttcaatctcttcatttcgggggcctgtgatgccagtgccaagctctgggatgtgcgagaggggacctgccgtcagactttcactggccacgagtcggacatcaacgccatctgtttcttccccaatggagaggccatctgcacgggctcggatgacgcttcctgccgcttgtttgacctgcgggcagaccaggagctgatctgcttctcccacgagagcatcatctgcggcatcacgtccgtggccttctccctcagtggccgcctactattcgctggctacgacgacttcaactgcaatgtctgggactccatgaagtctgagcgtgtgggcatcctctctggccacgataacagggtgagctgcctgggagtcacagctgacgggatggctgtggccacaggttcctgggacagcttcctcaaaatctggaactgaggaggctggagaaagggaagtggaaggcagtgaacacactcagcagccccctgcccgaccccatctcattcaggtgttctcttctatattccgggtgccattcccactaagctttctcctttgagggcagtggggagcatgggactgtgcctttgggaggcagcatcagggacacaggggcaaagaactgccccatctcctcccatggccttccctccccacagtcctcacagcctctcccttaatgagcaaggacaacctgcccctccccagccctttgcaggcccagcagacttgagtctgaggccccaggccctaggattcctcccccagagccactacctttgtccaggcctgggtggtatagggcgtttggccctgtgactatggctctggcaccactagggtcctggccctcttcttattcatgctttctcctttttctacctttttttctctcctaagacacctgcaataaagtgtagcaccctggta

SEQ ID NO: 1353 - protein, 340 aa, Homo sapiens [sequence omitted]

SEQ ID NO: 1354 - DNA, 1047 bp, Homo sapiens
ctgtgagtgacacacgctgagtggggtgaagggaaatgctggtgaatttcattttgaggtgtgggttgctgttagtcactctgtctcttgccattgccaagcacaagcaatcttccttcaccaaaagttgttacccaaggggaacattgtcccaagctgttgacgctctctatatcaaagcagcatggctcaaagcaacgattccagaagaccgcataaaaaatatacgattattaaaaaagaaaacaaaaaagcagtttatgaaaaactgtcaatttcaagaacagcttctgtccttcttcatggaagacgtttttggtcaactgcaattgcaaggctgcaagaaaatacgctttgtggaggactttcatagccttaggcagaaattgagccactgtatttcctgtgcttcatcagctagagagatgaaatccattaccaggatgaaaagaatattttataggattggaaacaaaggaatctacaaagccatcagtgaactggatattcttctttcctggattaaaaaattattggaaagcagtcagtaaaccaaagccaagtacattgattttacagttattttgaaatacaataagaactgctagaaatatgtttataacagtctatttcttttaaaaactttttaacataatactgacggcatgttaggtgattcagaatagacaagaaggatttagtaaattaacgttttggatataagttgtcactaatttgcacattttctgtgttttcaaataatgtttccattctgaacatgttttgtcattcacaagtacattgtgtcaacttaatttaaagtatgtaacctgaattaactcgtgtaatatttgtgtgtggagtgggatgtggggggtggagggggaatgacagatttctggaatgcaatgtaatgttactgagacttaaatagatgttatgtatatgattgtctgtttaagtgtttgaaaattgttaattatgcccagtgtgaacttagtacttaacacattttgattttaattaaataaattgggtttccttctc

SEQ ID NO: 1355 - protein, 171 aa, Homo sapiens
MLVNFILRCGLLLVTLSLAIAKHKQSSFTKSCYPRGTLSQAVDALYIKAAWLKATIPEDRIKNIRLLKKKTKKQFMKNCQFQEQLLSFFMEDVFGQLQLQGCKKIRFVEDFHSLRQKLSHCISCASSAREMKSITRMKRIFYRIGNKGIYKAISELDILLSWIKKLLESSQ

SEQ ID NO: 1356 - DNA, 1147 bp, Homo sapiens
cgaccaggttctccttccccagtcaccagttgctcgagttagaattgtctgcaatggccgccctgcagaaatctgtgagctctttccttatggggaccctggccaccagctgcctccttctcttggccctcttggtacagggaggagcagctgcgcccatcagctcccactgcaggcttgacaagtccaacttccagcagccctatatcaccaaccgcaccttcatgctggctaaggaggctagcttggctgataacaacacagacgttcgtctcattggggagaaactgttccacggagtcagtatgagtgagcgctgctatctgatgaagcaggtgctgaacttcacccttgaagaagtgctgttccctcaatctgataggttccagccttatatgcaggaggtggtgcccttcctggccaggctcagcaacaggctaagcacatgtcatattgaaggtgatgacctgcatatccagaggaatgtgcaaaagctgaaggacacagtgaaaaagcttggagagagtggagagatcaaagcaattggagaactggatttgctgtttatgtctctgagaaatgcctgcatttgaccagagcaaagctgaaaaatgaataactaaccccctttccctgctagaaataacaattagatgccccaaagcgattttttttaaccaaaaggaagatgggaagccaaactccatcatgatgggtggattccaaatgaacccctgcgttagttacaaaggaaaccaatgccacttttgtttataagaccagaaggtagactttctaagcatagatatttattgataacatttcattgtaactggtgttctatacacagaaaacaatttattttttaaataattgtctttttccataaaaaagattactttccattcctttaggggaaaaaacccctaaatagcttcatgtttccataatcagtactttatatttataaatgtatttattattattataagactgcattttatttatatcattttattaatatggatttatttatagaaacatcattcgatattgctacttgagtgtaaggctaatattgatatttatgacaataattatagagctataacatgtttatttgacctcaataaacacttggatatcc

SEQ ID NO: 1357 - protein, 179 aa, Homo sapiens
MAALQKSVSSFLMGTLATSCLLLLALLVQGGAAAPISSHCRLDKSNFQQPYITNRTFMLAKEASLADNNTDVRLIGEKLFHGVSMSERCYLMKQVLNFTLEEVLFPQSDRFQPYMQEVVPFLARLSNRLSTCHIEGDDLHIQRNVQKLKDTVKKLGESGEIKAIGELDLLFMSLRNACI

SEQ ID NO: 1358 - DNA, 2936 bp, Homo sapiens
gctggggaacactgttatcgccccgccccctcggagctttttctccagttaactgtcggagtagcgggggctccggcgccgggcgacatgccggtgcgcttcaaggggctgagtgaataccagaggaacttcctgtggaaaaagtcttatttgtcagagtcttgtaattcctccgtggggcgaaagtacccatgggctggacttagatcagatcaattaggcatcacgaaagagccaagttttatttcaaaaagaagagtcccttaccatgacccacagatttcaaaatctctggagtggaatggagctatctcagagagcaatgtggttgcatcaccagaaccagaagccccggaaacaccaaaatcacaagaagcagaacaaaaggatgttattcaagaaagagttcactcactagaagcttccagggttcccaaaagaaccagatctcactctgcagactccagagctgaaggggcttcagatgtggaaaataatgagggtgtaacaaaccatacaccagttaatgaaaatgtggaactggaacattctaccaaggttctttcagaaaatgtagataatgggttggatagacttctgcgtaagaaagctggattgactgttgttccttcatataatgccttgagaaattctgaatatcaaaggcagtttgtttggaagacttctaaagaaactgctccagcttttgcagccaatcaggttttccacaataaaagccagtttgttccaccattcaaaggtaactcagtcatccatgaaactgaatacaaaagaaatttcaagggtttatctccagtgaaagaaccaaaattaagaaatgatttgagagaaaacagaaatcttgaaacagtgtctcctgaaaggaagagtaataaaatagacgatcgtttaaaattggaagcagagatggaattaaaagacttacaccagcctaaaaggaagcttactccttggaaacatcaaaggcttgggaaggtgaattccgaatatagagcaaaatttctgagcccagctcagtatttatataaagctggggcttggacacatgtaaagggaaacatgccaaatcaggttaaagaactccgagaaaaggctgagttttataggaagcgagttcaggggacgcatttttctcgggaccatctgaatcagattttatctgatagcaactgctgttgggatgtctcctcaaccacaagctcagaaggaaccgttagtagcaacatcagagcattagatcttgctggagatcctacaagccataagactttgcagaaatgtccttctacagaaccagaagaaaaaggaaatatcgtggaagaacagccccagaaaaataccacggagaaattgggtgtgtcagctcccaccatacccgttagaaggcggctggcttgggatacagagaacacaagtgaagacgtacagaaacagcccggggagaaagaggaggaggacgacaatgaagaggaaggggacaggaaaacgggcaagcaggcttttatgggagagcaagagaagttggatgtacatgagaaatctaaggcagataagatgaaagaagggtcagattcttctgtatcctcagaaaaaggaggccggcttcctactcccaagctgagagaacttggtggaatccagaggactcatcatgatctcactactccagctgttggtggtgctgttttagtgtctccatctaagatgaagcctccagccctagaacagaggaaaagaatgacctctcaggattgtttagaaacttcaaagaatgattttactaagaaagaaagtcgtgctgtatccctactgacttctccagctgctggtataaaaacagttgatcctctgcctttgcgggaagattctgaagacaatatccacaaatttgctgaggcaactcttccagtttcaaaaattccaaaatacccaacaaatccccctggacagttgccttctccaccacatgttccatcctactggcatccctctcgacgaattcagggctctcttagagatccagagtttcagcacaatgtgggaaaagcaaggatgaacaatttgcagttacctcaacatgaagcctttaatgatgaagatgaggacagattgtctgagatttctgctcgctctgcagcttctagtctccgggcttttcaaactctggcacgagctaagaaaaggaaggagaatttctggggtaaaacataaacctagctgagttgcctttatctaaggaaacattggcataatttttctttattgcttactgtgttaaaattttttgagtgaagtttttcctaacgttttctactttgaaatatttaatttccaatagaacagtttacttggaaattgttaacataggcttatacaaatttaacttttaaagaattctttttacatctatcccagagtacaaagacctagattattgaattcttcacatgtaactttcgtaataggtgtcatggatagattttcacctatccagagagtattctaaaaaaataaacaaagtgaagtaaaagttaagatcccagtgtgaagtatatattcccctaagatttgatatatgtatctttataattgatgatgttgtaaaatgaatttgttgttcctttaacctttgctgtagtgtttctttttattttagttccttctatacatgtttgcagtgttaagataattgtactttgaaaacaccagctgtatatatttttcttatttatgtaacaaagtttgctgaaagatatgtatatttttgatctttgagtgtattctatttgtgtaaggactttggcttacatttgaataatgtctagattttgaaaaattacctgtataatggagaattaaaactttgtagacattttgaaataaaaatggatcaagtgcggaaaaaaaaaaaaaaa

SEQ ID NO: 1359 - protein, 714 aa, Homo sapiens
MPVRFKGLSEYQRNFLWKKSYLSESCNSSVGRKYPWAGLRSDQLGITKEPSFISKRRVPYHDPQISKSLEWNGAISESNVVASPEPEAPETPKSQEAEQKDVIQERVHSLEASRVPKRTRSHSADSRAEGASDVENNEGVTNHTPVNENVELEHSTKVLSENVDNGLDRLLRKKAGLTVVPSYNALRNSEYQRQFVWKTSKETAPAFAANQVFHNKSQFVPPFKGNSVIHETEYKRNFKGLSPVKEPKLRNDLRENRNLETVSPERKSNKIDDRLKLEAEMELKDLHQPKRKLTPWKHQRLGKVNSEYRAKFLSPAQYLYKAGAWTHVKGNMPNQVKELREKAEFYRKRVQGTHFSRDHLNQILSDSNCCWDVSSTTSSEGTVSSNIRALDLAGDPTSHKTLQKCPSTEPEEKGNIVEEQPQKNTTEKLGVSAPTIPVRRRLAWDTENTSEDVQKQPGEKEEEDDNEEEGDRKTGKQAFMGEQEKLDVHEKSKADKMKEGSDSSVSSEKGGRLPTPKLRELGGIQRTHHDLTTPAVGGAVLVSPSKMKPPALEQRKRMTSQDCLETSKNDFTKKESRAVSLLTSPAAGIKTVDPLPLREDSEDNIHKFAEATLPVSKIPKYPTNPPGQLPSPPHVPSYWHPSRRIQGSLRDPEFQHNVGKARMNNLQLPQHEAFNDEDEDRLSEISARSAASSLRAFQTLARAKKRKENFWGKT

SEQ ID NO: 1360 - DNA, 2092 bp, Homo sapiens
ctcggagctttttctccagttaactgtcggagtagcgggggctccggcgccgggcgacatgccggtgcgcttcaaggggctgagtgaataccagaggaacttcctgtggaaaaagtcttatttgtccgagtcttgtaattcctccgtggggcgaaagtacccatgggctggacttagatcagatcaattaggcatcacgaaagagccaagttttatttcaaaaagaagagtcccttaccatgacccacagatttcaaaatctctggagtggaatggagctatctcagagagcaatgtggttgcatcaccagaaccagaagccccggaaacaccaaaatcacaagaagcagaacaaaaggatgttactcaagaaagagttcactcactagaagcttccagggttcccaaaagaaccagatctcactctgcagactccagagctgaaggggcttcagatgtggaaaataatgagggtgtaacaaaccatacaccagttaatgaaaatgtggaactggaacattctaccaaggttctttcagaaaatgtagataatggggtaggcatattcactgcatttcttttcaaaagcatagaattcttcattggtttcattgtcatttctgtaatattacattttgtgtttcagaattttccattgttgttttcttgtctaatgtctataagaatagttgataacaggctgttgactttagttattgtgaattagttctattctgactactcgctattttgtagtagttgtactatgataatctgtttattggatggacctcctgcgtctggattttattcatcatatattagcacctgagtcctaagggagagatcaagttgagacagagaagggaagtaggcccttacttctggcagggtgctgagctgacttctacctagccccttttcagtttcttatcgtgtacaagaagacaaacagaaattcaattgatgaaatgcaaaaggaaggagagctctggctgtctctcagagatcttgcatttctgctctcttatgtcacagctggcctgcagcaggtccctgtgagcacataagcagaggctgcaggaacttgtgtggggatctcaatgctttccacatttctttctccattctgttccactgctcttctctggttcatgtccaccactgactgggaccctgaagaggcatttcagagtgttggagaagaatctgtagcttgttgaaaaagctgggggtgaaagggaacaaggaaggtgatgtgtgagtctggcaggcaggagaaggggtgttcatagaagcagtgtgcaggtgaggcaaagtgctgggactttttggtaatagatttaattatgaatgattagtaggaaaggactgagagtattatatttttcctgggatgcctaatagtcctttgatagaaaggaattttaaatagtttgacacttgaaaaaagatactatttataagttgaagaaagtttgctgtaccacaatgcgcatgtagttaacaattttgcactgtagatttaacattttgttaagaagatagatttcatgttatgcattttttaccacaatttttaaaaagtttgaatagaaatttttaatgtctttgagtggattttgttttttgaacagttggatagacttctgcgtaagaaagctggattgactgttgttccttcatataatgccttgagaaattctgaatatcaaaggcagtttgtttggaagacttctaaagaaactgctccagcttttgcagccaatcaggtagcttaatggatgtaatacatttctgagtaccattatcttatctagtaatgtagatttacatagaattaagagttgaaagaaattaagtacttaagtagcctggaggtaggttctagaaaaccaaaatgagagttttgctaaaatcatcctattacttatgatttatggtagtaatattatactgtcctaggcttctgatgatcattgttgccagatgcagcacatatactaaatatgagacagggtaatgaaaacttggggaactggtaagtttttgcatgctacaagatttttttacttattaaaaaattattaaa

SEQ ID NO: 1361 - protein, 222 aa, Homo sapiens
MPVRFKGLSEYQRNFLWKKSYLSESCNSSVGRKYPWAGLRSDQLGITKEPSFISKRRVPYHDPQISKSLEWNGAISESNVVASPEPEAPETPKSQEAEQKDVTQERVHSLEASRVPKRTRSHSADSRAEGASDVENNEGVTNHTPVNENVELEHSTKVLSENVDNGVGIFTAFLFKSIEFFIGFIVISVILHFVFQNFPLLFSCLMSIRIVDNRLLTLVIVN

SEQ ID NO: 1362 - DNA, 4457 bp, Homo sapiens
tgtgattggctgttgccatggatacgctttgtgtagcggctatgggcgctgtcttacaacaaagccaaggaatctcgctgctgagggttctgtgctttattatgaagaataatggacgatgatgatgcaaagctcaaagcagaaatagaagctgaattggataaactcagcatttcctccttggaaaaagaagacattgagagtgatgcaaaatcagaaacccagagtgatgatagtgatacagattcagttgaattaccagaatcagttcttcactgtattaacatcataaagaacaggagtaaagctgttgaagagctcattcttcaggacctggaagatactgatattttaagctgtagttatggagcagtttctaataatcatatgcatttaagaacaggactatcaactgaatatgaagaaagttcagagcaattaattaagatattatctgaaatagaaaaagaagaatttatgagaagtaaaaccgattgtgccactcctgattttgttcctgagcctagtcctcatgacttgcctatggatgaacatgttttaccagatgatgctgatataaattttggatactgtgaagtggaagaaaaatgtagacagtcttttgaggcttggcaagagaaacagaaggaattagaagataaagagaaacaaactctcaaagctcagagggatagagaagaaaaacaatttcaagaagaagaagaaaagcgacattgctggatgaaacaatttaaagttgaaaagaagaaattagagaacattcagaagcaagaacaggacaagatgaatgatgaactctataaagaagagaaaatttggaaagagaaatttaaacagcatgaggagtatattagaaacttgcatttacaaatggaagaagaaagaacaagatttaaagaccaacaagaaaaagaaaaaaattctttgttaaaacagcagaataatgcagctgttaaaattcaagctaaatataaagcatttgttgcctatcaaaaatatggcccaattattaaagagcaaattgaaagtaagaaaaggaaagcacaagagtggaaggaaaaggaagcaaaaatacgacaaaaggaggaagaaaatcgaaaaagattagaggaggaacaaaggataaaagaagagagaaaaaagcaaaaggaagaggaaaggaaaaggagagaaaaagaatatgaagaaaaaaagaatattgtgaaacaggaaagagagcaactaataagcaaggaaaaaataatattaagagaagatgcaagccaacagctaataataagtagtgcattaaagaagagcggatataataacaaacatttaagtcttgaagatatttcaaatgataagggtgatatagccaaaaatctagtggatgaaaattcaaagaagcaggaagatgttctcctttggctagttgaggaatcaaatatgaaagaaaatgtagatagacagactatattaaaagaatcaatacaagtaaagttaaaagaatctatatcaagccaaacaattctggcagattttaaaatggaagaaaaaaatgaaaacctagcaaaaaaacgatgttcagaagaattggtcaagcaagaaagaaaatatgaaaatacagataacaaaactgaattgggaaactctgatctaaaaggaaatctgaaagaacagtttccattgcaagaattaaagtctgatgcacaaaaagaagaaaaaatcatgaaacatgtcataaatgagaatacaggacaaaaaacccagataatattaggacataaccaagaaatcagtgaggtgaaaaccaatgaagagcagaaaataatcaaagataatcagcagaaaaagatacaaaaagtagaaaaagaagagatacaagaacagaatggattattatataaagataaggatactttagttatttcagtgaaacaaagatcactctcactaacatcagaaaattccaaagatgtaagagaaaacgtaatattacaagaaaaagaaatttattcaaaatccaaagaaattgaggagaacccaaaagacaatgcttggaatagtggcattgtgatttttaacacaactgataccatgataaatatagaaggcaaaagaaatgaccaagattatgtgttaggtagacatgctccttgtgagggcttgagtaactataatgcagaaagctccatggtatctaaagaagtcaactctcttaaatctgagattagaaatatttcagaaaaatgccatgaaaatgcacctgaacctgatagcatgacctgctgtgtatcagagtcaacccttctatattctattgaagaaaggagactagcctggataaaatcatttaaaccttggcttgaaattttcaagcaaaatcaacaaaagaaaattgttagaagaaagagacctgtgaaatgcccagccaacatgacacccgctttggataaactggaaattcttcgatgtggcccttgggatactttacagcaggttacaacagttacatttcaagatttgccaggctgtgttctctccacactggcagagtgtacaaatcttcagtttctatcccttcgacgctgtggattaacttctttgcacagcctgagtaattgtaaaaaacttaagtacattgatgcacaggaaaaccatattgaggctattgagtgtgaaaatttggaaaatctctgtgttgttcttcttaataaaaatcaactgacttctcttcatggtttggatggctgtactaatattcagtgtcttgaactttcatataataaaattactcgaattggatattccttctttctggaagaaaaacttgttgacaatgcagggttctgccatcacttgggcacctccacttcttacttatccctggcacaagtctggattccaactggattatgttggtcctggatacctattacctcacttacaaaaaattcagattgtaatttccttatctcccacttatactggaattgtggtttagaatctttgaaaaatcttcaacaactaattttggaccacaatcagttaattaatacaaaaggtctttgtgatacacctaccattgtatacctagattgctcccataatcatcttactgatgtagagggcgttgaaaattgtggattgctccaaatattgaagttacagggaaattatctgagtgagcttccatccttggagaatcttgttttactaagagaattgcacttggatgataacagcatttcaactgtggaagcattttcttcatactggctgcctttactacaaaatattactatctctcaaaacagcttgactaaaatcgtaccactttttcattttgtttcattggaaaagctagatgtcagccacaattgtctttctgatcttaaaagtgccataaaatggtttgatgcatgctattctctccatgaattgtctcttactggaaacccacttcttcaagaaacaaactggagggattctctacttaaagtgttgcctgctctgagaatcctcaatggcaatatactaaactctaattcagaaagccgcactgaagaacacaatcaactgggatcagcaggtttcctggcactttgtcagtctcagattcgagaattcaacttgctaattgaaaattatataactggaaaaggagatgtatttaccttggatactgcagaaaatctctgtcattattttaagaaattgatgatacttagtactgaataccgacatgcacacgaacgaggggatgtaactatcaccaagaaagatgaatcagaagcccagaaaaatcatttggcccctacaaacagtgacagcactctgcaaaatggagtcttctactcttgtgcacgtgaaggtgagccagactcaccagatattcctgagaaatggatggactctgtctccagccactccccattaagcaaatccgccacatgtgaaaatatggaaggaagacatcaggaaatattagtatgtcagaagagagaagacagcaaggcaagcagtattcccaccataagaatcccatttaaggaagtagtaatgacaaattctttgctgaggaatcaccaaaatattgagcctagtgaaaaaatgtaagatatataaataatgtttcttttatagatgtatgtttactccttttgatggatgatattagtcaatggtacctagtaatttgctgaaggattcaaatcacaatcatatttcataccgattccattatgttttcgtgaggtgcattatgttttcatgaggtgcacaaatcattaattatagtgcatattaatttgattaaattctcatttaatttctagtagtatttaaatgagtaaatgtgagtttttttctgccttgtaatttctaaataattaatatgttttaaggagaaataaaatatcacagtctaaaaataataaaaacattttctgagt

SEQ ID NO: 1363 - protein, 1336 aa, Homo sapiens
MDDDDAKLKAEIEAELDKLSISSLEKEDIESDAKSETQSDDSDTDSVELPESVLHCINIIKNRSKAVEELILQDLEDTDILSCSYGAVSNNHMHLRTGLSTEYEESSEQLIKILSEIEKEEFMRSKTDCATPDFVPEPSPHDLPMDEHVLPDDADINFGYCEVEEKCRQSFEAWQEKQKELEDKEKQTLKAQRDREEKQFQEEEEKRHCWMKQFKVEKKKLENIQKQEQDKMNDELYKEEKIWKEKFKQHEEYIRNLHLQMEEERTRFKDQQEKEKNSLLKQQNNAAVKIQAKYKAFVAYQKYGPIIKEQIESKKRKAQEWKEKEAKIRQKEEENRKRLEEEQRIKEERKKQKEEERKRREKEYEEKKNIVKQEREQLISKEKIILREDASQQLIISSALKKSGYNNKHLSLEDISNDKGDIAKNLVDENSKKQEDVLLWLVEESNMKENVDRQTILKESIQVKLKESISSQTILADFKMEEKNENLAKKRCSEELVKQERKYENTDNKTELGNSDLKGNLKEQFPLQELKSDAQKEEKIMKHVINENTGQKTQIILGHNQEISEVKTNEEQKIIKDNQQKKIQKVEKEEIQEQNGLLYKDKDTLVISVKQRSLSLTSENSKDVRENVILQEKEIYSKSKEIEENPKDNAWNSGIVIFNTTDTMINIEGKRNDQDYVLGRHAPCEGLSNYNAESSMVSKEVNSLKSEIRNISEKCHENAPEPDSMTCCVSESTLLYSIEERRLAWIKSFKPWLEIFKQNQQKKIVRRKRPVKCPANMTPALDKLEILRCGPWDTLQQVTTVTFQDLPGCVLSTLAECTNLQFLSLRRCGLTSLHSLSNCKKLKYIDAQENHIEAIECENLENLCVVLLNKNQLTSLHGLDGCTNIQCLELSYNKITRIGYSFFLEEKLVDNAGFCHHLGTSTSYLSLAQVWIPTGLCWSWIPITSLTKNSDCNFLISHLYWNCGLESLKNLQQLILDHNQLINTKGLCDTPTIVYLDCSHNHLTDVEGVENCGLLQILKLQGNYLSELPSLENLVLLRELHLDDNSISTVEAFSSYWLPLLQNITISQNSLTKIVPLFHFVSLEKLDVSHNCLSDLKSAIKWFDACYSLHELSLTGNPLLQETNWRDSLLKVLPALRILNGNILNSNSESRTEEHNQLGSAGFLALCQSQIREFNLLIENYITGKGDVFTLDTAENLCHYFKKLMILSTEYRHAHERGDVTITKKDESEAQKNHLAPTNSDSTLQNGVFYSCAREGEPDSPDIPEKWMDSVSSHSPLSKSATCENMEGRHQEILVCQKREDSKASSIPTIRIPFKEVVMTNSLLRNHQNIEPSEKM

SEQ ID NO: 1364 - DNA, 1320 bp, Homo sapiens
gattatggagtttctgagcgagaagtttgccctcaagagccctccgagtaaaaacagtgacttttacatgggcgcaggaggtcctctggagcacgttatggagacgctggacaatgagtccttttacagcaaagcgtctgcaggcaaatgcgtgcaggccttcggacccctgccccgcgccgagcatcacgtgcgcttggagaggacctcgccctgtcaggacagcagcgtgaactatgggatcactaaagtagaaggacagccccttcacaccgaactgaatagagctatggacaactgtaacagtctccgaatgtctcccgtgaaagggatgcaagagaagggagagctggatgaacttggggataaatgtgatagcaatgtatccagcagtaagaaacggaggcaccgaaccaccttcaccagtttgcagctagaggagctggagaaagtctttcagaaaactcattacccggatgtgtatgtcagagaacagcttgctctgaggacagagctcactgaggccagggtccaggtttggtttcaaaatcgaagggccaaatggagaaaaagggaacgttatggccaaatacaacaagcgaaaagccattttgctgccacctatgatatatcagttttgccaaggactgacagctacccacagattcagaacaatttgtgggcaggaaatgcaagtggtggttctgtggttacttcatgcatgttaccacgtgacacttcctcctgtatgacaccttattctcactcgcctcggacagattccagttacacggggttttcaaaccaccagaaccagttcagccacgtgcccctcaacaattttttcactgactctcttcttactggggcaaccaatggacatgcatttgaaacaaagccagagtttgaaaggaggtcttccagtatcgcagttcttcgaatgaaagccaaggagcacaccgccaatatttcatgggccatgtaacatacagtactcttttatttttcttttaatagcaaagttaaacattcttatttctcatatttaaaggataccacaataagctgctgtgtgtggaattgctaaaggtcaagatattcagtgagaccagcttaaatgaatagttgttatttaacattaaaatctaagaatgaacctctgaaaagactaaataggtttaccatgtgccagtctccacaaaccctgttttagtagtaaggttttctttttctattgtacaagtcaatgaaatatgatcacgcaacttattaaagaataaatgtgttaaacaaaaaaaaaaaaaaaaaaaaaaaaaaaaa

SEQ ID NO: 1365 - protein, 326 aa, Homo sapiens
MEFLSEKFALKSPPSKNSDFYMGAGGPLEHVMETLDNESFYSKASAGKCVQAFGPLPRAEHHVRLERTSPCQDSSVNYGITKVEGQPLHTELNRAMDNCNSLRMSPVKGMQEKGELDELGDKCDSNVSSSKKRRHRTTFTSLQLEELEKVFQKTHYPDVYVREQLALRTELTEARVQVWFQNRRAKWRKRERYGQIQQAKSHFAATYDISVLPRTDSYPQIQNNLWAGNASGGSVVTSCMLPRDTSSCMTPYSHSPRTDSSYTGFSNHQNQFSHVPLNNFFTDSLLTGATNGHAFETKPEFERRSSSIAVLRMKAKEHTANISWAM

SEQ ID NO: 1366 - DNA, 545 bp, Homo sapiens
atgctagtggaaaacagtttgatctcagactgctgtgctagcaatcagcgagactccgtgggcgtaggaccctccgagccaggcatcagctatcaaaacttatgggaaatggaattgaagacaactacttctagaattggtgcatggaagcttctcataggtgattagccacactcttcttctgtcaacctggtgcagaaaagcttgaagaccttggaaatcacatattgatgatggaggagatacaagaatgaaggaccctgggttcctgaatcaacactctaagaagagactccttgaaatcaagagcactcattttgacattgcaaacggaaaaattcacttctatcaggtttgaaccaatatatagtttagggtttttaaaaaataactgttagcatgactttaactaatacacatgccatacaggatcagacctctgtgactttgcttttacagtctgctctgtctggaggggagtttcatctttgccatccttaatgatatagcatagacgctatgtcctccagaaacttccttggcac

SEQ ID NO: 1367 - protein, 55 aa, Homo sapiens [sequence omitted]

SEQ ID NO: 1368 - DNA, 3897 bp, Homo sapiens
gaaggtaaaaaaaagagggaggtctgagaaatagaaatatcagaggaaggaaataaaggagggtgagagtaaattctcttttagcattcagattccacagattccacaaatcacatttctttttttaccaactaaggaaaaataacacttgacctaacatttcattgcagttagctaaaggatgctagaaaaactatgttgcagtggtttgctctaatttcttcaggaatagagaaaagtgacaaaaagatcagagaagagaagaaaggaaactatcagaaaaatacagaattggagtaggatataacatatttgggttgaaggtaaaattttatattgtaatcttaagtatcttgctacttcagtttggtccctggaacagcagcatcagaatctgccgagggcttgttaaaaaggcagaatctcaggtcccatcccagactcactgaatcagaatataaatactgacaagatgccccgggattcatatgcacagtagagctggcgaagttccattgtagcctgtgattgttttctgcaacttagtatttctgagttttcccaaggaagaaaacccaggccttagcttctggcagacttgtgtttctcctttacttactagctgcatgactcatgagcaaggaaatcaaactttatgtgcctgagtttcctcatctataaaatggagactataataatcatctcctaggcttgttttgaggatgttcaacaaatgctcctttcattcctctatttacagacctgccgcagacaattctgctagcagcctttgtgctattatctgttttctaaacttagtaattgagtgtgatctggagactaactctgaaataaataagctgattatttatttattttctcaaaacaacagaatacgatttagcaaattacttcttaagatattattttacatttctatattctcctaccctgagttgatgtgtgagcaatatgtcactttcataaagccaggtatacattatggacaggtaagtaaaaaacatattatttattctacgtttttgtccaaaaattttaaatttcaactgttgcgcgtgtgttggtaatgtaaaacaaactcagtacagtagtattcagtacagtatttaagcccctgtacttaaacatattcctcgtaccaatgaagttacatgaaaagcaaatttgtgtgagatatcgtagatggaagtaaattagtctttatgttccccacaaattgaaatgcatttcaaaaactctgtgtgtgtatgtgtgtgtgtgacagagtgtgtgtgagagagagacagagagatacgctttggttgcctccataagctggctgctatgattaataagaccaagttttctaaagaaaatgagatcataacaaaagccctctttatgactatcttttatcaggggcaaaaaggaaagagacaaaacagcatgaaatgatgagaccaagtgatgaaaattcattcacaatgattgctttcaagagtaatttctcttgggtaattcagcagcctgttactatggctctctggagtgatagctaatgtaaatgaagcctctaaaagtggattatcctgacaagaatatactcagccaataatgcaacagaaatccattcaaagcattcgggaaaaattcaaaagaataaatattctttttttttttttaaagttaatgacctacgatccatttcttccctgactaacaagcagcaagcacttaaaaatatccagccaggatgaaatagaaacccacctgacttgttaatatttttgtttggtcccagggactcagattctaagccaaattctttgaatgatcttggcaaatgtctcgaattatttttgccaacttttctttatcttggaaaaaaagtttcatgaatgggtgtcaaaattgattagttttaaaaacctttcttgcagatacgtatggcaccctaaaactgtattagaaaaaaatttcatatctccaggcctttcattgggtcaggttggcatttcgctgccctttatgtgtgtgacaagtgaaaataaggaaagaaaaaaactcaagtgaagaaaatcagaatctgcgcagcagttcctgggcgtttcagctgcttcccacatcacctgcctcatcaagccccagcatccatctccttgctcatcttacaccctgtgtgcatgacaggcccaccattcatttatcagagcaaaggctctcccactattctggttcacccccctacttagccagatatacaagaatatctgcacggatgacctgcctcacctgggagctcagaggagctcagattccattactatcgcaccaaggacagatctcccagcaagaatgacagaaaagactaactgcccccaaaatctcccttccaaaacacagttctcttaattctcccaagaaaccagaatgtgactgctcacctctctaaggacctgaaaacaactggccatttcagctatttaaatcaactttaaaaaatccaaccgccaaaatattaaaccattttggttggaatgataacataactaacctgctgacagctgcttctgctaggtgcaaaaatggaaaaaaaaatacttctaatcaggtcaaatcactctacctttgggattctaaatttactcatattctcaaagaaatatattcagtcatagtggggaaaataggattattcctttagctcgataagcaaccagaagttcttccttcaaatcttgacatttaatcaatcagaaattgatttttggaaaactgtttcctatgaagctatctctgcctgaaggatttttcttttacaatccagactatagaaggaaattcacaacctggactttcacctccattggtcagagttttactgaccaattcccacctctgccttacacctaacggaagtttatgcctgttttctcttcacataccccaacagttacaaatggttgttattattaagcatcttttattttgtggcctctgattacatggtcccctaaattttgacctaatcacaaaagattggtaaaatttcttaacatattaataatattttgtttatgtgtcaatatcttagcatgtatcaattaagacagaggtcttaacgttctctttttgaaagagaatattaggattcagagatattaagagattctcccaggatcacagttaggtaacagagctggattttagtccaggtctgtctacagctctaacgtatatacaccctttgtataacatgtcacgaattcagcataaagggatcttcagtgatctaagtcaggggtcagcaaccttttctaaaaaggaccaaatagtaatatttcaggctttgtggaccctatggtctctatcataactgttcaaatcaccatgtagtgtaaaaggagccataagcaaaatataaactaacgaatgtggctgttttatgggatttttttttaactctttatttacaaaagcaggtggcagatcagaactcacttatgggccatagttctctgacccctgacctgagaaaatcttatatttatggacaacatttagactgtgacttgccaagtaagaacaagaagctctgtcaactgaaggtcaaggctggagttctgaaagcaaagagctgtctggtgttaatgataagtgaaatagttaaagttagaagatcccagttataagaagcacaaagaataatgaccatagactcctgaacaagaatgtctggacttctggcttaggcactcttgttgtatggtccaggccaagttacctaatctctccaggcctccattttcttatcattaaatgaagataataaaagtattttcctcagagagctgtaagaataaactgagctaacccatgtcaagcacatagaatagg

SEQ ID NO: 1369 - protein, 121 aa, Homo sapiens
MFNKCSFHSSIYRPAADNSASSLCAIICFLNLVIECDLETNSEINKLIIYLFSQNNRIRFSKLLLKILFYISIFSYPELMCEQYVTFIKPGIHYGQVSKKHIIYSTFLSKNFKFQLLRVCW

SEQ ID NO: 1370 - DNA, 5121 bp, Homo sapiens
gcgaggaggaaacggtgccggagcgcgcagggcttgctgccgccaccgccgctgcacaggctgccggagcgagcctgccgcgcgccgccctccccgctctccttcctgggcgagctgcggggatggggcggccgcgggagcccgagcgcgcgcaggaaccgccgccgccgccgcccgcgtctccgttgccgcgcgcctgagccgccgtcgccgccgcgcgccctgcccgggggcggcccccccagccccatggaggtctcccggaggaaggcgccgccgcgccccccgcgccccgcagcgccactgcccctgctcgcctatctgctggcactggcggctcccggccggggcgcggacgagcccgtgtggcggtcggagcaagccatcggagccatcgcggcgagccaggaggacggcgtgtttgtggcgagcggcagctgcctggaccagctggactacagcctggagcacagcctctcgcgcctgtaccgggaccaagcgggcaactgcacagagccggtctcgctggcgccccccgcgcggccccggcccgggagcagcttcagcaagctgctgctgccctaccgcgagggggcggccggcctcggggggctgctgctcaccggctggaccttcgaccggggcgcctgcgaggtgcggcccctgggcaacctgagccgcaactccctgcgcaacggcaccgaggtggtgtcgtgccacccgcagggctcgacggccggcgtggtgtaccgcgcgggccggaacaaccgctggtacctggcggtggccgccacctacgtgctgcctgagccggagacggcgagccgctgcaaccccgcggcatccgaccacgacacggccatcgcgctcaaggacacggaggggcgcagcctggccacgcaggagctggggcgcctcaagctgtgcgagggcgcgggcagcctgcacttcgtggacgcctttctctggaacggcagcatctacttcccctactacccctacaactatacgagcggcgctgccaccggctggcccagcatggcgcgcatcgcgcagagcaccgaggtgctgttccagggccaggcatccctcgactgcggccacggccaccccgacggccgccgcctgctcctctcctccagcctagtggaggccctggacgtctgggcgggagtgttcagcgcggccgctggagagggccaggagcggcgctcccccaccaccacggcgctctgcctcttcagaatgagtgagatccaggcgcgcgccaagagggtcagctgggacttcaagacggccgagagccactgcaaagaaggggatcaacctgaaagagtccaaccaatcgcatcatctaccttgatccattccgacctgacatccgtttatggcaccgtggtaatgaacaggactgttttattcttggggactggagatggccagttacttaaggttattcttggtgagaatttgacttcaaattgtccagaggttatctatgaaattaaagaagagacacctgttttctacaaactcgttcctgatcctgtgaagaatatctacatttatctaacagctgggaaagaggtgaggagaattcgtgttgcaaactgcaataaacataaatcctgttcggagtgtttaacagccacagaccctcactgcggttggtgccattcgctacaaaggtgcacttttcaaggagattgtgtacattcagagaacttagaaaactggctggatatttcgtctggagcaaaaaagtgccctaaaattcagataattcgaagcagtaaagaaaagactacagtgactatggtgggaagcttctctccaagacactcaaagtgcatggtgaagaatgtggactctagcagggagctctgccagaataaaagtcagcccaaccggacctgcacctgtagcatcccaaccagagcaacctacaaagatgtttcagttgtcaacgtgatgttctccttcggttcttggaatttatcagacagattcaactttaccaactgctcatcattaaaagaatgcccagcatgcgtagaaactggctgcgcgtggtgtaaaagtgcaagaaggtgtatccaccccttcacagcttgcgacccttctgattatgagagaaaccaggaacagtgtccagtggctgtcgagaagacatcaggaggaggaagacccaaggagaacaaggggaacagaaccaaccaggctttacaggtcttctacattaagtccattgagccacagaaagtatcgacattagggaaaagcaacgtgatagtaacgggagcaaactttacccgggcatcgaacatcacaatgatcctgaaaggaaccagtacctgtgataaggatgtgatacaggttagccatgtgctaaatgacacccacatgaaattctctcttccatcaagccggaaagaaatgaaggatgtgtgtatccagtttgatggtgggaactgctcttctgtgggatccttatcctacattgctctgccacattgttcccttatatttcctgctaccacctggatcagtggtggtcaaaatataaccatgatgggcagaaattttgatgtaattgacaacttaatcatttcacatgaattaaaaggaaacataaatgtctctgaatattgtgtggcgacttactgcgggtttttagcccccagtttaaagagttcaaaagtgcgcacgaatgtcactgtgaagctgagagtacaagacacctacttggattgtggaaccctgcagtatcgggaggaccccagattcacggggtatcgggtggaatccgaggtggacacagaactggaagtgaaaattcaaaaagaaaatgacaacttcaatatttccaaaaaagacattgaaattactctcttccatggggaaaatgggcaattaaattgcagttttgaaaatattactagaaatcaagatcttaccaccatcctttgcaaaattaaaggcatcaagactgcaagcaccattgccaactcttctaagaaagttcgggtcaagctgggaaacctggagctctacgtcgagcaggagtcagttccttccacatggtattttctgattgtgctccctgtcttgctagtgattgtcatttttgcggccgtgggggtgaccaggcacaaatcgaaggagctgagtcgcaaacagagtcaacaactagaattgctggaaagcgagctccggaaagagatacgtgacggctttgctgagctgcagatggataaattggatgtggttgatagttttggaactgttcccttccttgactacaaacattttgctctgagaactttcttccctgagtcaggtggcttcacccacatcttcactgaagatatgcataacagagacgccaacgacaagaatgaaagtctcacagctttggatgccctaatctgtaataaaagctttcttgttactgtcatccacacccttgaaaagcagaagaacttttctgtgaaggacaggtgtctgtttgcctccttcctaaccattgcactgcaaaccaagctggtctacctgaccagcatcctagaggtgctgaccagggacttgatggaacagtgtagtaacatgcagccgaaactcatgctgagacgcacggagtccgtcgtcgaaaaactcctcacaaactggatgtccgtctgcctttctggatttctccgggagactgtcggagagcccttctatttgctggtgacgactctgaaccagaaaattaacaagggtcccgtggatgtaatcacttgcaaagccctgtacacacttaatgaagactggctgttgtggcaggttccggaattcagtactgtggcattaaacgtcgtctttgaaaaaatcccggaaaacgagagtgcagatgtctgtcggaatatttcagtcaatgttctcgactgtgacaccattggccaagccaaagaaaagattttccaagcattcttaagcaaaaatggctctccttatggacttcagcttaatgaaattggtcttgagcttcaaatgggcacacgacagaaagaacttctggacatcgacagttcctccgtgattcttgaagatggaatcaccaagctaaacaccattggccactatgagatatcaaatggatccactataaaagtctttaagaagatagcaaattttacttcagatgtggagtactcggatgaccactgccatttgattttaccagattcggaagcattccaagatgtgcaaggaaagagacatcgagggaagcacaagttcaaagtaaaagaaatgtatctgacaaagctgctgtcgaccaaggtggcaattcattctgtgcttgaaaaactttttagaagcatttggagtttacccaacagcagagctccatttgctataaaatacttttttgactttttggacgcccaggctgaaaacaaaaaaatcacagatcctgacgtcgtacatatttggaaaacaaacagccttcctcttcgcttctgggtaaacatcctgaagaaccctcagtttgtctttgacattaagaagacaccacatatagacggctgtttgtcagtgattgcccaggcattcatggatgcattttctctcacagagcagcaactagggaaggaagcaccaactaataagcttctctatgccaaggatatcccaacctacaaagaagaagtaaaatcttattacaaagcaatcagggatttgcctccattgtcatcctcagaaatggaagaatttttaactcaggaatctaagaaacatgaaaatgaatttaatgaagaagtggccttgacagaaatttacaaatacatcgtaaaatattttgatgagattctaaataaactagaaagagaacgagggctggaagaagctcagaaacaactcttgcatgtaaaagtcttatttgatgaaaagaagaaatgcaagtggatgtaagcactctggggcctggcttaatctggcaaagttcttcagacgacttgggagcaaaatggctgcttgagctactctgtgtcgttaatttgttgtttgcacataggttccactttgggcactgtctttttaagagaccaaggcacatgcacagcttttagaaagcaa

SEQ ID NO: 1371 - protein, 1568 aa, Homo sapiens
MEVSRRKAPPRPPRPAAPLPLLAYLLALAAPGRGADEPVWRSEQAIGAIAASQEDGVFVASGSCLDQLDYSLEHSLSRLYRDQAGNCTEPVSLAPPARPRPGSSFSKLLLPYREGAAGLGGLLLTGWTFDRGACEVRPLGNLSRNSLRNGTEVVSCHPQGSTAGVVYRAGRNNRWYLAVAATYVLPEPETASRCNPAASDHDTAIALKDTEGRSLATQELGRLKLCEGAGSLHFVDAFLWNGSIYFPYYPYNYTSGAATGWPSMARIAQSTEVLFQGQASLDCGHGHPDGRRLLLSSSLVEALDVWAGVFSAAAGEGQERRSPTTTALCLFRMSEIQARAKRVSWDFKTAESHCKEGDQPERVQPIASSTLIHSDLTSVYGTVVMNRTVLFLGTGDGQLLKVILGENLTSNCPEVIYEIKEETPVFYKLVPDPVKNIYIYLTAGKEVRRIRVANCNKHKSCSECLTATDPHCGWCHSLQRCTFQGDCVHSENLENWLDISSGAKKCPKIQIIRSSKEKTTVTMVGSFSPRHSKCMVKNVDSSRELCQNKSQPNRTCTCSIPTRATYKDVSVVNVMFSFGSWNLSDRFNFTNCSSLKECPACVETGCAWCKSARRCIHPFTACDPSDYERNQEQCPVAVEKTSGGGRPKENKGNRTNQALQVFYIKSIEPQKVSTLGKSNVIVTGANFTRASNITMILKGTSTCDKDVIQVSHVLNDTHMKFSLPSSRKEMKDVCIQFDGGNCSSVGSLSYIALPHCSLIFPATTWISGGQNITMMGRNFDVIDNLIISHELKGNINVSEYCVATYCGFLAPSLKSSKVRTNVTVKLRVQDTYLDCGTLQYREDPRFTGYRVESEVDTELEVKIQKENDNFNISKKDIEITLFHGENGQLNCSFENITRNQDLTTILCKIKGIKTASTIANSSKKVRVKLGNLELYVEQESVPSTWYFLIVLPVLLVIVIFAAVGVTRHKSKELSRKQSQQLELLESELRKEIRDGFAELQMDKLDVVDSFGTVPFLDYKHFALRTFFPESGGFTHIFTEDMHNRDANDKNESLTALDALICNKSFLVTVIHTLEKQKNFSVKDRCLFASFLTIALQTKLVYLTSILEVLTRDLMEQCSNMQPKLMLRRTESVVEKLLTNWMSVCLSGFLRETVGEPFYLLVTTLNQKINKGPVDVITCKALYTLNEDWLLWQVPEFSTVALNVVFEKIPENESADVCRNISVNVLDCDTIGQAKEKIFQAFLSKNGSPYGLQLNEIGLELQMGTRQKELLDIDSSSVILEDGITKLNTIGHYEISNGSTIKVFKKIANFTSDVEYSDDHCHLILPDSEAFQDVQGKRHRGKHKFKVKEMYLTKLLSTKVAIHSVLEKLFRSIWSLPNSRAPFAIKYFFDFLDAQAENKKITDPDVVHIWKTNSLPLRFWVNILKNPQFVFDIKKTPHIDGCLSVIAQAFMDAFSLTEQQLGKEAPTNKLLYAKDIPTYKEEVKSYYKAIRDLPPLSSSEMEEFLTQESKKHENEFNEEVALTEIYKYIVKYFDEILNKLERERGLEEAQKQLLHVKVLFDEKKKCKWM

SEQ ID NO: 1372 - DNA, 2759 bp, Homo sapiens
gctcaggccccgcccctgccgccggaatcctgaagcccaaggctgcccgggggcggtccggcggcgccggcgatggggcataaaaccactggccacctgccgggctgctcctgcgtgcgctgccgtcccggatccaccgtgcctctgcggcctgcgtgcccggagtccccgcctgtgtcgtctctgtcgccgtccccgtctcctgccaggcgcggagccctgcgagccgcgggtgggccccaggcgcgcagacatgggctgctccgccaaagcgcgctgggctgccggggcgctgggcgtcgcggggctactgtgcgctgtgctgggcgctgtcatgatcgtgatggtgccgtcgctcatcaagcagcaggtccttaagaacgtgcgcatcgaccccagtagcctgtccttcaacatgtggaaggagatccctatccccttctatctctccgtctacttctttgacgtcatgaaccccagcgagatcctgaagggcgagaagccgcaggtgcgggagcgcgggccctacgtgtacagggagttcaggcacaaaagcaacatcaccttcaacaacaacgacaccgtgtccttcctcgagtaccgcaccttccagttccagccctccaagtcccacggctcggagagcgactacatcgtcatgcccaacatcctggtcttgggtgcggcggtgatgatggagaataagcccatgaccctgaagctcatcatgaccttggcattcaccaccctcggcgaacgtgccttcatgaaccgcactgtgggtgagatcatgtggggctacaaggacccccttgtgaatctcatcaacaagtactttccaggcatgttccccttcaaggacaagttcggattatttgctgagctcaacaactccgactctgggctcttcacggtgttcacgggggtccagaacatcagcaggatccacctcgtggacaagtggaacgggctgagcaaggttgacttctggcattccgatcagtgcaacatgatcaatggaacttctgggcaaatgtggccgcccttcatgactcctgagtcctcgctggagttctacagcccggaggcctgccgatccatgaagctaatgtacaaggagtcaggggtgtttgaaggcatccccacctatcgcttcgtggctcccaaaaccctgtttgccaacgggtccatctacccacccaacgaaggcttctgcccgtgcctggagtctggaattcagaacgtcagcacctgcaggttcagtgcccccttgtttctctcccatcctcacttcctcaacgctgacccggttctggcagaagcggtgactggcctgcaccctaaccaggaggcacactccttgttcctggacatccacccggtcacgggaatccccatgaactgctctgtgaaactgcagctgagcctctacatgaaatctgtcgcaggcattggacaaactgggaagattgagcctgtggtcctgccgctgctctggtttgcagagagcggggccatggagggggagactcttcacacattctacactcagctggtgttgatgcccaaggtgatgcactatgcccagtacgtcctcctggcgctgggctgcgtcctgctgctggtccctgtcatctgccaaatccggagccaagagaaatgctatttattttggagtagtagtaaaaagggctcaaaggataaggaggccattcaggcctattctgaatccctgatgacatcagctcccaagggctctgtgctgcaggaagcaaaactgtagggtcctgaggacaccgtgagccagccaggcctggccgctgggcctgaccggccccccagcccctacaccccgcttctcccggactctcccagcggacagccccccagccccacagcctgagcctcccagctgccatgtgcctgttgcacacctgcacacacgccctggcacacatacacacatgcgtgcaggcttgtgcagacactcagggatggagctgctgctgaagggacttgtagggagaggctcgtcaacaagcactgttctggaaccttctctccacgtggcccacaggcctgaccacaggggctgtgggtcctgcgtccccttcctcgggtgagcctggcctgtcccgttcagccgttgggcccaggcttcctcccctccaaggtgaaacactgcagtcccggtgtggtggctccccatgcaggacgggccaggctgggagtgccgccttcctgtgccaaattcagtggggactcagtgcccaggccctggccacgagctttggccttggtctacctgccaggccaggcaaagcgcctttacacaggcctcggaaaacaatggagtgagcacaagatgccctgtgcagctgcccgagggtctccgcccaccccggccggactttgatccccccgaagtcttcacaggcactgcatcgggttgtctggcgcccttttcctccagcctaaactgacatcatcctatggactgagccggccactctctggccgaagtggccgcaggctgtgcccccgagctgcccccaccccctcacagggtccctcagattataggtgcccaggctgaggtgaagaggcctgggggccctgccttccgggcgctcctggaccctggggcaaacctgtgacccttttctactggaatagaaatgagttttatcatctttgaaaaataattcactcttgaagtaataaacgtttaaaaaaatgggaaaaaaaaaaaaaaaaaa

SEQ ID NO: 1373 - protein, 509 aa, Homo sapiens
MGCSAKARWAAGALGVAGLLCAVLGAVMIVMVPSLIKQQVLKNVRIDPSSLSFNMWKEIPIPFYLSVYFFDVMNPSEILKGEKPQVRERGPYVYREFRHKSNITFNNNDTVSFLEYRTFQFQPSKSHGSESDYIVMPNILVLGAAVMMENKPMTLKLIMTLAFTTLGERAFMNRTVGEIMWGYKDPLVNLINKYFPGMFPFKDKFGLFAELNNSDSGLFTVFTGVQNISRIHLVDKWNGLSKVDFWHSDQCNMINGTSGQMWPPFMTPESSLEFYSPEACRSMKLMYKESGVFEGIPTYRFVAPKTLFANGSIYPPNEGFCPCLESGIQNVSTCRFSAPLFLSHPHFLNADPVLAEAVTGLHPNQEAHSLFLDIHPVTGIPMNCSVKLQLSLYMKSVAGIGQTGKIEPVVLPLLWFAESGAMEGETLHTFYTQLVLMPKVMHYAQYVLLALGCVLLLVPVICQIRSQEKCYLFWSSSKKGSKDKEAIQAYSESLMTSAPKGSVLQEAKL

SEQ ID NO: 1374 - DNA, 1272 bp, Homo sapiens
ggcgcagcagcggcggcggcggctgtgggtaaaggcgcggcgcgcggcccccgagcgcgccaaccttgccctagccggagcccgctgcggcccagcgcacggccctcaccccgcatcgcgaccccgcgccccgccggccgagcatgggcgcgcgcgcctcaggcgggcccctggcccgggccgggctcctgctgctgctgctgctgctgctgctgctcgggctgctggccccgggcgcgcagggggcgcggggccgcggcggcgcggagaagaacagctaccgccgcacggtcaacaccttctcccagagcgtcagcagcctgttcggcgaggacaacgtgcgcgccgctcagaagttcttggccaggctgactgagagatttgtgctgggagtggatatgttcgtggagacactgtggaaagtctggaccgagctcttggatgttcttggacttgacgtctccaacctgtcccagtatttcagcccagcctcggtgtccagcagcccggcccgcgcgctcctgctggtcggcgtcgtcctcctggcctactggttcttgtccctgaccctgggcttcactttcagcgtcctgcacgtggtgttcggccgcttcttctggatcgtgcgggtcgtcctgttttccatgtcctgcgtgtacatcctgcacaagtacgagggcgagccggagaacgcggtgctgccgctgtgcttcgtggtggccgtctacttcatgaccgggcccatgggcttctactggcgaagcagtcccagcggccccagcaaccccagcaaccccagcgtggaggagaagctggagcacctggagaagcaggtcagactgctcaacatccgtctcaaccgggtgctcgagagcctggaccgctccaaggacaagtgaaggtcagccggccgggcgggtccacagttaccagcacgctgtctcagaaaacgaaaacggaggaaaaaaaccccaaaccccaaacaatcttaataaacacgactgagcaagaaagtggcgctgtgtagggctatttccacccacccggcagctcttaggacacattcccagaagagcggaaagatcattgacgtggaactacacacgaagtgtaattagtgggggaaaaaatattttttaaacaaaggatataaccatatttagttgtacagtaagagaaatttatctgtgcatagagcataaagttaattttttcaagcatttaaatacatcttttgtaaggttttttaataaaggcagattgagtcaagtt

SEQ ID NO: 1375 - protein, 251 aa, Homo sapiens
MGARASGGPLARAGLLLLLLLLLLLGLLAPGAQGARGRGGAEKNSYRRTVNTFSQSVSSLFGEDNVRAAQKFLARLTERFVLGVDMFVETLWKVWTELLDVLGLDVSNLSQYFSPASVSSSPARALLLVGVVLLAYWFLSLTLGFTFSVLHVVFGRFFWIVRVVLFSMSCVYILHKYEGEPENAVLPLCFVVAVYFMTGPMGFYWRSSPSGPSNPSNPSVEEKLEHLEKQVRLLNIRLNRVLESLDRSKDK

SEQ ID NO: 1376 - DNA, 3341 bp, Homo sapiens
ggcctgcggggcggggcctgggccaagcggcccgcaggaggcggcggcggccgttcagtcccttgttccccgccgccgccgtcgctgacccagcccgccaggcgctcctgaccgtcgcttcctccggtcccaggtccccggccctcgcctcagccccggcccctggtccccagccctcgtcgcagccccggccgcccgccgccgccatgtccaaggaggagcgccccggtcgggaggagatcctggagtgccaggtgatgtgggagcctgacagtaagaagaacacgcagatggaccgcttccgggcggctgtgggcgccgcctgcggcctggcgctggagagttatgatgacttgtaccattggtccgttgagtcatattcagacttctgggcagagttctggaaattcagtggaattgtcttctcacgtgtgtatgatgaggttgtggacacatcgaaaggaatcgcagatgtccccgagtggttcaaaggcagtcggctcaactatgcagaaaacctcctgcggcacaaagagaatgacagagttgccctttacattgcaagggaaggcaaagaggaaattgtgaaggtgacttttgaagagctgaggcaagaagtggctttgtttgcagcagcaatgaggaaaatgggtgtgaagaaaggagatcgggttgttggttatttacccaacagtgagcacgctgtcgaggcgatgctggctgcggcaagcattggtgccatctggagctccacgtccccggacttcggtgtgaatggtgtgctggaccggttttctcaaattcagccaaagctcatcttctctgtggaggctgttgtctataatggcaaagagcacaaccacatggaaaagctgcagcaggtggttaaaggcctaccagacttgaagaaagtggtggtgattccttatgtgtcctccagagagaacatagacctttcaaagattccaaacagtgtgtttctggatgactttcttgccaccggcaccagtgagcaggccccgcagctggagttcgagcagctgcccttcagccacccactgttcatcatgttctcatcgggcaccacgggcgcacccaagtgcatggtgcattccgctgggggcaccctcatccagcatctgaaggagcacctgctgcacggcaacatgaccagcagtgacatcctcctgtgctacaccacggtcggctggatgatgtggaactggatggtgtcccttctggccacaggagcggccatggtcttgtacgatggctcccccctggtgcccacgcccaatgtgctctgggacctggttgacaggataggcatcactgtcctggtaactggggccaagtggctgtcagtgctggaagagaaggccatgaagccggtggaaacccacagtctccagatgctccacacgatcctgtccactggctccccactgaaagcccagagctacgagtatgtctacaggtgcatcaagagcagcatcctcctgggctccatctcaggaggcaccgacatcatctcctgcttcatgggccacaatttttctcttcctgtgtataaaggggagattcaggcccggaacctgggcatggccgtggaagcgtggaacgaggaaggaaaggcggtctggggagagagcggcgagctggtgtgtactaagccgatcccttgccagcccacacacttctggaacgatgagaacggcaacaagtacaggaaggcgtatttctccaaattcccaggtatctgggctcatggcgactactgcagaatcaaccccaagaccgggggcatcgtcatgcttggccggagtgacggcaccctcaaccccaacggggtgcggttcggcagctcggaaatctataacattgtggaatccttcgaggaggtggaggacagcctgtgtgtcccccagtataacaagtacagggaggagagggtgatcctcttcctgaagatggcctccgggcacgccttccagcctgacttggttaagaggatccgtgacgccatccgcatgggcttgtctgcgcgacacgtgcccagcctcatcctggaaaccaagggcatcccgtatacgctcaacggcaagaaagtggaagttgccgtcaaacagatcatcgctggaaaagccgtggagcaaggaggtgctttctcgaaccccgagaccctggatctgtaccgggacatccctgagctgcagggcttctgagtcagactggctggcgtgtcactcagccgcacccgtgtgcactgtaacttttgtgtgctcaagaaattatacagaaacctacagctgttgtaaaaggatgctcgcaccaagtgttctgtaggcttggggagggatcgtttctctgttttgttaaatctggtgggtacctggatcttccacacgagtgggattctggccttcagagaccaggagggagtgtctgggccgcaggtgtggcactgtggtgagagtgtgtgtctttgcacacacagtgcagcgggaacggtggggctggctggtgctgaagacagacacactcctgagccaaggtcttgtcttcaacctccccgtcccgttgtcccattttgctctgtgaaggtgcaaatccctttcttcccttcccatctcaggctctcctgttttccctcagggtccagtatgcctttgagctttagctgttagaaaggaacccccgtgacttgacacagctttcacagctggctgctaggaccggcgggctgggtgttcacgtgtgtctgtgtcatggatgcaatgcaggccctggaggactgtgcgtcacccgtcaaccagagcgtgcctccgggccagcttccctccaaggaatgagtggatttcatacaggatctctttattgcacagactgaatggctttacatgtttctaatgtgaattaggcatgtgaagcagtgggtgtccacccgtgtccctcatgggtgagccctccagctgtgagcccaggcagtgtggtcaccgagtgaggaccctcctcaccaggaaccgcatccctgtgctgcctccacctgagagttgctagggggttcttgtcgagatcatgtcatcagcacccctaagtcaagtcacgggtttccatagccaggcagttggtatgtacaattcagttcagcgtatgaacttgtatctctaatctgatgtccatttttatattttttgaaactgagcacaatgaaatcctttcttgaatcattttccttttggattataaaaatatgggggaaagtgctatgatgaattttatgcaataaatgtatacatgtgtgcacatgcacccatgctgaaaaaaaaaaaaaaaaaaaa

SEQ ID NO: 1377 - protein, 672 aa, Homo sapiens
MSKEERPGREEILECQVMWEPDSKKNTQMDRFRAAVGAACGLALESYDDLYHWSVESYSDFWAEFWKFSGIVFSRVYDEVVDTSKGIADVPEWFKGSRLNYAENLLRHKENDRVALYIAREGKEEIVKVTFEELRQEVALFAAAMRKMGVKKGDRVVGYLPNSEHAVEAMLAAASIGAIWSSTSPDFGVNGVLDRFSQIQPKLIFSVEAVVYNGKEHNHMEKLQQVVKGLPDLKKVVVIPYVSSRENIDLSKIPNSVFLDDFLATGTSEQAPQLEFEQLPFSHPLFIMFSSGTTGAPKCMVHSAGGTLIQHLKEHLLHGNMTSSDILLCYTTVGWMMWNWMVSLLATGAAMVLYDGSPLVPTPNVLWDLVDRIGITVLVTGAKWLSVLEEKAMKPVETHSLQMLHTILSTGSPLKAQSYEYVYRCIKSSILLGSISGGTDIISCFMGHNFSLPVYKGEIQARNLGMAVEAWNEEGKAVWGESGELVCTKPIPCQPTHFWNDENGNKYRKAYFSKFPGIWAHGDYCRINPKTGGIVMLGRSDGTLNPNGVRFGSSEIYNIVESFEEVEDSLCVPQYNKYREERVILFLKMASGHAFQPDLVKRIRDAIRMGLSARHVPSLILETKGIPYTLNGKKVEVAVKQIIAGKAVEQGGAFSNPETLDLYRDIPELQGF

SEQ ID NO: 1378 - DNA, 5271 bp, Homo sapiens
atgcggcggcgggaagggcggggagaggcggtctccagccccaggagccgcggggcaggcggggagcaaggcctaggctctgccagggcagcagctgcccgagtcccggggcgcgcccagggcgtagaaaaaggagagcgtcgctttcctgctccccgcgccctggcgaagaatctgaaaaactcaatttctgactgcagctttgtggtagagttctccgatgaacaaccggtggaggacacaatatccccaacactgacaggcagtcaggagataacgtttccgggagaaaacacacggcaaaggctggcaaccacttatgattccttaatctgctacctctgggcttcccaagatgagaggataaagagtgacctgttcaaagaatggaagaaccctaagacaggagtgatagagggtcacggggtcacagacaacatacagagattctcctcactgccaccttacctacctgtgagctaccacatcctcagagcagagacctccttcttcctcaaggaagccaaccaggacctgctgcggaactccagcctgcaggcgagggtggagtccttctttacctacaaaaccaggcagcccccagtgctcaatgccagctatggacccttttctgtggagaaggttgtgcctctggacttgatgttgacttcaaactttttaggtccaaccaataagtttagttttgattggaaactaaaagcccacatcctgcgggacaaagtctacctgagccggcccaaagtgcaggttcttttccacatcatgggcagagactgggatgaccacggcgccggggagaagctgccatgcctgagggtctttgctttccgagaaaccagagaggtgcggggcagctgccggctgaagggggacctggggctgtgtgtggctgagctggagctcctgtccagctggttcagtgccccgacggtgggtgccgggaggaagaagtccatggaccagccggaggggacccctgtggagctctactacaccgtgcacccaggaaacgagcgaggggactgtgccgggggtgacttcaggaagggcaacgccatccgtccaggaaaggatgggctggaggaaaccacgtcccacctgcagaggatcggcaccgtcggcctttaccgggcccaggacagcgcccagctcagcgagctgcgtttggatggtaacgtggtcatctggctgccttccaggccagtcaagcagggagaggtggtcacggcctatgtcaccatctcgagcaattcctctgtggacctcttcatcttgagagccaaggtgaagaagggggtgaacatcctgagtgctcagacccgtgagccccggcagtggggcgtcaagcaggaggtgggcagcggcggaaagcacgtgacggccaccgtggcctgccagcgcctggggcccagcccacgcaacaggagcagcagtttattcaatgaggttgtgcagatgaactttgaaatagccagtttcagcagcctttcagggactcagcccatcacgtggcaggtggagtacccacggaaggggaccacagacatcgccgtgtccgagatctttgtcagccagaaggacctggtgggcatcgttcccttggctatggacactgaaattctgaacaccgccgtactcacaggaaagacagttgccatgcctatcaaggtggtctctgtggaggagaacagtgccgtgatggacatctcagagtcggtggagtgcaagtccacagacgaggacgttatcaaagtgtctgagcgctgtgactacatctttgtcaatggcaaagagatcaaaggaaagatggatgcggtggtgaacttcacataccagtacctgagcgcccccctgtgtgtcaccgtgtgggtgccccggctgcccctgcagatcgaggtctctgacacggagctcagccagataaagggctggagggtccccattgtgaccaataagaggcccactcgtgagagcgaggatgaggacgaggaggagcggcggggccggggctgcgcactgcaataccagcacgccaccgtgcgggtcctcacccagtttgtgtctgagggcgccggtccatggggccagccgaactacctgcttagtcctaactggcagttcgacatcactcacctggtggcagacttcatgaagctggaggaacctcacgtggccaccctccaggacagccgggtcctggttgggcgagaggttgggatgacgaccatccaggtgttgtctccactgtctgactccatcctggcagagaagacaataaccgtgctagatgacaaagtatcggtgacagacttggccatccagctcgtggctgggctgtctgtcgccctttaccccaacgcagaaaacagcaaggccgtaacagctgtggtcacagctgaggaggtgctgcggacccccaaacaggaggctgtattcagcacgtggctgcagttcagtgatggctctgtgacgcccctggacatctacgacaccaaggacttctccctggcagccacctcccaggacgaggctgtcgtgtcagtcccccagccccgctctcccaggtggcccgttgtggtggccgaaggggaaggccagggcccactgatccgagtggacatgacgatcgccgaggcctgccagaaatctaaacgcaagagcatcctggctgtgggcgtcggcaacgtcagggtcaagttcggacagaacgatgctgactccagccccggcggggactatgaggaagatgagatcaagaaccacgccagcgaccgccggcagaagggccagcaccatgagcgcacaggccaagatgggcacctctatggcagctctcccgtggagcgtgaggaaggggctctccgaagagccactaccacggccaggtccctgctggacaacaaagtggtgaagaacagtcgggcagacgggggcaggctggcaggagaggggcagctgcagaacatccccattgacttcaccaacttccctgcccacgtggacctccccaaggccgggagtgggctggaggaaaacgacctggtgcagactccgcggggcctgagtgatctggagatagggatgtacgccctcctgggggtgttctgcctggccatcctcgtcttcctgatcaactgcgccacctttgccctgaagtacaggcacaagcaagtgcccctggaaggtcaggcctccatgacccactctcacgactgggtgtggcttggcaatgaggccgaactcctggagagcatgggggatgcgccgccgccccaggacgagcacaccaccatcatagaccgcggaccgggggcctgcgaggagagcaaccatctcctgctcaatggtggctcccacaagcacgtgcagagccagattcacaggtcagccgactccggggggcggcagggcagagaacagaagcaggaccccctgcactcgcccacctccaagaggaagaaggtgaaatttaccacctttaccaccatccccccggacgacagctgccccacggtgaactccatcgtcagcagcaatgatgaggacatcaaatgggtgtgtcaagacgtggctgtgggtgcccccaaggaacttagaaactatctggagaaactcaaagataaggcttaggcccctctagccaaagggccctgcccagatgccttccttgtactggaaactggcccaagtggggcagaaggcgttgtcagtggggttaagaagggacggtcccagggtccatgctagaccagttggaaagttttgaagtcaggaaaagacgtttttgtatcaagggatttttagcagttaatggtggtggatttttaaaggtcaggggaataaagtctggggcatggggagtgcagaccaagttactgaactgcacaggcaaaattaggaaggttattttatgagtcaaaacatactacagacaagctaccaaaaattatttgttaaaaaatgcaacaagacaaataaaaagagaaataatcatctgtttatatttctaataaaggagcaaaatataaaaataggacctgctaagagacattttccattctaattcacgattcacttttccaaggacagccttcaactgtcaccacacagctgggggggagtcatttcttaacaagggatgcctcttgggatagaactagggagttttaaatctttacttgatcatcttttattttcttttccactttttccttttttctctctctctgtgtcctagacttccattgcatttatatttaatgtttatttctgagaatcaagcagtatatttttcctaaatgaaacataaattatattcctattcattagataggttcctaggaacaatgccaattaatccattgtttaagtagtaacttgaatgtttttctatatccctccagctttgttgatagtggcgggttttgtacaattggagggagccctcagagccttctgggggaggagaggaactgtccttaatccatcaccactaccatagggcaaagccagcaggtgtggccctgtgaggggctgtacagacgggatgtggccaggagaacagagccccacctggaccacctgacccctcgggattccacccctgtcatcgtggggatgttcctatatgggagaaagttgggttaaatcaaaaaagaggccacgcccaggtgtaatcagagccaacctggtgggcttggtctatcacaagacataactgatgctgaacatgaacaaagataaaaactgtttggagggtttttgagttgtttttcttatgttgttgggtggggtataccagcataaactctaaagataaaatctatgttagattgtcaatcaactgtgtttttgaacagcataattgtgtagcagcacattgcaaaaatgcattcatccaaagcgacacatgtggcaacgtagaccacgccagtgaaataagccccttcgtgatcacctgactccagttctccgtgtgctccattggctgcggctgcaggaggaagatgcctgacagccctcatgctctccgcaggggggcgctcacaaagatgccaggggtgtttattgtgtttatttttttaattactaaaatcagtagctaagaaagggtccttgaagcctcctaacctgggttggacctttgaaaaatatatttgtagcacatattatagatggaaagaagaagatatttatttatacctgtgatgccaattgtcattaaaaggcttttcatggcttgacaagtca

SEQ ID NO: 1379 - protein, 1216 aa, Homo sapiens
MRRREGRGEAVSSPRSRGAGGEQGLGSARAAAARVPGRAQGVEKGERRFPAPRALAKNLKNSISDCSFVVEFSDEQPVEDTISPTLTGSQEITFPGENTRQRLATTYDSLICYLWASQDERIKSDLFKEWKNPKTGVIEGHGVTDNIQRFSSLPPYLPVSYHILRAETSFFLKEANQDLLRNSSLQARVESFFTYKTRQPPVLNASYGPFSVEKVVPLDLMLTSNFLGPTNKFSFDWKLKAHILRDKVYLSRPKVQVLFHIMGRDWDDHGAGEKLPCLRVFAFRETREVRGSCRLKGDLGLCVAELELLSSWFSAPTVGAGRKKSMDQPEGTPVELYYTVHPGNERGDCAGGDFRKGNAIRPGKDGLEETTSHLQRIGTVGLYRAQDSAQLSELRLDGNVVIWLPSRPVKQGEVVTAYVTISSNSSVDLFILRAKVKKGVNILSAQTREPRQWGVKQEVGSGGKHVTATVACQRLGPSPRNRSSSLFNEVVQMNFEIASFSSLSGTQPITWQVEYPRKGTTDIAVSEIFVSQKDLVGIVPLAMDTEILNTAVLTGKTVAMPIKVVSVEENSAVMDISESVECKSTDEDVIKVSERCDYIFVNGKEIKGKMDAVVNFTYQYLSAPLCVTVWVPRLPLQIEVSDTELSQIKGWRVPIVTNKRPTRESEDEDEEERRGRGCALQYQHATVRVLTQFVSEGAGPWGQPNYLLSPNWQFDITHLVADFMKLEEPHVATLQDSRVLVGREVGMTTIQVLSPLSDSILAEKTITVLDDKVSVTDLAIQLVAGLSVALYPNAENSKAVTAVVTAEEVLRTPKQEAVFSTWLQFSDGSVTPLDIYDTKDFSLAATSQDEAVVSVPQPRSPRWPVVVAEGEGQGPLIRVDMTIAEACQKSKRKSILAVGVGNVRVKFGQNDADSSPGGDYEEDEIKNHASDRRQKGQHHERTGQDGHLYGSSPVEREEGALRRATTTARSLLDNKVVKNSRADGGRLAGEGQLQNIPIDFTNFPAHVDLPKAGSGLEENDLVQTPRGLSDLEIGMYALLGVFCLAILVFLINCATFALKYRHKQVPLEGQASMTHSHDWVWLGNEAELLESMGDAPPPQDEHTTIIDRGPGACEESNHLLLNGGSHKHVQSQIHRSADSGGRQGREQKQDPLHSPTSKRKKVKFTTFTTIPPDDSCPTVNSIVSSNDEDIKWVCQDVAVGAPKELRNYLEKLKDKA

SEQ ID NO: 1380 - DNA, 2721 bp, Homo sapiens
gtcggcggcggcggggccggtcgatggcccgggcggcggcggcggcatgcggctcctgttcctggcggtgctgcggccacacaccggcaacgcggtcacggcccagcgcgttcgggcccatctagaggctgcagggcacgtgtgcgttttgaaggatgcctttgactttgaaagccgatctgagattgcaaacctcatcttggctgagaactgcgaggctgccctggctcttcatctctataggggaggcaggcttttgcaaggccaccgaatcccttttggagtcatctttggtggaactgatgtaaatgaagatgccaaccaggcggaaaaaaacacagtcatgggcagagttcttgaggaagccagatttgctgtcgctttcacagagtcaatgaaggaaatggcacaagcgcagtgggtcgatccagtgtttacaagggaagtgaaagccaaagtgaaaagagccgctggggtacgattgattggagagatgcctcaagaagatctgcacgcggtggtgaagaattgcttcgcggtggtgaatagctctgtctctgaaggcatgtcagctgcaattttggaggcaatggatttagaagtaccggtattggccaggaacatccccgggaatgctgccgtggtgaagcatgaagtcacagggctactgttttccaatcctcaggagtttgttcatctggcaaagagactggttagtgatcctgcattagaaaaggaaatcgtagtgaacggaagggaatacgtgagaatgtatcattcatggcaggtggaaagagacacctaccaacagctcatcaggaagctggaaggaagcactgaagattgagggccccgcctcatcagacacctgctctctgacacacagctctgggtgcacactcagagacagagttctggatcacgtgggcccagtgcagttcaaataaaaccagcctcagcggaatcctagaaaatgttagtcgtgagtccccagagccactgcattcatcccatatccttctgtgcgttcagatgctgtcccaggcgtgttcaccagccagtcctgatggaggtgcatgagtgactgggttgactgggacagggaaaggggaactggttttcagggaatttgggagagaatttgattacctgccttagggctttggtgtggacaatagaggcttattttcaagcagtcatggttcagactcctcccgcctgccttctgaccaacctctccccatcgttgccagtttgaaaggcaaaagcaaaacagacgtgtcagctgagccgagtcctcgcaggatttttgttgtgatctcaggactctgacaggcacgtgggtgacccgaggcttctctgaacactagaaagcgctgtgagtgagctcacgcccggcacagctcacttttcaatggtggaattgaaagttgtgctttttagaaaagtggccaggctgcccgcaggccccgcccacctcttggctgaatttgagtggaaaaccaggaaggaacaagcgccacgtcacgcatagcctgcaaatcgcccgcgtgaccctgagatggaggcctgaggctttgggtccagggtgggctcttccccttcccacatcagggacccggggatggatgtcggaagggtcaccagcctccagcctttggcaggatggagcttgggtctgcagggctttgcagccacacagcgaggtcagtccggggccagccgcgccatcatggtaatggtggcctcgccccatccatgtcatccatgtcacatgaggacgtgcagtcttccttgtcctctcctagtggaatttgcctgggagaacctccactgaatactgaaattgttgcatgcctgtggattccttacgacaatggggaacgcggtgtttcccacctcttgtgggtagaaagcagtctgctttgaggaggcgagaaggcaaagccagggcagggcgttgctgtgggaagcgttcggtgaaagcgggtttcgacgcttaggagggccgagggagaagattccaccagcattgtccttgcttcaagttttaggatgtctgaactttcagctttcatgttttcaaccatcatttttttaatggcacaacctacatcttgtttttaaaagaagtagcctcaaattaaactccttaaactctgatgccctggggatgagaacaactagcttggatctcgtgccgtgtaattcaatgtttcattccgctgcctccatcatgtaatagaatcgctttccagaaaggcagttaactggaagcagcagaggctcccagccgtgagaggactgctcaacaatgccccccatcgccgcccccccacccctcgcaccccttgtgttttccctctgaggggcccaagggttatggctttcatgtctaggtgtggggacagaggagggagaggcagatcctgggccgggagaggatggcctggtctgaatctggagtaattaatgccacccaaagaaaaggccctgccaggtccaatgttgtcttagatctgatgatgctgctatttacaaaacactgatcgtccgaaagcttgaatctgttcctcctcgaatgaccctgtagatgcctgacctccaccgtacctccacatcactattcatgtccttctaggaaaatgtgcacatgcctcacgcactatgtgggaagggcgtgtttttaaattaataaagtgtgtcaccattagccatacg

SEQ ID NO: 1381 - protein, 266 aa, Homo sapiens
MRLLFLAVLRPHTGNAVTAQRVRAHLEAAGHVCVLKDAFDFESRSEIANLILAENCEAALALHLYRGGRLLQGHRIPFGVIFGGTDVNEDANQAEKNTVMGRVLEEARFAVAFTESMKEMAQAQWVDPVFTREVKAKVKRAAGVRLIGEMPQEDLHAVVKNCFAVVNSSVSEGMSAAILEAMDLEVPVLARNIPGNAAVVKHEVTGLLFSNPQEFVHLAKRLVSDPALEKEIVVNGREYVRMYHSWQVERDTYQQLIRKLEGSTED

SEQ ID NO: 1382 - DNA, 630 bp, Homo sapiens
atgagaaagcgcagcggcccggggcagcctcctccccgccgccccgccgcgggctcccgggccccgcgggggccgatcccccccggcctgcagcccagcctgcggggggcgcagcgcctagtcccgcccgcgtcgcccgccagccccgggacagcccgcctggcgcgcggggctctgcgcgctgcgaccctccccggcagtcccgcccgcctctcctcgccctctctctgcctggcctccaactttgcctctcgctatcctctccgccggcgccccctttcccggcggtccccgggatggtccccggcaccccgaggacgccgaggttacgggaagttcggggactggcgggagaaggggtttgggggtggtccgcggcgaggggcgcggggtgcatcttctcttccttttatgctgagtgggtcagctcatcacaggcctgcggcccctgcatgggtgacagaggaggcaaagatgacacagagaaactatcccttcagggacagagtggggacacccacgagcttggctctgccttacaaagaaatgagaaggaaccccgttcctgcttttcaccttagggctgccacacttgtgtatcccttcttccttgaatttaaccaggagtga

SEQ ID NO: 1383 - protein, 209 aa, Homo sapiens
MRKRSGPGQPPPRRPAAGSRAPRGPIPPGLQPSLRGAQRLVPPASPASPGTARLARGALRAATLPGSPARLSSPSLCLASNFASRYPLRRRPLSRRSPGWSPAPRGRRGYGKFGDWREKGFGGGPRRGARGASSLPFMLSGSAHHRPAAPAWVTEEAKMTQRNYPFRDRVGTPTSLALPYKEMRRNPVPAFHLRAATLVYPFFLEFNQE

SEQ ID NO: 1384 - DNA, 3260 bp, Homo sapiens
tcgaaacagctgccggctggtcccggccgaggccggcgcagggagggaggagccgcccgggctgtgggggcgccgcgagctgggccggcctcggtgtgcccgcgccgccagcccgctccagacgcgccacctgggcgctccaagaagaggccgaagtttgccgcggccgtgagttggagctcgcgccgggccgctgcgccgggagctccgggggcttccctcgcttcccggtattgtttgcaaactttgctgctctccgccgcggcccccaactcggcggacgccgggcgcggagagccgagccgggggcgctgtgcgcagcgctcgggccaggccgggcgggcatgggcgggggcccgagcaggggtggagagccggggccagcagcagcccgtgcccgggagcggcggcgctgaggggcgcggagctccccgcgaggacacgtccaacgccagcatgcagcgcccgggcccccgcctgtggctggtcctgcaggtgatgggctcgtgcgccgccatcagctccatggacatggagcgcccgggcgacggcaaatgccagcccatcgagatcccgatgtgcaaggacatcggctacaacatgactcgtatgcccaacctgatgggccacgagaaccagcgcgaggcagccatccagttgcacgagttcgcgccgctggtggagtacggctgccacggccacctccgcttcttcctgtgctcgctgtacgcgccgatgtgcaccgagcaggtctctacccccatccccgcctgccgggtcatgtgcgagcaggcccggctcaagtgctccccgattatggagcagttcaacttcaagtggcccgactccctggactgccggaaactccccaacaagaacgaccccaactacctgtgcatggaggcgcccaacaacggctcggacgagcccacccggggctcgggcctgttcccgccgctgttccggccgcagcggccccacagcgcgcaggagcacccgctgaaggacgggggccccgggcgcggcggctgcgacaacccgggcaagttccaccacgtggagaagagcgcgtcgtgcgcgccgctctgcacgcccggcgtggacgtgtactggagccgcgaggacaagcgcttcgcagtggtctggctggccatctgggcggtgctgtgcttcttctccagcgccttcaccgtgctcaccttcctcatcgacccggcccgcttccgctaccccgagcgccccatcatcttcctctccatgtgctactgcgtctactccgtgggctacctcatccgcctcttcgccggcgccgagagcatcgcctgcgaccgggacagcggccagctctatgtcatccaggagggactggagagcaccggctgcacgctggtcttcctggtcctctactacttcggcatggccagctcgctgtggtgggtggtcctcacgctcacctggttcctggccgccggcaagaagtggggccacgaggccatcgaagccaacagcagctacttccacctggcagcctgggccatcccggcggtgaagaccatcctgatcctggtcatgcgcagggtggcgggggacgagctcaccggggtctgctacgtgggcagcatggacgtcaacgcgctcaccggcttcgtgctcattcccctggcctgctacctggtcatcggcacgtccttcatcctctcgggcttcgtggccctgttccacatccggagggtgatgaagacgggcggcgagaacacggacaagctggagaagctcatggtgcgtatcgggctcttctctgtgctgtacaccgtgccggccacctgtgtgatcgcctgctacttttacgaacgcctcaacatggattactggaagatcctggcggcgcagcacaagtgcaaaatgaacaaccagactaaaacgctggactgcctgatggccgcctccatccccgccgtggagatcttcatggtgaagatctttatgctgctggtggtggggatcaccagcgggatgtggatttggacctccaagactctgcagtcctggcagcaggtgtgcagccgtaggttaaagaagaagagccggagaaaaccggccagcgtgatcaccagcggtgggatttacaaaaaagcccagcatccccagaaaactcaccacgggaaatatgagatccctgcccagtcgcccacctgcgtgtgaacagggctggagggaagggcacaggggcgcccggagctaagatgtggtgcttttcttggttgtgtttttctttcttcttcttctttttttttttttataaaagcaaaagagaaatacataaaaaagtgtttaccctgaaattcaggatgctgtgatacactgaaaggaaaaatgtacttaaagggttttgttttgttttggttttccagcgaagggaagctcctccagtgaagtagcctcttgtgtaactaatttgtggtaaagtagttgattcagccctcagaagaaaacttttgtttagagccctccctaaatatacatctgtgtatttgagttggctttgctacccatttacaaataagaggacagataactgctttgcaaattcaagagcctcccctgggttaacaaatgagccatccccagggcccacccccaggaaggccacagtgctgggcggcatccctgcagaggaaagacaggacccggggcccgcctcacaccccagtggatttggagttgcttaaaatagactccggccttcaccaatagtctctctgcaagacagaaacctccatcaaacctcacatttgtgaactcaaacgatgtgcaatacatttttttctctttccttgaaaataaaaagagaaacaagtattttgctatatataaagacaacaaaagaaatctcctaacaaaagaactaagaggcccagccctcagaaacccttcagtgctacattttgtggctttttaatggaaaccaagccaatgttatagacgtttggactgatttgtggaaaggaggggggaagagggagaaggatcattcaaaagttacccaaagggcttattgactctttctattgttaaacaaatgatttccacaaacagatcaggaagcactaggttggcagagacactttgtctagtgtattctcttcacagtgccaggaaagagtggtttctgcgtgtgtatatttgtaatatatgatatttttcatgctccactattttattaaaaataaaatatgttctttagtttgctgctaaaaaaa

SEQ ID NO: 1385 - protein, 581 aa, Homo sapiens
MQRPGPRLWLVLQVMGSCAAISSMDMERPGDGKCQPIEIPMCKDIGYNMTRMPNLMGHENQREAAIQLHEFAPLVEYGCHGHLRFFLCSLYAPMCTEQVSTPIPACRVMCEQARLKCSPIMEQFNFKWPDSLDCRKLPNKNDPNYLCMEAPNNGSDEPTRGSGLFPPLFRPQRPHSAQEHPLKDGGPGRGGCDNPGKFHHVEKSASCAPLCTPGVDVYWSREDKRFAVVWLAIWAVLCFFSSAFTVLTFLIDPARFRYPERPIIFLSMCYCVYSVGYLIRLFAGAESIACDRDSGQLYVIQEGLESTGCTLVFLVLYYFGMASSLWWVVLTLTWFLAAGKKWGHEAIEANSSYFHLAAWAIPAVKTILILVMRRVAGDELTGVCYVGSMDVNALTGFVLIPLACYLVIGTSFILSGFVALFHIRRVMKTGGENTDKLEKLMVRIGLFSVLYTVPATCVIACYFYERLNMDYWKILAAQHKCKMNNQTKTLDCLMAASIPAVEIFMVKIFMLLVVGITSGMWIWTSKTLQSWQQVCSRRLKKKSRRKPASVITSGGIYKKAQHPQKTHHGKYEIPAQSPTCV

SEQ ID NO: 1386 - DNA, 1145 bp, Homo sapiens
atggagcgctttgtccgtgttccctatggcttgtaccagggttatgggagcacagtgcctttgggccagcctggactctcagggcacaaacagcccgactggaggcaaaatatgggtcctcccacttttctggccaggccagggctgctggtgcccgcgaacgcccctgactactgcattgacccttacaagagggcgcagcttaaggccattctctcccagatgaaccccagcctgagcccgcggctgtgcaagcccaacaccaaggaggtgggcgtgcaggtgagcccgcgggtggacaaggctgtgcagtgctctctggggcctcgcaccctcagcagctgctccccctgggacggcagagacccccaggagcccctgccagcctgtggggtcacttcgcccgccaccggccgcaggggcttgatccgcctgcggagagatggggacgaagcggagagcaaggcgctcccgggccctgcggaggccagccagccgcagccaccatcacggaggtcaggagctgacaggcaggaggagcccgggcagctggaggaatcgggggagaaagacgccccgtgccctcaggagacgaagagcaagcaggtgcctggagacgccgcctccgagccgctccggaggcccaacttccagtttttggaaccaaaatatggctatttccactgtaaagattgtaagaccaggtgggagagtgcttacgtgtggtgcatttctggaacgaacaaggtttatttcaaacaactctgttgtaaatgccaaaagagttttaacccttatcgagtagaagcaatccaatgtcagacctgctcaaagtctcattgttcctgtcctcaaaagaagagacacattgatctaaggaggcctcatcgacaggaactgtgtggtcgctgcaaagacaagagattctcctgtggcaatatttacagctttaaatatgtgatgtgacttgtacagtgtgacttgtaatggacccctgagctcttcttgtaacttactgtgctgtcttccttttttgcaacttggctctgacctggcatcggaaaatggctaggcttttgtactttttgtagattgtgtaacaattgtacaatgtgaatagaataaaataaatgcatgtgaactag

SEQ ID NO: 1387 - protein, 321 aa, Homo sapiens
MERFVRVPYGLYQGYGSTVPLGQPGLSGHKQPDWRQNMGPPTFLARPGLLVPANAPDYCIDPYKRAQLKAILSQMNPSLSPRLCKPNTKEVGVQVSPRVDKAVQCSLGPRTLSSCSPWDGRDPQEPLPACGVTSPATGRRGLIRLRRDGDEAESKALPGPAEASQPQPPSRRSGADRQEEPGQLEESGEKDAPCPQETKSKQVPGDAASEPLRRPNFQFLEPKYGYFHCKDCKTRWESAYVWCISGTNKVYFKQLCCKCQKSFNPYRVEAIQCQTCSKSHCSCPQKKRHIDLRRPHRQELCGRCKDKRFSCGNIYSFKYVM

(The sequence listing continues in the following parts.)
